United States Patent Application Publication US 2007/0054278 A1 - sequence listing, part 109

SEQ ID NO: 98085 - DNA, 248518 bp, Homo sapiens
aatcaaattgaaactggaagaaaagaaaatattgatttaaatcagagaaaatataataataaatctacacaaacatgcttttaataagctgctaatttaagcatatatttaaatcatttctattcctttacttcagtaaaataattcttaaggcaaaataattttattttattttatttttttttgagacagagtctccctccgtcacccaggctggagtgcaatggcactgtctcggttcactgcaacctctgcctcctgggttcaagtgagtcttctgccccagcctcctgagtagctgggattacaggcacctgccaccacgcccggttacttttttgtatttttggtagagatggggtttcaccatgctggccaggctggtctcgaattcctgacctcaggtgatccacctgcctcgacctcccaaagtgctgagattacaggtgtgagccaccgtgcctggccttaatttatcttaatcagaagtagcatcatgttacattatacaactggtgaaattctcttcaacatcctttttataaaccaatatcaacatactgggggaaaaagtgtttagagttaaacttactgtgtaaatgtaatttttatattccattaaaaagcaacaatttttctgggagctctggtttggaaaggctcacggggttttaataagtgtgttcctattcattttgggcctgcattagggacaatttcttctgatggacatttctattacgcaatcactgcttaaagggtaatagtgtaggcttcagagccagacaaatgtatgtatttgatgcaggatagctgagtaatagcttggtcaaattactttaagtcttctcaacttagtttcttaactgcaaatggagctaacagggtcgtatggaagattacataagatattgcacattaagcacttagctcagtagctaacagctagtgaacctaatacatgatgtatgttatgataaaaatagtgattgtagaggacatttcacactgatatgatacaagtctctctttcattagtgtcttgttaaaggtttctaattttcccattgacaaattttcttttttttttggagatggagtctcgctctgccacccaggctggagtgcggtggcaggatcttggctcactgcaacctccgcctcccgggttcaaacaattctcctgtctcagcctctactacagttgggactacaggtgcaggacaccatgcctggctaacttttgtatttttagtagagacggggtttcaccatattggtcaggctggtctcaaactcctgacctcgggtgatccacctgccttggcctcccaaagtcctgggattacaggtgtgagccactgtgcccagccaaattttcttttcttttctttttttttttttttgagacggaatctcactctttttgcccaggctggcccgcactggcctgatctcggctcactgcaatctccgcctccggggttcaagagattctcctgcctcagcctatcgagtagctgggattacaggtgcctgccaccacagccagctaatttttttttgtatttttagtagagacagggtttcaccatgtttggccaggctgctctccaactcctgacttcaggtgatctacctgcctcagcctcccaaagtggtgggattacaggcgtgagccaccgcaccagccccacattaattaactttagtgttgtgagtgcattctgaatgattttttatggtattgacagggaaactagttttattgctcgatattattttcttgctgctttccaaaatgcataaacaatgatttagttcactgatagatttatacagaaaattttactttgtattcattttgatttttttatttgttccttttcattcagccccagaaaaaatgcaattaatcatgccaaggtatttacaaagccttatctgactagctccatcatgtgtctagaatgagttttacaattttaaaagttgcttccacttcactgctactatggtcttgaataagaataaatatctggctgggctcagtggctgaagtctataatcccagcactttagggggctgaggtaggcagatcatttgagatcaggactttgagagaccagcctggtcaacatggcgaaaactcatctctactaaaaatacaaaaattaaccaggtgtggtggtgggcgcctgtattcctagctactctggaggctgaggcaggagaatcacttgaactcaggaggcaagaggttgcagtgagccgagatagagccactgcactccagtgtaggtgacagagcatctcaaaaaaagaaagaaggccgggcacggtggctcacacctgtaatcccagcactttgggaggccgaggtgggtggatcacgaggtcagcagttcaagacaagcctggccaagatggtgaaaccccatctctactaaaaatacaaaaattagctgggtgtggtggcgggtgcctgtcattccagctacttgggaggctgaagcagagaatagcttgaacccggaaggcagaggttgcagtgagccgagattgcgccaccgcactccagcgtgggtgacagagcaagactccgtctcaaaaaaaaaaaaaaaagaaagaataaatatttggcaatatattactgaatcctctgaaaaacagatggaaatcagaattgggaaaatgttcctttttttttttgagacagagtctcgctctgtctcctaggctggagtgcagtggtgtgatcttggctcattgcaagctccgcctcctgggttcacgccattctcctgcctcagcctcccgagtagctgggactacagtcaccagccaccatgcctggctaattttttgtattttttttttttttttagtagagacggggtttcaccatgttacccaggatggtcttgatctcctgacctcgtgatgcacccgcctcggcctcccaaagtgctgggattacaggcgtgagccaccacgcccggcaaaaactgcttttatatatatatatgactttataataatctcatgctcatatatattataaaatgatatataatcatatataaatcatatgtacatataaaatctcatatatattataaaaaatgaacacaagcatacatcttcatcaaagtcctgcctactacagttagatgtacctcttgaaacttggaagagattatagattattagggcaataaaagtaaacgctaaaacatttttttaaaaaatcagaaatgatgatataatggactaatagtctcaaggtagtttttgataaatccaagactgatcaattgtcagtcgactgtcaatggcttattaagagattttcagtgtttcattgtatacctgggctaatcttgggaaaaaaactatgcctttgtctgtacatctcaaagcccatgtcaatctgactactaatgagggttgaccatggatgggatggtgtcttaggtagtgtttcttgtgttactggtaagctgacacttccgtcttggtaacctctgttcatacactcctaaaattcctgataggttttgttgttgttgttgttgttgttgttttgagacagggcttcactctgttgcccaggctggagtgcagtggcacgatcaaagctcactacagcctcgaattcccggcctcacatgatcttcctgccttagcctcccaagtagctgggactacaggcatgcactataatgcccagctaatttttattattataatttgttgatagagacagagtcttgctatgatgcccaggctggtcttgaatgcctggcttcaggcaatcctaccatcttggcctcctaaagcgctagcactgtaggcatgagccactgagcttggctgacctaataatattctgaagctgatatttccctatgagatatggagtcagacttatctgagactttatcatgtctgtgtgtacctaggcaatgcctagtacagatggcatgctgttttctttccaattcatactacataactatgtcagatgaatttcctgccctaaactatagctccaaatatggcagttccttgcacaaaactactgtcgcatttcattatgcttgcttctttcctgtatttattctttctaaaaatttatcgtttgttttccccatcctaaaattgtaagctcagtgagggcagggaccagttgtagctccagtgtttagctgtgctgtcttataacacacattcgattatattgttgccaaactatgtaaatgattactacaagaatttggacaatatggttttctttcaacttttaaaagtgagatataatgaacgtaccataagactcacccatttaaaaagcataacacagtggtttttagtatattcataaacttgtacaatcatcaccactaattccagaatattttcatcacttcaataggaaaatgcatacctgttagcaattacttccatttcccctctcccccagcccctagcaaaccactaacctactttttatctctatagatttccctatcctcaactttcatttaaatggaattatataatatgtggtcttttgctcctggcttaacacgatattttcgagattcatccatgttgtaacattttgtttacccttttagacaagataaagtttaataccctttctaactctatgctcagatagtcaagtgaagagctacaaccaaatttctttttcctttcttcctttcttctctctctctctctttctttcccttcttttttttttgacagaatcttgctctgtcgcccaggctggagtagagtggaacgatcccggctcactgcgacctccgcctcccctgttcaaacgattctcgtgcctcagcctcccgagtagctgagattacaggcatgtataaccatgccgggctaatttttgtatttttagtagagaaggggtttcaccatgttggtggccaggctggtctcaaactcctgacctcacatgatccaccaacctcagcctcccaaagtgctgggattgtaggcgtgagccacagcgccctgcctcaaccaaatttcagaaagtatcataatatcattatgcttcatagtttctctatgccctgaagtttaccaattttatcttctacagatcccaggaaggcagcctgttaagactcaccaaatttacttcctcagcctccagaacaataaaatcaaactccctaccttgattttaagattctgcttccccccaccccgccccaccccaatcttctccttggatattcgacagtctggaataatgcatttttacagttctgattgttttcagcagatgtgttggctgaggttggatggggtttcttcccacctatctctcctctctccttccctctgcccactgcacgtgcaacaacttttctgccatcaaaacgtgcaaaaaagaaacaagaaagaaaggaaagagaaagaaaagaaaaacagaaaaaagaaaagaaaaagcagccggaagtcttcctttgttttccaaggaaattcaggtaaaaggaggggtggggaaatgatatttttgactttgctcacaatccagacgtaggaaagaaaaaggatttcctttgggctgctgccacgactctgatgttttatgctgataaaatatttccttcttaaaaaaaagttctgggaaaatcatgccccttcaacttggaagcgaaacccaccctaactttcgtcttaaaacgcagcgaagtgaaaggtttgctcctctttcacgagggttttgttccttacagttcgggtcttgctaccaggagcgagctgggtccgcagcgttcttcggtggctggcgcgggaggaggactacaggatccagagatctttggaaactccagcagctccaagcttgttggctactacggtttccctgaggagtgacgctacgaaaacaaaccctgattggtcaggcctgagctgagttctccatttatggacagattgcccggcccgagccgagactcagccagaggagtacggattaagtggccgaagaaagaggagtgaggcaggggagcgaggcggacgctccgrgcgcatcggactcacctgggccggcggcgagcggcgagtacgagtggactcttgccctccgcagcatgcgccccgcctgctaagtcgccgccgtctcgccctcacctagcaccgccaatcccgcctggatggagtcccctctgggttcccattggctcctgtgagtgcttgggtgtcgggagcctgtttttggcgaggggaaccaacttttgaagttcgcccagaagactgcgttccagccccagttccccggcagcgggacccggcgaagacgcgaccgcggcgcgagtcaccatggtgagttggccgcgccgcgtcctaggacgccggacccggggacggggcaggaaaccccggcgtggtgcacccaccttgggcgcgctgccggggccaggggtggagaaggtggacgcgggagccggcacgtcgcgagctctgatttcctgccgctttccgtaaacccgggccgggggagagcgagcgaggggccaaggaaaactttattccaagtcggtttctgcgtcgcgaaactttctgtggccgggttgctatggctgccagctgtcggaagccagggtgtgggcgcatcggctgcgaggggcacggcgcgggagggggtcccctcctcctgctgggacgtggggggcgcagccggcaggggaggtgctcggagactcgcgccgcagccgctggcggcgtcccctgccctccccgcggccgtgcccgccccgccccgggcaccctcgcgccgactccctctcctccccgccgccgctccgctgcccggcagcgcccgcagctgtcccgcctggcagcggcacgcgggcgggggcggtccctggcccgccttggcgaggggcggcgcgggccgcacaaaggcaggcgggggcgccaggtagggcgagcacctggcggccggcgggctgtcaagagccagggagactcgggcgcgggcggcaaccacgccgccccggacctgtgccgggcgccggccccgagggtctccgcgccccggacgccaagtaaacacctcctgaagaggaccccaccccttcccaagcgcgaggggatcggggcttttcggggatccaggggacgcttcgcacgggaagacgccctcgcgagtttcgagtttgttgctgttttccctttggcactttgggaatgtgtggaaggggccgcctctttgacttgtgacttttctgctattccaactccccagtccagctacactcccctccctccctgtataaccttagccacctcccttgggctttggcgtggtgtacttttctttgcggggcacgaaagcaaggactctattttgaagagatcggcagttcatcaaaaaaaaaaaaatctattacaaggcttcatagtttccacacttgcttcttttcaagtagtcctgcttaggtggattatctcgtcctcttctggtttgctgttgttttctaatggctgtggaagagaagccaagtcaaaatgataaccagcacaacactaattaaaaaatcgatatcccggtgagcagcctgagggaagtgcagcagaggcccatcgaaacctgcacacaaagctcagaagcccccttgccccgtgctgtttattccaaagaatgattacaaacaaacatcaacgagaaacctttcaaggcatcctcggccaaagccttttctttttacatagtccaaaattaagtcacttttgccccatctaagagaacactttgtctatacatttcctcttctagttttaaggtttaagaagtcagtctactctacgttacttttggaccccttccctcaccccagcagagaaccattcccattgggcatgtgtttgggtgaagctacctcactgggcacctggtcccttgaagcagtgtgatagtcctggtacttgagaattgctgtaatcattttccgtgggtcaatatttcttaaaaaaatcaatgtgtttatgtcaagaacttaaagaatcttactgaatttaagtacttgagtggtaccttgaggaaattaacttcccctcagttaaactcatttttcatgctgaatggactgaaatatactctaggttgccttttccgaaacctgtgataccatgcttaattcagccccattgcagatgaagtagagggttggtcaaatgcatgcgaagaaggcatgctgtagggaagaggtggttctatctgaggacagtgtgtgacttccctattgatgggctccctgccatcagcacagatgggcatgttgtgtgcccccaggcgactatctgtgcatcagatatggttgctgaagtcacaattcactgatggaaaagttgaaacagctggctgtcctgaaacaggagatgtgccattgatagatctactggatccagagtgatttggccaaagttaatcatttctttcctgacttgaaaaattgttcattatgtatgtgaagttgccttagaatagagcatcatcttaaataatcagaaacccaagttacaatatttaatgtttatgtcagactctgtcaagccaaatgatacttcattttgtgttccacatctgcccaggcctgcccaagttgtatcccttcagctgcttagaacaggaagggaaaggacattaccttctttgggtgtggctgaagattagcatggaggctaaaattcatcagaaggcccttggcggccaggcgcagtggctcacgcctgtaatcccagcactttgggaggctgaggcaggaggaatacttgagcccaggagttcaagaccatcctgggtaacatagtgagaccctgtttcagttaaaaaatattaagaagaagaagaagaaaaagaaggcccttggctgggctatagggagaacacctataccgtggacttcttctgtgtgagtgtgtgtgtgtgcgtgtgtcttttaggaagtctggtagcatagtaggagggctctccatctgtacctgaggccctactaagactcattcagttgtgactcataaggaaaatagccattttcattttctgactcatgaacacagtgtacagcttgtagttcaccttctatcttcctcctgaaaactcactttgggacacttttctatcttgagaaaactaggaacactaccaggcaatagttacttgtgtctttttcctaaggagacttgaagaagttaaaaaaaaccctgcacatctttataatttagtggaggttgtttagcagagtacaaaaaaatctctgttgactttaaccgtaatacccatctaaggcttccttcgtagaatctgggcttatcatcatctgcaaaggaagttctgcttttgtggccatgaccagtttggactctctgatagactgaaacccatggctgtaggtccgctatgtgctttggatccagaaattgtgattcatttttatgcaaggtttctgtgcattaaatatacagaaatatttgagcaaatctgaattgaccatcacctcaaaacatgttcaagagctgttcccttttccttacttgcatatacttgtgaggaaattatagatatgacacataagaatacccaggaatagatttacaacctagaaatctgatgaatagctgatgataaggtaggtaagttcctttaggtgatggcatggcatgtatttagaaagtctggaatacatttcaaatgtttcctgggaaggtaacctacttgatttccacagattagtttatcagattgctagtagtctcctagtcaaaacaacacaatacaacaaaacaaaaccagaaaggaatgggatcaagcacaaaaaaagttttgatggaggcaaagsgttggggaaatacctagagtccgggacattatctagggacaagtgtgagtgggccatcctagtgggaaatatttgacagcccaggcatctccttggagagaaaatgggtggagcagtggatggagagggatggagaagtataagaagcagacatttactgaagttgaaagtcacctccaccacacttttgctgaggactacagtcttgtcagtggttgcaaactttttttttttgagttggagtctctcactgtcgcccgggctggagtgcactggcgcgatctcaactcactgcaacctccgcctcccggtttcaaacgattctcctgcctcagcctcccaagcagctgggattacaggtgcctgccacaacgcccagctaatattttgtattttttagtggagacggggttccrctatgttggccaggctggtctcaaagtcctgacctcgtgatcctcctgcctcggcctcccaaagtgctgggattacaggtgcctgccacaaygcccagctaatattttgtattttttagtggagacggggttccactatgttggccaggctggtctcaaagtcctgacctcgtgatcctcctgcctcggcctcccaaagtgattacaggcatgagccactgtgcccggccagtggttgcaaacttaaatgtcttataatttggtggagggaggctggcctctagagagtaaatatggaatatatgtgccattctaggaggcaccactacttgattctaggccatggttatatcgaccatattaccaaattatcttgtttttcaagagaaactagaaatctagatttttatgctatatctgccagttcttatttttatttattttgagacagagttttgctcttgtcgcccaggctggagtgcactggcgcgatctcggttcactataacctctgcctcccaggttcaagcaattctcctgcctcagccccctgagtagctgggattacaggccccaccaccacacccgcctaatttttgtatttttagtagagacagggttttaccatgttggccaggctggtctcaaactcctgacctcaggtgatctgcccgcctcagcctcccaaagttctgggattatagacgtgagccaccacgcccggcctctgccaatttttatatgtgatttgatcatctcagaggggccaaacacagctgcagattagctgtttgcagccactttattgtaagtcttaacatggtgtccttctgtgaaccacagtgattcttctcattcactcaccaggaagaatgtctaaacgttcactacatacccagtagtggcattcagtatttatccatacatccacaccttcctactgggtctccctaaagagagggaatagcctggtattttcagcctatgcattctctaagctattataacagggaaaatctgcatccagctgctactgtttggcgctatctcaacacctgtgtaggatggttccacgagtggtgaggctgcaaattgagcttttctcttcaacccttcaactccttcctccactgaaaatgccatggcctccaatgtcacatgatggacttcttgtttttcactcctttttcagttgaatctcatgaattggcggtctgtctcaggcgttttcctgagggttagataatgagcagcggcgtgcattctgataacttagaatacaacattttgcctctgtgcctagtgtgggcatgtgatgagcccctgtgagactcagtgaaagaacatatagtaccttgcgtttcctcatgagccaagtgtggggccttattattcattaggaatttgagaaatctctttttatctgcttcaacaagcagaaatattttaaatcttctgtgtaagtgcaaggtattataagcttcatggtaggatatataggaattatgtacagtcatggttttccaagtttgagtcatctcttttttttttttttttttttkkgaaaatgcagcaacttgtgtttttaccaatctgtgattaaaatgtttcttaatggtgagtttttaaaaactttttttttctttttctcaccatgctgaaatatttacaaagtaaataagaggttaaaggttaaatgccaaaggtattaaaataaacatctcagccttataagcacattctgtaatagtggtaaacaaattgtgttttgaatttcagtttcagaatttatgttggcagagacaaaaggttttggggcatcctagcaaagtatttttttcatatatctttgggacagccacacttaagagaagtacaactgtaaaagccagccctaacatagtgacatgaactttgacaacccatagaactcaaactgtacatgtgaatgaagttggcccgcccttctgagttaccaccatgagaatgacgtcattgccattgttcaaagcacttttgaatggtcatttatgagctatgtaataaaacctatttttttgccgggtgtggtcgttcaggcctttaccaaaaaaaattttaaaaattagccacgtgtggtgtcatgcactatagtcccagctacttgggargctgaggtgggaggatttcttgaactgaggagttcaagtatgcagtgagctgtaactgtggcactgcagcctgggtgagagtgagagagagagagagaaagagagagaaaaaaaaaagaaagagacagggctgggccctgtggttcacgcctgtaatcccagcactttggggggccgaggtgggcagatcacctgaggtcaggagtttgagaccagcttggccaacctggtgaaaccccgtctctactaaaaatacaaaagtagccaggtgtggtggtgcatgcctgtaatcgcagctacttgggaggctgaggcagagagaatcacttgaacttgggaggcggaggttgcagtgagcctagatcacgccattgcactccagcctgggcaacaagagtgaaactctgtctcaaaagagagaaagaagggaagaagagggaaggagggagggccttattttttattttttaactccttagtgcccagtgtgatcattcctattactcaccagactttgtattacatccctctcaggtgtttccagaagttacattgtgcctcaaaggcggaacaattagccccactaaagatatgcagtatccagcaggtccctttttcctggaataagtataagaactgctctgaaggaggcacactctcttgggtcttttgagctctgataatgtttgttacaaattcatttatagcactttatggtcatacgttacattatagaaagtaaaacataggctacattgtagaaagcccagaagagagcttaaaaattctatcctaaatccatttgttaacttcacagagagatctagagaggttaaattacttccaaagtctcatagctagtttttagctgagytggtgccagaatccaagttagatctgatccagtgcagatctaaccttattagatcccagtctaataaggtttttcttaccaaacagtggtgggaataattctttaagagtctggacgtgaccagatagttttctttctgggacttttcaagaaagtctgcttgtaggtggaaggttactgtactaacttcattataagaaatttagaagaattcagccgggcgcggtggctaacgcccgtaatcccagcactttggaaggctgaggtggagggatcacctgaggtcagaagtccgagaccagcctggccaacatggtgaaaccctgtctctactaaaaataaaaaattagccgagtgtggtggcaggcacctgtaatctcagctacttgggaggctgaggcaggagaactgcttgaacctgggaggccgaggttgcagtgagccgagatcacaccattgcmctacagcctggggcacatctcaaaaaagaaaaaaaaaaagaaaaagaaatttagaataattcacccaaagtacccccacaccctaacacagtaattatttttgtctctgggtttcctttcagtctgttcaaatgcattgtttctttgtttgtttgtttttcttgagatggagtctcactctgtcgcccaggctggagtgcagtggcataatctcggctcactgtaacctccttctgcctcccagtttcaagcgattctcctgcctcaacctcctgagtagctgggattataggtacacactaccatgcccggccaactgttttatttttagtagggacagggtttcaccatgttggccaggctggtcttgaactcctggcctcaagtgacccaccttgacctcccaaagtgctgggattataggcatgagccaccacaccgggcctcaaacacattgtttttatgtggttataattatggggcaaatatacaatttgtgttctgttatttttccacttgttttacaaatcctttttcttgataagcatatttgttatattttggtggcagtattataatcccatgtagccggattactcactgtgtgtcataactgtatggagacttcctccagaagtgtgtacaggggagagttcctccttccacccactagaaccgctgtggtcagtaatgggctgcttaatctttggctcctgagataagaagccccctctttgggtgagcttgggatgcatactccacattcccaggttctagcccaaaggtacctaccattggtgctccccctggattctggcgttgacactcaaatatgtgacaccagtgggtactcagacctctaggtcttccttggcaaatatgagtggtcttaccagagaacgggagtggatggagatggagagctttgaacctcaaagtggagagaagacattgccatggcaaaggaggttagcatacaggcttggtgaattagagctgggcatggtggctcaggcctgttatcccagcactttgggaggccgaggagggcagatcacttgaggtcaggagttcgagaccagcctggccaacatgtcaaaacccccgtctctactaaaaatacaaaaaaattagctgggtggggtggcgggcacctgtaatcccagctactcgggaggctgaggcaggagaatcgcttgaaatgggaggcagaggttgtggtgaaccaagatcttgccactgcactccagtctgggcgacagagcaagattccgtctccaaaaagatgaattagtctctctgcctctgcttatgagaagctccccatatagtggagaaatgataacaaaaggcttccatatacatgatttcatttcattctagcaccagtgttggtttttattgccattttacaggtaagaaaatcaaagtgtagtgaggggaggggaattacttagggccacacaatttgtatgtgaccagccagatctgctaagtccatgctctttgaaaagtggttcaataaattatttctaaatttgacaatgccgagtccacgtatttgtatactttttcattatttcacatactcctgagggaaggtaaggctgatagaaaatcaccaattttggttgattttattcagtaataccagaggggataatttagacttaagaacattgtctgttatgaatagtagtgttctgagttttaatttccttgctttgggactttgccaaagagactagaagatgtcatagtgagagcaagcataaaagtaaaagaaagtaatactggccgggcatggtggctcacgcctgtaatcccagcaccttgggaggccgaggcgggtggatcacgaggtcaggagatcgagaccatcctggctaacatggtgaaaccccgtctctactaacaatgcaaaaaaaattagccaggcatggtggtgggcaccagtagtcccagctactcaggaggctgaggtgggagaatggcgtgaacctgggaggcggagcttgcagtgagccgagatcgtgccactgcattccagcctgggtgacacagcgagactccgtctcaaaaaaaaaaaaaaaaaaagaaagtcatactagaaggctctctaatcttaactaggattaaaaaaaatagaaaataggaaaatgtgagaacaacagagatttagttgtttaattcttaaatacattacagaatacaacaacaaaattagaatatcacattgttagtctcctaataatttcttcggtgtgaccaccatttgatgttgacagcaatttaggataacattacatggtcacagaatattttggacagtattatctgattctaagaaattttcaatgaaaaaataatagggctgtttttggtgtcctaggaagatgcagaccttatagaaaattttagatttaaatgcagaagaatctaataagctattttaagaatgtaagtaaagatagcttccttcaaggcttgggaatgctgtaatgcagaaatatgcatcaatgcaaaatgatgacagtgccctttctccacatcagattatcagagattcctaacatttggatgggagaatgtcctgagtcctctgagaatatgttggaagctactgaccttttccctgacagtgtttataataacaaataaacattccgcagatcacgagaacaaacaaaacaggaacaatctaaatgttcattggaagagaaatacatgtggcttgtttgataatatggtatcaatatgcataggtgtcacaagggtagtgtttggtaaagaagcaagttgtagaaagacgcatatctgaaaccatgtaagaaaaatgtcaaaaacacaaaataagactgytatttgggggtctatacatttatttgtgtatgtgtacatatatgtatttgtgtggatattattttaaaaaatataggctgggcgtggtggctcatgcttgtaatcctagcactttggaaggccgaggcgggtggatcacctgaggtcaggagttcgagaccagcctagccaacatagcgaaaccccatctctactaaaaatacaaaaattagcctggcgtggtggtagacgcccgtaatcccagctactcgggaggctgaggcaggagaatcgtttgaacccaggaggaggaggttgcagtaagctgagatcattccactgtactccagcctgggcgatacagcgagactccatctcaaaaaataaataaattaattaataaattaattaaaaaaatccacagactagaaagatccacaccaagttcaaaatactgaagggggaaagaggaaagggagacgactgagtcagtaatgttttatttgctttacatatagaaaaatccaaagcaaatatgatgagatattattaattctaggcagttgtacatatatatttctttgttatcctctgtagttttaacatcttttctcagttcagatgaaaaaatacatataattcttcatttaacttcaggaggtttataaacccctgaagcccatacagtagcattccaagaattacaactaacattgtcttgaaatgagtattagggagtatggtcaattttggatctatgtcaggttatttcaatgacagttgacatacagtcgcatcaatagtgagtcccactgactattgtgtaaagagccattaggggatatgtctcccaatgttcaatacatcttagctctgcttagccaccttttcttgtgttagcttttggtgtgaccaatcacccaaactcagtaacttaaataataaatgtttatactttcttatgattttgtgcactggcgtggcagttctggtctcagctggttcattcaatcactgtggtcagctagtggcttggctgggaatggatgatctagggtggcctcactcacatgtctggtagttggtccagtctcagctggggccatgggatggcttggccatgtgtctcttgtcacaacagtctagctctggcttgtttacatagtagtggtcacaccacagggttcccaagaaaagcaagggtacaagctccagggcacacacatttttcaacccttgcttgcgtcatgcttgctattatccccattggctgaagcaagtcacactgtcaagtccagagtcactgtggaagaggactgcccaaaggctcagattcagttccctaccctcaaccttttctgtcaactttcctacattgcgggaatacttggaggcaggaatagattgagtggtagctccagttttctctggctgatcccctgaacccctttgtttgacagaagccagcatggctcctgctctgtctgctgctgctttcccaagcaaggcatgaggaatcggagctgaagtccttttgtagtgatgaggctcagtctcattctaaaactgctgtcttttgttgggggaaaaaaagggcaaaaacagaagctaacaacaagaaggaaaatcattttctatctgctaaagggtgctttacaagaataacaaacattttacattaagtccaaagttagagagcaatgaatcatgccaaaccatgctgggctcgatggcctgctggacagaaaggggaatgcaggccttccaaggtggggacaatacttcttgctgcccaattctgcattttcgcccacctctgagctgtccatgtgaagaaagacattccacacacagacaaaaattcttttttttttccccttggttgaaagtcatgtcttttggactgtaagatggttctcaaaataaccctgtgtcaattccatattctgtgagccacagattttgctatctgtgggctcgtcaagacgtgaatcgagtaggattagtttagcttcgtgcccaggacttgtacaggacgtgaaaaattccttgacctcctgatctttcactttgactttctgttctgtctttcaatcaaaaatgtaaaaataagtaagttggagagaaaacaaatccctcaacttcagccgttgacaactcatgaccaatcttgatttcactgttcttatcttcccctggtttctttagaagcaaatcctagatagcataccatttcatccataaatatctccatattatattggctttcacatagagcaaagctagacactaactgctcattggactgaaagaagagatatactcagagaaccaaagcaaatagcttccctttaagttttaataggagtggctttgttttatagaacgctgtaggcatctccagccactgaggggacttcttcaagcttggcccagcctcatccacagaaggatctggcagtgatatcttggcattcatagtctcagtgtgcaggacagcattggttccccaccctacagtcccagctctacctaggcagtatcatatgtatcatggtaatggctatggaaaataatatccctccctccctgcctcccttcccctcttcctctttttagagatgaggtcttgctgtgttgcccaggctggtctcaaactcctggcctcaagtgatcctcctatctcagcctcccaaagtgctgggattacaggtgtgagccaccgcatgcagcctctttcttttttgacagggtcttgctctgccatccaggctgaagtgcagtggtgtgatcttgtctcactgtagcctcaacctcctaggctcaagagagcctcccatctcagcctcttgagtatctgggactacaggcatgagctgccatgcctagctaattaaaaaaaaaaatatatatatatattatatatatatacacatacatatatatatatatgtatgtaaaatatatatatattttacagggtctcactttgttgctcaggctagtctagaactcctggtctccagcgattctcctgccttggtggcccaaaatgctgggattataggtgacagctactgtgcccaaccttgtttctttcagtgaccaaatagctttaaatatagaatgtcaagatgagaagtatcctggagaccacttccagggtagtctatgaaattgtttgtgtccatattcattcttaagtgaattttttcctgggaaaaagattcataaatccccaatgtggttcatggtctccccaagtgaccctttaaggtccagggaactgtggtrgcctgacctaggtctctcagttacttggcaagttaatagcagagttgtccctagaatacaagtctcttaacccacagttcaggaattatggtcgtaaacctgcttttactggaaatgtttgaaaatcaaacataatggtgtattagaagagaggttcaaagtggtaaatttttctgtgatcacaaagagaaatgcattcaatacagactccaaataaatatgtcagggacataaagtttttactttatataaataattgaaaacccattttcctggtgaggatacattgatattaattagaaaattagtatttaatagttgacataagaaattgctgggccttaatatctggactctggagcagatttctgtgctttgtttctatgatctagaactagggcttggggtgtagaaaaactgggatggccttttccttctagctctttctctcacacaccctcacaccccaaacccatcttccaactagtgtccttttctttccccacaaggcctcttgtccatcctctccttgaagcattcatctggacttggaaaggatgaggagagctggagaaggcaggagacatagtttgcacctgctgagaagtgaggaaacataagtaaggccagtaaaccaaagggagctctctcctcctcctcatcctcctcttcctcctcatcctcctcttcctctttctcctttttgtcctcctcctcctcttccctaaggctctcttgatactccttggtccagccctgcttagcaactctccaagcaagcatggaggacaatgtggcaagcattgtctgctctatggagacaaggagacatcatcctctttgtttggggctatgagtcaagagtcttcagttttttgcagcagttgtatttaagtgtcagttgacaaaagtgaattttatatgctccaattaagatgtagtgaattgtgacattctaccacttgccaagtcctgtgattccacctctgcagtgtggctacactcacctatatcagctgaccaaattcatccacttggtgtttccctttcaggcttagatgttctccatcttcagcttgtgtctggctggaatcaattcctccccctctccatcccgtcagtctaattcttcttttaaaccagccttaactctgccttcttgagcctcatcattgaaaattacctccttggcaaggtatggtggctcacgcctgtaatcccagcactttgggaggccaaggtaggtggatcacctgaggtcaggagtttcagaccatcctggccaacatggtgaaaccctgtctctactaaaaatacaaaacaacaacaacaacaacaaaaatagccaggcgtggtggtaggcacctgtaatcctagctactcgggaggctgagacaagagaactgcttgaacccgggaggcggaggttgcagtgagccaagattgcaccactgctctccagcctgggcgacagagtgagactcgtctcaaaaaaaaaaaaaaaaagttatctccttcttcaaaatctcatgagcactttatctataaagatcttataattgctaatgtgcattttgtctttccttctgatcagttacttttcaggtagaatcctttctcgttcagctttgtatcccagcctctcctctccccattcccacctcccctcgttgtttcttgacttccaatacttgagtatatgatactattttaaaacttaatgagaggaccaggcacggtggctcacacctgtaatcccagcactttgagaggctgaggtgggtggatcacctgaggtcaggagttcaagaccagcctggtcaacagggcgaaacctcatctctactgaaaatacaagaattagctgggtgtggtggtgggcgcctgtaatcccagctacttgagaggctgaggcaggagaattgcttgaacccgggaggtggaggttgcagtgagccgagatcgtgccattgcactccagcctaggcagcaagagtgaaactccatctcaaaaaaaaaaaaccaaaaacaaacaaacaaacaaacaaaaaaacttaacaggaggcagggcacagtggtgcaacgcctgtaatcccagcactttaagaggccaagggaggcagatcccttgagcttaggagttcaggaccagtctgggcaacatggcaaagacctgccaatacagaaaatagccggttgtggtgttacacacttgtagtcccagctacttgggaggcttatgtgggaggattgctggagcccgggaggcagagggtgcagtgagccgagattgcagagagagaccctgtttcaggaaaaacaacaacaaaaaaccccaaaaaacttaatgggaaaaatgtttgtatttctttttgttatgcatcagtatacaatctttaaaactacccccaggtcttttccttgagggacaaaagtaggatgcagaactgcctacaaggtggagcattcttaaaatctactccaaaaaactgctgctcgtgggtactcagctgatagaatgaacaggagtgaatgaataggtgaaagcaccctgtgatttgaatgtcgcaagcctttcattttcgttggaaccttgtctgatgtgtgtcactccccactccgttgtgcttgcccttcggaaagatggaatggtgaggacagagaggagacaggtgataaaaagacacttaaaagggcacctgaaagccaggtggcttgtccctggaaggcagtagaaagcaatctgcagtcatgatgcctttcttcactcagcagcagctataatgttgaaaatggggcaaacgccttccccgtgcaactgtttaacaaaaggtagttctcctagaaaacagaatctgttgtatatgttgccagtgattttcacaagtgtagatgcctaagaaataggcaaatatgctgagcgtggtggctcacacttataatcccagcactttgggaggcctaggcaggtggattgcttgagcccaggcattcgaaaccagcctgggcaacattgtgagaccccgtctctacaaaaaaataaacgaaaattagccagacatcgtggtgtgtgcctgtagttccagctacttgggaggctgaggtgggaagattgcttgatcctggcaggttgaggctgccgtgagccctgatcatgccactgtactccagcctgggtgacagagtcagagcctgtctcaaaaaaaaagaaataggcaaatacaagagatggaaaaaggaatcgaaagaattgccatgggattgcgcattagacaatttgctttttaaaattgcatgtggttttgaaggacaggttgaatttggatgtttaaaatgcttagtgaaactaagactggcagggtcaaactgtgcgcataaaatctttgttctggaactcaagtgaaaaattggcagatttgcactttttgagctttttagagtccatttccagctccaggtggctgggtgaagtatcctaagctctacagaagggtaaaagaaatagcctcccacgtgagtggcaggagtaggtaacctgtagtatctggaaagatatgtagatcaccaccagttagaacatttggaaggaggaattgccagtggcttgtagacaaggaatggaggagttgagacaggcaaggtaaattggggccctcctgccaattggaagtttttgagtgatatttttaatatttattattccatcctccttggttggaaagtcacgacggagagggacactgtcatgctcatggtttgtgtttgtatttctggcatggggtagaattggcaactttgctgaattgaacaactgttccccactagaccaaaagtgcccagaggactgaaaaccctccaattcaacttggtggcagcaaggcagccgccagtgaatgagtgattgatgagagccagcggattaaaggagacaactaattgtaaactggaaatagttttcaaagataaaagtagccccctcagataaaaccactagggcttccttttgagttttcttttcacagaacaggatattagtggttcggtggggctcctgcaggagggggtagctgtggagggaagctggtaggctgggaaggtttctacctgtttctcactcctttcctactaacgccccttcagttgagaggctaggtaattataattacctgagatcacacaaccagtcctgacctgtccccacaaggggtggagctactctttccaggtcaaaatggaaaccaaattcaccactatccgttcaaaagctcccaactccgaacaaagagccattgcaatggtgcccacctgggcaccattttggagcctgatatttattatcacatttaggttcacatgccaggtgcccacctggcatggaggcagcagtctgttcgagttctgccacctgaggacacccaggcctgtgaccccaagcgagggcttttctgacgtttgtgggggagtggttaggctgcttttgctgatatgaaagatcactgctagattcatggccaggataagaaggttttccttgttaggtgatacggactttcagaatgtgaaatttcctgaccaaggttgtgtctgttctggtttaaagacgaggatttgctgcctttgtttttccttaagccaacgtgccatccacctgtgctagaggaatctggtattgctctcctccaaaggccaggacggtctcaaaggagacaggctaatggcttaattgttttgtttattctgctccccacaaattccagtagcttcatttacattcagagaacttttttcaactgtattgtcatttcccttggttttgaatggctcttaatgtttgcccttcatgttgttttgaaaggttgatcgagccgttagtgaagggtgtggctttctccaaatgggggtttttcttagtgtgtggtagagaaagtgagagtaattttaaaaataaaatatgcacattttttctatctgtacacacaaactctagattattttggagcctatttatgttcacatgctttaggttttgggagttaaaagattaatgtgtacaagggaatggtgatatttaacaggacaaaaatttcgcttttacagagctgtggtttgcttttcaaaatgtagaggtttctttacctttgcgtttttttctttctttgtttttttttttttttgagacggagttttgctcttgttgctcaagctggggtgcaatggcatgatttcagctcactgcatcctccacctcctgggttcaagtgattcttctgcctcagccttccgagtagctgggattacaggcgtgcgccaccacacccggctatttttttgtatttttagtagaaacggggtttctccatgttagccagatggtcttgaactcctgacytcaggtaatccacccgcctcagcctcccaaagtgctgagattacrggtgtgagccaccgcacctggcctgtttcttcacctttgacaaagaatccagtataagactattctggttcgtgttgtaaatggatttttttttcttttttttcttttcttttcttttcttttctttttttttttttttttgagacagggtctctatctgtcacccaggctggagtacagtggtgccatcacagctcactgcagccttaaactcctggggtcaagcaatcctcttacctcagcctcccaagtagctgggactacaggcgcgcaccactacacctggcttaaatgcatttttataattttagtataaacaagacattttagattgaataactttgtaatgtgctaggacagtagtttttaatgcaggtgggatccaacttttgagaaagggaaatgtgaaggttgaagaaacttaaaaatcaactgcygttggctagatctaggtgtgctgacttccttagaaaagaaatgcttcctttccctgcaaaccggagtttgggaaatttagagctaggaaatcatgtggtcgatcttaacgttataaatcactcagacaaatacaggataatgctgttttcggaagtgcttgtgattgtacaggattacatggtgrtaaagagttttcaatggctcctccagtttctgagggagttctgtgctttgctttcttggtaattccttctgcagaccttagagcctttgaggggggctgggtatgcttccgtgaatttaacagtttaacacactgttgaatagaagagaatctgctattggaactagtgattactaagaaaccacttctatatcatccagcatttgtatctactttaaagtacatattagtattttccttggtttacagatgaggaaaatgagttaggtaccgtgtttaaggttacccatctgaaaagtggcagagaggggatttaaactcctggtcatctgaatctaaggtctgcttagaagaggagctgtttgcttctagacacatgcgtatttaggttgtgggtccacggactaatagcgtgggcatccctgggatattattagaaatgcagaacttcaggtcccacccacacctgattgcagatctgtgttttaacaaggtctctagatgattgcaaagcactacggcacagggacacttccccagaggaagtgtgatggccgccctccaggatatcatcttccaaggttagggacgtgccaaatatcccaagctttcagatatgcgactcaatcatctctaattatcctgctcaaccaaaaattaaagagcgattcttccaagtggaatcgagggaaacttttctcctggacaattctggagggagtccagctatccttaaggagatgcacagaataggctgttgccgacagcatgcttggaaaacctatcaacccggggtgcctcttccacggctgctgtccatgctatactttctcccattactgatccctctgaactagtctatcaaaccttctcctaaagagggtgagaacagattttgtcaggccagagaggaagaaagagatccagaatggggacgatcaatagcatgaaaatagagaagggcattgaaaagagcccagccttcagaacactccagtcctggcgctggagaactgcaccttaccttttactcctacctggttttccttttagaattcccmcaggcatctatgctggagacagtagtgtctttgtctgttgttcccatccctgccttgctcctgccatttccaacgtcctgtgagtatatcttcacaggactcccccttccttttcacagtggccaccctagtttggatgtgcattgtcttacactgggaacattataagcgtttcttaagtggtcttcactcttatcccccggtaattcacagaaatagcatcagcgcaatcatcttctagtaacacggctttgcatctgtcactcttcctcaaaaactctcagttcctactgggaacagtctaaagaccaaaatgcattacggtctaaattaaaccaattactggttgcatttatccaactctattttccagtagtccttctcaaataaattccgtgagggcagcctacatgccttgttcctgctattagctcctagcacagtgcttgtacacagtggattttcactaaatattgattgaatgaacgaatgaacttattctcaggtttatgttttatagtctgcctagaatacactccttggtcaggccatttcctgtgactagatttcccttcccttttttcctgttcatctgaatccttaaaaaaccaagtaaggccgggtgcggtggctcacacctgtaatcccagcactttgggaggccgaggtgggccgatcacgaggtcgggagatcgagaccatcctggctaacacggtgaaaccctgtgtctactaaaaatacacaaaaaaattagctgggcgtggtggtggacgcctgtagtcccagctactctggaggctgaggctggagaatggcgtgaacctgggaggcggagcttgcattgagccgagatcgcgccactgcacgccagcctgggtgacagagcgagactccgtctcaaaaaagacaaaaaacaaaaaaccaaccaaccaaacaaacaacaacaacaacaaataaagactcatttcctggaagcctctgatttaactcgtggagatcattcccttctccaaattgtggcccttaccatagagttatttatttgtgactaaactatgtcatcttgcattgttatctgttttcacacagtctcttacagcccaagtagactgtaagcctcttgagatcagagataatttacatttctttatatttttcagaattcaccatctttccctttggccttcccacattcctgtacactctcgacattccctggttatctggcagttcatattggggaattatggttagctgtggatcaggcctcctctccccactttcctctcagtaatgcatgtagtctctgagggcagacactacattctcctgtgtcttttctggtttattcaatgatagaggctgtaccctttatccttttcaatttcatctacattcttttccttctcctgctcagttcttggaactcccatttctgagtgtctacgactacagtcatggtgaatagaaggtaatgaaactgtgagtcagtgtatcctctagctggagtgtgaaggtgagtcagcagacagcagcagtggatctcttccaccctgaggaaaggcaggagcctgcctggtgatcagggaaggaggccctcctccccacattgtttcctggaactgagtagaacaaattacttaactgtacttcagtttcatttgttaaaaaatgaagtaagaatagcttccattctcttttcattcaagtggtgatgtattgacaattaataagaaaattataaaatgccttagataccaccattgggactatgtaacgcaccacaacctggttgtggctgaggctctgttctagccacccctcctttctgactaccacatcgccctaaagttagaggcaataatagagttaccgcattagtgtttttctaacaaacctgttcaagtcctggctcactaaattttagggaaatgatatcatttctctccagtcttttaatagattgtctttgaaagagttgcatgttgcctgttaaggaaatgcttcagttggaaataattgagtaaggttagaaatggttcaagaaaacagacacatccctgcttgacctgctcagcctcaaactttcatatctcctagtttggggagggatggatggcagatgtagagtgcctcagtttttgttttgcagaaagttatatcatcatcatgtagaacagacatcacagaacgaaattaattagtaatgcattcactgaatttgggcaggatagtttgcttatttgaaaaaattcttggcaaggatgaggatgatttctcatcatcctcctccctaactcgctgggtaatttaaagaaggtttgtgagttgaaattttctgaatagagtgggttcagtttacccttttttatatggtagattgctaatagtgcattactgggagtggaggaaagacacccttttctgccttaaccctgagctagaggaatcacagccttgtctagaagctaaagacataattatatccatttcatatgcagtatgacaaaatcattagaaaattataattgcaaatagaaaaaatataggaggcatatgcatatatacctaagatgtttatatgggaagttatgggaggaaaatgaaataattactaattaataattactattaataaggtttcaaatgatccccttttttccccttgcctgggtgtccttccatcatgtccaagtcttagatcagtttctagatctaggctcaacaaaattccctcccctggacccccaagccttcccagatagtcaccttcctcttccatatgtccatggcacctagtttgaaatgttcttacctcatgcatcatgttctgccttktgttagaccctttaagcttttgtgtctcattaagatattgaactcggctgcgtgcggtggctcacgcctataatcccagcactttgggaggcctaggtgggcggatcacctgaggtcaggagtttgaaaccagcctgaccaacatggtgaaaccccatctctactaaaaatacaaaattggccgggcatggtggcgcatgcctgtaatcccagctgctcgagaggctgaggcaggagaatcacttgaacctgggagccggaggttgcagtgaactgtgatcgtgccattgccctccagcttgggcaacagagtgagactccatctcaaaaaaaaaaaaaatgatattgaactccaaggagcagaagttgtttctgacatatagccaatggtctttatccagctaaaattcacccgtagtgctttttaaaaatgacaacccttgggcaccatcctagaccaaaaggattcagacacaactgtattacttttcaaagcttcctggatggttcctaaaagcagcctaggttgagagccactgttgatggatgtttaagcattgtgggctatgccataatttgatgcaacaccaaatgcaaactgatcaggatgtatttttgccatgctgcaacacaccatgtaacttaggaagttttgtggttttggcgtttttggttagggagggtattatttaatacagctgacttgaataaataggaaactagttcccaggggactttacaaaaggtaagcctttgtgtgactagcacctggggggtttcatcgctgtcaaggctatggtagttttaccacctgcattctcttacctcctccccactgtggcattgaccctagaccagaggcctccaaaacatggcgaggcatcaaaaccacctgaggaggtgattcagcaggtttgggatgaggcttcaaaatctgtttttcaccagggttccaggtgattccagtggaaaaactgataggagagccgctgctttacagctgtgtggaattgaaaatgacgtgggtcttggatcataagcagcagggtgtttttcttttcctagattgtcttccttaaccccaaattatgtaattacatacatattttctctagaacttttttgtatttttaaattttagctccttatgtcacccgaaatttacttttctggtgtgaggggtataattttttccaaatgcatggttagtggtcttaaaaataatttattcactggtgcattctttgtctcctgttgtgaagtgccacctttatcttatgttaaattcatatctatcatatgtttctagcctcttctgtttccttgatccttttctttattcctaaaccagttgctagtaccacattctataattactctagtttcggaatatgttttaatttttatttttggcaagactttactaattaaattcctttttaagtgagttcttggcaatttatactcatttactcttccagataaaatttagaatcaatgtgtcaaagttccataagaaaatctctttggaactttggttggagtagcatgaaccctctagagcagcagtccccaacctttttggcaccagggaccggtttcgtggaagacagcttttctgcagcctggggtgtggagtggggatggttttgggagaaaactgttccacctcagataatcggtattagattctcattagaagcgcrcagcctggatcctgcgtatattcggttcacaatgggctttgtgcttctatgggaatctagtgctgctttgatcttacaggaggcggagctcaggcggtaatgcttgctcaccagccactcacctgctgctgtgcagcccggttcctgacaggccactgccagcacgggtccatggccccggggttgggaacccgtgctctagagcactttgagaaggtgaacgtctttgtaactgatgccttatacccacagacatggtgtccttccccatcagcccttctttcaggggcctccattcatctttatgcttttctttacacaattctttcacttttttttttttttctttttgggagacaaggtctcgctctgtcacccaggctggaatgcagtggcatgatcagggctcactgcaacctccacctcctgggatcaatcaatcctcccatctcagcctcctgagtagctggaactacagctgtgtgccttcatgcccagctaattttatttgtttattttgtagagataaggttttgccatgttacccaggctggtcttgaactcctgggctctagtgatcctccaaaagtgctgggattacagtcgtgagacaccatgcccagccatcttccccatttcttaagtttattactggcattttatwacccttgttactgatttgaatgggatatttcctaaaacattgtcttttgaaaatattaataattttatccatagttcttataatttaatggatatcatgtcataacccacagaattacaagaatctccctcacctgaatatagagggattgtagcattttgaggcattccattttttactcttgcttcaaaaacatgagacaaaacaggttctcctcaagtgtcccagtgcactcttcttcattaatagagtggcctgggctatggggccgtcattcgtaggctctttggcagggttgcagaaggagctgagtctgggctgratgtgatccatggtgggacacagcctgcagttcgtgcttctgaataggtccctggtcgggggctggatgttcagtgatgcacctcgtcatcctgaggtcaagaaagcacaagtggaagaaggggaaagatgtgttaattctgcctagctgaatgagggattcagaagtgggagccagacctttgcttacaatctcagaaggaaaaaatgttgattccaggaatcaagtaattctaagaaccaattatataaaaagtgttttgcaaactataaagtgatattcactcacatgcattcggaagtactacctccacgtgttttagctgcatttgaaagtcttttagaaagaaagcaatgcaactgctggataaaacctcatccctctaccccagaattgttgtcacagctttaaggaagttttatgtgaaagcagaggaaagtaacagtaactctttaatccagacatgtgtctaaaccatggataactcacagaaggccttagagactctgagaattggtaaatattctatacatccttagcatccacaggctaaatacccctccattccctgagtcagggcatgccagctgttaacaatgttctattcctggtacctctctctttgcatttccctgtctttcctcaatcatcttgtatcacaggaagtataaaagtagttaggcagttctattttttgacagcagatgaaaagccaaagttaaaggtcaatgcttaacccactggcttctaataagctggtaaagctgggcaatatagtaagacccctatttctaaaaacatttttttaattagctgagtgtggtggcacatgtgcctgtagtcccagctaatcaggaggcagaggcaggagaatcccttgagcacaggattttgaggctccccaagagaaagctgaggctcagagagggtaatgtgtggtaagagttaaactctcagtcctgatacctttgcttttttatgctgtatttcttctgcaatattctgcactttgcttaggttttttttttttctctctctctcatttaaatacttcaactgcctgtctgatctgttagccattctgtgtaccattatctgattgcttttagaaaagagcttccagtgggctcaatgtgtttaatctgctgtggcttctgaagtccctcatcttcagggagaagtggctcttctgtctacccgattggtcaagcctctttctttcttgatgttttttcttcataaaaagttaggcatttaaaattttttctgtttgtctttctaaataaagtacttcaagttattttgaaagctctggtcatatcctatcaatatgcaaacagatgagttgatttttaaaaaatgacatgctggtttgagttcttggtcttttagtacctattgattctagtgcctattgactggctaatggctgcttgtatttattgaatctaaatattatgctctttgattggtggtgccctggcagcactccccgtgggcctgtggggtggagaacacgggaagagatacctgcttggggaaaggtgggaggtaagagtgggaaggactttggtggttttggtgccagcttagccacagtagaataaagtactcagtagatttctaacatttctgactccagaccctggttccctgatagcatctctggacctacctgggcccagggctgtcctgaaggaaaggacacaagcctagctggcttcactacttgatgattgtagagccctagggccttgagggaacataggccagataattatacaggccttgggcaagacccagtgttgtgctggcttcaggtcagacctgcagtccccagtggtggtggccataggggtgcttttgtcacccttcccctagctccacacatctcagcacagagagcaaaactctgtttgggaaaaagtaaaggaaaagaacaagagtctctgcctggtaatccagagagttcttttggatcttacacaagaccaccaaggcagtacctctacgagtccgcaagaactacagtgttactgggcttggggtaccccataatgcagatacggctgtggtgtccacaaacttagatcataacaaccaagtccctttgaatacttggaaagccttcccaagaaggatgggtacaaacaactccagattgtgaagcctacaataaattcttaactcttcagtgcctagacacccatgaatatccacaagcatcaaaaccatctgggaaaacatggccttaccaaatgaaataaattgaccaggggtcaatcccagagagacagagatatgggacctttcagaaagagagcttaaaatagctgttttgaggaaactcaaattcaaggtaacacagaggaggaactcagaatattatcagatacatttaacaaaggaattgaagtaagttaagagaatcaggcagaaattctcgagctgctgaatgcaattgacgtactgaagaatgcgtcagagtctgttagtagcagaactgatcaagcagaagaaagaattagtgagcttgaagacagactatttgaaaatacacagtcagaggagacaaaagaaaaaagaataaaaaagaatgaagcccacctacaagatctagaaaatagcttcagaagggcaaatccaagaattattggccttaaaggaggtagagagagagagataatggtggaaagtttattcaaagggataataagataacttcccaaacaaaagatatcaaagtttaagtacaagaaggttatagaacaccaagcagatttaactaaaaggaaattacctcaaggcatgtaataacaaaactcccaaaggtcaaggataaagaaaggatcctaaaagcagtaacagaaaataaacaaataacatatgatggagctccaacacgtctggcagcagacttttcagtggaaactgtacaggccaggagagagtggcataaagtgctgaagcattaaaaaaaaaaaaagagttcactctagaatggtatatctggcaaaaatatcctccaaacatgaaggaaaaattaagaccttcccagacaaacaaaagctgagggatttatcaaccccaggcctatcctacaagaaatgctaaagggagttcttcaatctgaaagaaaaggatgttaacaagcaatgagaaatcatctgaaggtacaaaactcactggtaatagtaagtacacagaaaaacacagaatattataacagtataatagtagtgtgtaaactatacatatctcaaatagaaagatgaaaggatgaacccataaaaaataataacttttcaaggcatagacagtacagtaagataaatagaaacaacaaaatgttaaaaagtggggagacaaaattatagagtttttattggttgtctttttgctttttgtttatgcaatcgatgttaagttgtgatcagtttaaaataatgggttataagatgttatttgcaagcctcatggtaacctcaaatctaaaaaacatacaacaggtacacagaaaataaaaaggaagaatttaaaatgtgccaactgagaaaatcaccttaaaggaagataggaaagaaggacagaaggaagagaagaccacaaaacaaccagacaacaaataacaaagtggcaggagtaaggcctcacttatcagtaataacattgaatgtaaatagactaaactctgcaatcaaaagacatagaatagctgaatggataaaaagcaagacccaaggatctgttgcctacaagcaacacacttcaccaaatcaaatgaaaatggatkaatgacctaaatctaagacttcaaactatgaaactactaaaagaaaacattgggaagactccaggacattggtctaagcaaagattttttggacaaatgggatcacatcaagttaaaaagcttccttccacacagcaaaagaaaaaatcaacaaaatgaagagacaacccacagartgggagaaaatatttgcaaactttccatctcacaagggtttaatcaccagaatacagaaggaactcaaataactctgtaggaaaaaatctaatctgattttaaaatgggcaaaagatatcaatagacatttctcaaaagaagacatacaaatggcaaacaggtgtatgaaaaggtgctcaacaccactgaaaatcagagacatgccaatgaaaactacaatgaggtatcatctcacccaagtaaaaatggcttttatccagaagacgggcaataatgaatgctggcaaggatgtgaagaaaaggggaaaagggaactctcatacaccgttggtggaaatataaatgagtatagccactgtggagaacagaagggcggttccttaaaaactaaaaacagagctagctaccttatgatccagcaattccattggtaggtgtataccttaaagaaaggatataagcatatggaagagatagctgcactcccatgtttatcctagcactattcacaatagcaaatatttggaatcaacctaagtgtccatcaaatgatgaatgaaatcattcatcacataaagaagatgtggtacagatacacaacagagtactaatcagcaataaaaaagaatgaaaccctgtcatttgtcatttgcaagaatatgaatggaactggaggtcattatgttaagtgaaataagctaggcacagaaagacagatttcatattttctyacttatttgtgggagctaaaaattaaaagtattgaactcatagagatagggaatagaatgatggttaccagaggctgggaaggagaactggggagacaggggttatggttaatgggtacaaagaaatagttagaaataatagaatgaataagagctagcatttgcatgctcacagtaacacgtatactaaaattggaatgacacagagaagattagcatggctcctgagcaaggatgtcatgcaaattcatgaagtgtattttaaatgttattgaaaaaaaaaatctagtgtttgctagcacaacagaamgactatagtcaataataatttgtgcatttaaaaataactaaaagagtattactggattttttgaaacacaaaggataaatccttgagggtgtggataccccattttcgatcatgtgattattacacattgcatgcctgtatcaaaatatccatatacacctacttatatatgcccaaaaattaaaaattaaaatgaattttatgttctttgaagatttttctttttttcttttttttcttttttttttttttttttgagatggagtctcgctctgtcccaggctggagtgctgtggcgggatctcagctcactgcaacctctgcctcccctgttcaagcttttctacctcagcctcccgagtagctgggattacaggtgtgtgccaccacgcccagctgatttttgtatttttagtagagatggggtttcaccatgttggccaggctggtcttgaactgctgacctcgtgatcctccygcctcagcctcccaaagtgctgggattacaggcatgagccaccatgcctggctgaagatttttcttaaatccttcctgattttattcctgaataaaaaccaaatattataaagttagttttactttggacattaaatgtccaagcaaattagaaataaaaaatagtaagaggagtaatgaacttaraaacggcagttatttgcaaaggcaattgtaaacatgtcatttgatgctactgttatttgatactacacatggtaaaaacacagtgagtgacgtcataraaaaccaactcaagtattactttttcctgacaattttcctcctccttccaatagtccatagaaattagactgtctagagaaagtaaaacaaaaacacagcacatcacggaaatagaacctcaaaaaaaaaaaggttaatgtgaaaagtttgccttatttaatttaacgatcmggckgggtttaaaaaattgctattttttttgagacaaggtgtcgcttgtcatcctggctggagttcagtggcacgatcatggctcactgcagcctcgatctcctgggttcaagcgatcctcatgcttctcgattataggttgcacaccaccatgcccagccaatttaaaaaatattttgtagaggtcagatgcagtggctcatgcctgtaatcccagcactttgggaggccgagacaggcagatcacctgaggtcaggagtttgagactagcctggccaacatggcaaaattctgtctctactaaaaatacaacaacaaaaaaattagccagatgtggtagcggacacctgtaatcccagctactagggaggctgagacaggagaattgcttgaacccagaaggcagaggttgcagtaagccgggattgtgccaccgcattccaggctaggcgacagagcaagactctgtcaaaaaaaaaaaaaacaaaaaaaagtatgtatatataaaattttgtagagaaggtatctcgctatattgtctaggctggtctttaactcctgggctcaagcagtcttcaggccttggccgcaaaactgctgggattacaggctggagccaccatacatggactgaatttttaaaattcttagtagggagaccttttaattggaagttgactataggaacgagaaggaaactgggtgactgaacaaccctattaggagagaaacacagatgaatcaacatgaagaatgtctgggatgggagcctaacatgcccagagctgcccttttgtgtctcttgggaggggctgtgttctggatgaaggcagtcaataggaggctggactactgtgaatatcggggtagtgaagttgagaaataccaattctacagtatggagtcagttaggtcaaaggttttgtacgtcaaataaccaagctatcttacatttctgtctccatttggaaaccagaaggtcagtcaaatatttggttagaaaaccaggaacaggaaaacatctcttgttacacataaaatctgtatccaagcactgtgtatcattccacaccatccattagaaccagtggagaggaaggctctgaaaggtttctgtctattgaggtttgataaaatggaagagtttagtacccattattactacttcaagttgaataaaatgtgtcattgacattttctttttttgagacagagtcttgctctgccacccaggctggagtgcagtggcacaatcttggctcactgcaacctctgtatcccaggttcaagcaattctcatgcctcagcctccccagtagcagggattacaggcatgtgccaccacgcctggctaatttttgtatttttaatagagatgaggtctcgccatgttggccaggctggttttgaactcctggcctcaggtgatccacctgcctcggcctccaaaaatgctgggattacaggcatgagccacagcgcccagcctgatgttttatttatagggtgcactcttcattgtttaaatgtctatttttagatgttgatagacctttgtaggtagtttcacccctgtctttggttctcttgcactgtttgccccatatcattctaaatttttacccaaatgggttttcaaggaccttgctcctcctgcctgtgggaagtggttacaggttagcaatagttgaaactcccctactgtttttcccagcttagcagggtggttggasaccagccccaatactcctgagagcccatagagacagtcctggctcagcactgaggacatcttgcaggcagggttggctgagtgttttatggagcgagcttaagaggagatgttctaaaaccagagaggaaacatttttctctgttctctgcaattcagcaggtgatatcccttcatggatttataataaacacagtcctctcattgaccaaggttgaaaaactcagaaagtttgctcagcacagatctgggagtcaggaacgtactatgtgctgtggaagacatttcaactcctctttcaagcaaaaaaaaaaaaaaaaagtcaatactgatctagtttatatagctattataaaaaattatattaatgaaaatagaaattcatttgtaagtagagacagctaccaaattcctaagcaatctattcatttttgtttttttttttagacttgaacactttttcttgccttgcctcacaatgcagttgtcaatatagggccactttagttacacctattacctgactctgcaaagaccacagagcttatttcctttagaaggattttgtttgattaatttacactcttcgctgacatttctcagttgagtaggaggaaaaaaaggagtttaatttaaccatattagccacatcatggacagggaaatgtatggaggatgtttaagtgatttgccttattgagtaaagatatatctaagcttagattttactttgtcctataagaactctgtgagcgagatttttttttcttttttgagatggagtcttgctctgttgcctaggctggagtgcagtggcacgatcccagctcactgcaacctccacctcctgggttcaagcgattctcctgcctcagcctcccgagtagctgggattacaggagcaaaccaccacgcccggctaattttttatacttttagtagagacggggtttctccatgttggtcaggctggtttcgaactcttgacctcaagtgatttgtctgccttggctgcccaaagtgctgggattacaggcgtgagccactgtgcccagccgagcgaaatatttttgactatagtagtctgaatgttcttttaagtttcataatgtaggctaaagctctattttctgccaaatgcgaaattgtagaacagaataaaaccatgtgctttatattatacgaattatatctgatgaatgttcatgtttagaaaaatcacaatcaagctcagcagttgtagatatggataacacaactccattcctgagcagagcaggtttcatcataattgcctgccttatgttttgttttcatacctgtagtaaacttaggaaacttaaaaattattcaatagaaatttagagtgtggagccctggtttgaatcctggctcttgtcatcttaatcagttccctccatttttacatctgtaaaayggaaatattcataataataaaacacctccataagaatcaaatgaaataaagtagaagtgctttgtaaaagataaacaattcaataactgtacaattcagtaactgcaaggaggtattatataagcatagatttttttttttaaaactaggagttgtcaacccaaatgtccatcaatgatagacaggataaagaaaacgtggcacatatatactgtggaatactatgcagccataaaaaaggatgagttcmtgtcctttgcagggacatggatgaagctggaaaccgtcattctcagcaaaccagcctaggagcagaaaaccaaacaccgcatgttctcactgacaagtgggagctgaacaatgagaacacgtggaccagggaggggaacatcacacactggggcctgtcagggggtggggggctaggggaggggtaggagaattatctgatgtagatgatgggttgatggatgcagcaaaccatcatggcacgtgtatacctatgtaacaaacccgcacgttctgcaaatgtatcccagaacttaaagtataattaaaaaacaaaacaaaacaaaaaaagaccaggggtgtactatgtgaattactggaggtatcagagaattctcagatgatccaacacatgtccaaaattcaagtactattaaaaacacataattttaaaaataaaagttacttatgaaagcctgactgctagttttaaagggacataaataaaccttatttaccttatttatgtatgtccctttgaatctagggttttttcttttcttttttttgagacagcgtttcactcccatcaccgagactggagtgcagtggcatgatctcggctcactgcaacctccatctcctgggctcaagcaattctcctgcctcagcctctgagtagctgggactacagggccacgccatcgcacccagctaatttttgtattttttttagacatggcgttttggcatgttgtccaggctggtctcaaactcctagcctcaagtgatctgcccgcttcagcctcccaaaatgttgggattacaggcctgagctactgcactcggcctagtttttttttaattccagaaaaagtttcaagatttttttttttttttgcttttgtgttaatattttgggtgtagtgggagagggggtagcacacttgagttgctgcaggacttgtttttttgtgtgaccagagagagcccacagcacacagccgggttctcattggaaaggcatcagaacaagtgtgtgcagacagcaccgcttatagtccgtgacactcattcctccgcatgaatcagggccacacatggcttcagatgatacaggttctttcctgacatctcaaggggagtcatttgaatgcgtccgtgtctctcccactacctctcaaaatgccggactaagttaattggtaaataaatgctcaggctgcttagcagtggcctatctctgaggcatgaggtctaatatagtttaaatgtaagtccatcgtggcctccaagtagctaggaaaacaggtgggggacttcaaagagatctgagagcaagcctggccgggtctcttgtacttttccagccctggcttatgtgtgggacaatggtgaaaagcagcccttgaggtagaaccaagtgggttttttttttattcatattcggcacagatttattgatgcagaaaacatgctctcctgatgtggccacagaatcatcacttgcttctttcaaaatccgtaaaatcttgcattctgtggtatttggcagattacatctcatactgtagcagcctgcgcttgccagctgaagtgtctgaaagtagcttggagtcgttttcacactctttgatgctagtccaccttttactacataccaaggatagtacatatatccaccaagtggtgccaaatcttgttctttattcttcttaaatttgaacgtcaaaattgcactttaataataaaaatataaagccatgagctatgcaaataatgaataaagattattctgagtaggcttagatgccacaagaatgcccttgtttttctctttcacggtttgacccagtgtggtgtgaatgttctctttgagacaatctttgtgttaaatctttacactaataaatgtgttagaacttcttcagggatattcttagcgaggaggagttggtggatgtgttttttgcaaataggcttcctttgtctgcttggcaattctctatgaggtttctgaaagtgtgacctgtacgtgagacatctaagtggatggagcaaaatgagggagacatatatgccagtctgataagtaaatcattcttgtagtcagtgtggaagagttggcaaatttctctctgatttccttctgtttttgaccctgccaggctgaacccaaagacccagcattgtgactggaagggcctgcgaaagaaagcccttgccaagtgatctctgtataatcgtctttcagagacttaataagstttggagaatatttggatgaagttggcagttttattgataccatctgattctactttggtcctgtagcagtttctgccactttgtcaccagtggggggaatatgctgttaccataatggaaaaggaggacatttggtagcatttttctgtgtttatgtcaggagtcgtctaaaatggtcatttttttttttttttaagaaaaacaacatatgcgtacaaagtaggtgtatatatttatggggtacatgcaatattttgatacagtcctacaatgcataataatcacatcaggataaatggggtatccatcaccttaagcctttataatttctttgtgttacaaacattccaattatacttttagttatttttacttatttatttattttgagacagggtctcatttggttacccaggctggagtgcagtgatgcaataatcatggttcactgcagccttgacctcctgggctcaggtgaccctcctgcttcagcttcctgagtcgctggaactacaggcgtgtgccaccatgccaggctaatttttaaagtttttgtacagatggagtgtcactatgttgcccagccgggtctcaagcgatccttccactttggtctcccaaaacattgctattacaggtgtgagtcattgtgccccactgacgagaggttcttcatatttcttttatatccactgccacaaaactgagtgcaattggtctattcagtcaggaagtcgcttacctttcatgtgcttccctattacctgggcatatttccagggggtttcagaggaagaagtagctctttcctatgaggatatatgctggttctgaagtgtttacttagatgcatagtggaagctcaaaaaatatttactgaactcactcttgtggtttagctttcaactataaacataggaataaagggagaaaaaagcawgaaaaactagaagctgaaagccaggcaggaagagaatggatctagaaagaagtaggaagtccatttgctcagaggaaggatacccactcaccartgggaaataggtccagtgttgtgtggtagggttgtgggtagtagtagtaatttcacaatgggtgtgggaggttggtgagtagatggactagattcaaaagtagatacctcgctctcacctatagcctagcagtttgggaggccgagacaggaggatcgcttgagcccagaagtttgagattagcctggccaacatggcaaaactccatctctacaaaaaatacaaaaattacccaggcgcggtggtggagtgcctgtaatcccagctactccgggggttgctgtggtggaggatcacttgagcctgggagttcaaggctgcagccagccaagattgcaccactgcactccagcctgggtaacagagcgaggccctgtctccaaaaaagaaaaagaaaaagaaagaaagtagatagtgatgaagctggatagttaaaacagaaacttgaaaagcaagatgtggaactgggatataggatttcagagtttaaaagaaatgtgacatttcttagtggattgtccttcagttgtgtttactaagcaactgtcagctagtgagattactgtgtatggccaatccagataaataagacgatcaagtctttatgaaaaggaaagaaaaatttggaatgcacatctctgtccagctcaattcctcactccttttttaagatggagagctgttaggtttgtctacacagtaggaaacacctgattaaataacagcatggagccaatcttgacaaagaaattggctgcatccaatagaatcccagggccggtcgtggtggctcatgcctgtaatcccaacactttgggcggccgaggtgggaggatcacttgagctttggtctcagggctttgagaccagcctggacagcatagtgagacctcgtctctaaaaaattaaattaaaaaaaaaaatagagcgccagcaaagtcaattcctgaactctcttctgttcagtagtagcaaaaatgcctgatctaagtgatggggaaagttagtttatgtggctgtagcatcagacacatcactgacaatcctgctgtggatttatagcacaggggacactacatctagaaacacctgtctgtggactgctgctgctgtcaggttagtaatctgtgtattctaatgagaatggacgtggcctccctagtgtcagccacataatggaaatcctagatcagcatgcttacttcttcccatctaattgcaagttgtaatttgtaaataatgggtttactttttaattttgagaaggtaaatgtgttgctgtacaaaagcccaggattccttcccgttaaatcggcagcattcttggacacagtaaatcctatcacacacttttgtctcacaaaagaagtagcggcagttagaagactttgaattctcccttacccgtgactttgagcaagtgatttaacctctcagacaacacagttcctcatttgcaaaatggaaataatgtctacattatctatttctactcacagagttgttttaggacacaaaatggtaaaggaaggaaaagctaagttactgcaacatggtaggatacttttgcttttaaatttaatttatacgcatcccaatttttatctagaacctagatttcaggctaaagaagagagccgttgggcttcattccacttgtagtagcctcacgttacccttactgtgaaattagtctttgtttcctttcatctcttttgaatatcacccttgccctgcaataataaaagagagctgcatgcagtgaaatcaaaccatgaaattatagaattgtagagccagaactagctacatataaacagaaaagaaaatttgattgaaacattaataattttcatcaaggtgaaaatgactgacaggtattactttaacagagttatttatactttttaaagatgtgctactgacctgttaacctaatgaaatttagatggtggaagggatataagttgttgaaaatttgggattcatttctttccatcttagtatttttggagtggtagagtgctgtgtctacatacctttgtaataaaaaacaatttggggctggtgttgataatcaagttgattgcgatctctasgagaggagagtctatctgatctttttcttgccgtttgtatatattgttctacctctcccatctcatctgaaatatggggcagtttcttggttctcagttgtttcttttctgatatgttgctgacctctgatttctcatatcagtgctcttcccttagttcagagatgtttccccagttgtagatgggggttggaaaaggaaggtgcttgtgatttaaaagccctgtcacttactgtgtccataatatagtgagtccacctgtggactgagcaaggctgctgtcacatctttcaaggttttcctcattgatcctacatcggtttagcaaaattcttctgtaaaaggctagatagtaaatattttaggctttgtggaccatacagtctctgtcacagctactcaactctgccattgtagcatgaaatcacgtggctgtcttctaataaaacttggtttacaaaaacaatcagactgggcgtcgtggctcacacctgtaatctcagcactgtgggaggacgacacaggaggattgcttgagcccaggagttcgagagcagcatgggcaacgtagggagactccatctccgcagatttttaaaaagttagctgggcgtgatggtgcatgcctgtggtcccagctacctgcaggggctgaggcaggaggatcgtctgaggttgggaggtcaaagttgcagtgagccatgattgcaccactgcacttcagcctaggtgacagagcaagactcggtctcaaaaaaccaacacaaataaataaaaattaaaaataatcattgagccagatttggctcacgggctgtagtttgctgactcctgttctacatgattttcataaaggtgggacaggtgcacttataatattaaatggaatggagggtgctattgtaaatacctgcaagttgaatcaaggatagctttttaaagcagtttgcttagaaatttacctacaaaagactattattacagtacctccctgtgccatgtacctatagattgacttaggcaaaaacctgacaacagaccttgggaatatttggggatatttactttttcaagtaattgagttatacgtactttgcctgccactttttacattgcattgccaatttaagttaacatcaccgacctaatgtcagcaatgttccactcttaaagctggaaactggattcgagggtgagcaaggaaggatgaggagagggaagtttaccttaaatgatccttgaagtcaacattaggtaccttgagaatgccttgctgcttgattttaagatcttcaattacagcactttgattcttaaccttaaaaaaattctccttcagccatttcaagccatgtggaatatctcttactgcttaggaatttgctgtggtttttcattgaccgtggccccagactctggaatatgtattaatttatctgggcagagaatacagaaatccacatgcagaataaagtgaactttatgctgaagcagaatattgaagctgggaatggttaattcttaaaaaataaagcatcagcgttaataaatattgaattctaagaaggtattttgcagtttgcttcttaaagtactgagataatctgactgggttcccatttaaaagagagaagttttttccctccatgaataatattcgtttacagtcattggtaaattattaatctgcattccagtgtttcatgtttgaaataccagtccgccctgtccatggggatttgatctcacgctgtaatcagcaaagggttctgggaagtgagaatagctgtggtttgctcttttaaagaccttaggagagaatcaaaaagtggtggttattcaggaagttggcctgtccagcatttgacggctggcagttttcatatggagtcatatgagaccatgaacttggaaggcacactagactgtgggaaagtttgggtgggctgctcaccaccctgtgattttcagaggtcctagaatgttctttagagtattcctgcagtttttgaatggatgtcaaatctcttttggtttggggctacccgaaatgtttacattctgagtcgttggtccattttcctccaacaatgcacatttaggattgctattgggtacctaatgaactggattgatcataagattctcaggatctctggccccagctcgacaccactttctagctatggcacgttaggtaagtcctttaaccactctgactctcacactgaatataggttagaacagtatctacgtcatagtgttgcttgaggattaagaggaataattcatgggacttggcatgagtctttactagattgtaagctccatggaggagctgtcttcccagtgcctccagcagtgtctggcatatagtgaggagctcaacacacatttgttaaattaacagtaagcattcagtcaatgttaattgttactgttgtcatgaataatattctcattattacttacattacccattttgagtcctccgtaccttctgttgataacagtcatcttcgtgaagcagctatggtgtcattgataggatgctgagttcaaattctaaccctgtcctgattagctgtgggcaaagtttcttaacctctctgaactagtttccttgtctgtaaattgtgatgataatgccctcccacagagtctaagagggtaacacacccctgccttagttttctcaaacgtatgggtagaagtagccctgggacctactcacttaccagtgtcttagatttttcacatgccctaaatgcttaactctataggccttgcatgctccacaccagagtcttctacagattgcccaatatattgagggctgatgaggtcccctccacacagaacagctatgtgtagcaggttgatcaaaacatctgtattctgatcagggtcatctctgcacagctggagttgtgtatgtcctttaagtttctataactggtcattataaaatactaagtatagtaatactaatttatgaatttatgtctcatgaaatgaagagataccaacaacacaactggggtttcatagaggttgtaaaaatgaactttttggcccctctcccagtaccaagcgtgtattgggagaggggccagaaagttcattgtctggtcaatttgccaccccaatgaaggtgggttccttttcagaagtcttgaaggtttgagcctggcaatggatcaagttctctttcctcctgcagaatctctcttctggtccacactctgggaggtagacgggactaagcagaaggtcacttccccagtgcaagaaaatgtactactccactctcacattctacctttggtttgagcaaaggccacattttgcaagcccgtttgctgcccagttaatctgtcagggtgaactttctctcaccctctgctgacacctctgccacccagccccatctcctttgagagggggaacccccccaccatggagctttgtgttttcctccacttcctccttttagcagggtaagcctccacacttctgcccaggctgttgggcccaccatctcctcttttaacacagcttccgaagtgctggggatggagagggtgtcaatgtggcaaacgttcctttgcccactgatgagaagtttcagcccttcccaagacatgtctggaaatggcagtccaccctggcctttccttaacttcactccatccctcagccccttcatgtacaagttgtcagcacatcttgttatttctgcttataaaaatacatcgaatctgacagctttgccccactctatagctgccctcctaattcagcgagctggagaggcaattctcggtcaggatgatttaggatattcctaactggtctctctgccatcccactataccctcctgcactgtccacttaacagtgatgtttaaaaagtaaataaatggctgggcgtgctggctcatacctgcaatcccaatacttttggaggcagaggaaggagaattgcttaaggccaggagtttgagacaagcctgggaaacatagggagaccccatgtctataaataataataataataaaaatagccagatgtggtgatgcacacttgtggtcccagctactcaggaggctgaagtgagaggattgcttgagcctgggaggtcgaggctggcactgcactccagcctgggtgatagagtgagaccccatctctgaaataaaaaaaaaaaaagaaaaatgtacaaagtgccttttaaaaagcaggtatatggagatgtaagcaggcatcaaggctagcagtgcccagcggtgagccacggctgcactggtgggtccatgggaatagaaagcaaagtcttgggtccacacaaggtggaggattacatgggagactcctgcatggaggtgtgcactctgtggaagagtcaagtgagaaaacgccttacccataaagggagatggtatcattacctcttcagttctctttccctactgcraccccacccgaaaagccccacctaggttccagttcctctgggtgcaggtgcctgattgcctgaagcctggtgctcaggattgtcctacattctccccactgttccctgagtggttccctgacttgctgttttataaaacctttttacatacagtagagtcgggggcagggggcaggtcttggtcactcagcccataagaggtagactctgaacaggtcgctttcgagttgtgtttccaatgtcctttttaccatattgacaaagggaagaatttatgtaggaatacatcatctttaattaaagcatagctataaattatgcaagtagcagtacatattttaacacaaaagcaaggttcatagacaaaaatrgaatggtaaaatcatgaaaatgtaaatctcttggttaggagacatttaggctcaaaataataattaaaaaatcaacagttatcacgtgtcgatacgacattgaaaaacatcttgtgattttaaattgaaaaatgggttcagactgaccacccaaataatcctttttttgagatggagtcttgctctgtcgccaggctggagtgcagtggcgcagtctcggctcactgcagcctccacctcccaggttcaagcaattcccgtgcctcagcctcctgagtagctgggattataggcatgctccaccacacctggctaatttttttttttgtattttagtacagatggggtttcaccatgttggccaggatggtctcgatctcctgacctcgtcttctgcctgcctcggcctcccaaagtgctggaattacgggcgtgagccaccrtgcccgtcccacccaattctactrtgcgcttttccagagaagtgtgaattatttgtgtcttcagggaaatacatagctgtctgggttttttttttttctgttttgtttttcctttaagcatctgataatacaaatgtactcaaatggaagaggaactgaacctttgagtttaatgagagttttggtgtttaaagaattcaggatcatgaagaatgtgtggtgacttccctcttcctattcccattactttaaatgtcgtagctgttgctttttgtgctttgggaagattcttgatgcctccacattctgattcactggacagccctgattrtaggccatgggggttagagctggaagggtctgtgggagtcaatccatgtcccgcatttgacaggtcagacactgaaaaacagatattgagagctcaaggacttgcgtgggctgacattgagcactacagatgccatggaaatggacacctgctcctgtgctcaccaagcacagcagtattcccccagcctgggccagtggatggaggaattaatggtttaatcttaactaatttaattttaaaaagataatgaagaaatgctaaattaatttttamaaatcttagtattccttcatggaaaaaagctaacaaaatgattggacatgtatacattttagtgtttattgtttaaaagatgtgttattggattgcactatcaaactccataaaatctggagttgaaataaataaataatctcaacctgtggtgcagwtaggtgctggtcagctgatgtcacagcctactgactgggactcattgtgcacgaatttaagtcctttagtcaagctgtgatcacttccacgaaatccctggttatgtcatttggagatcttttatcccctaactaaaaaggacaattggccgggcactgtggctcacacctgtaatcacagcactttgggaggccaaggtaggtggatcaacgagttcaagagatggagaccatcctggccaacatggtgaaaccctctctctactaaaaatacaacaattagctgggcatggtgacgggcgcctgtagtcacagctcctcggaagggctgaggcaggagaatcgcttgaacccaggaggtggaggttgcagtgagctgagattgtgccactgcactccagcctggcgatagagcgagattctgtcycagaaataaaaaaaaaaaagaaaaggaaattgaattcatttaaattgttaaaccctactgaagggaagatagttcttcagtcaaaaggcttttttttttttttttctaaaaagccttagagtgctaaaagtaaaaacaaatccagctattacttgaagttttgtaaatgggaaatgtacttgtagttgagactatctggatttttctttgtgtcttaattactccctgatagaagcaaggcctttaggagtcttttaatgtctttaggacataaggctcaattttactcctcaggtcccctcagtctgaaagaagcaggtgcagcacttgagcattcatccaaccaataattctcaggctctgctgtatgctgccctctgtggggggggggcttgggatgggrataaatacggcgagacacagctctttctcccacctgggtttcagggagaagaatgtcaccttgaacttgaggagctctatctggcagcatctctgaggtgtgcttcttctctaccttttcctccccttgaaccaacccagatactctagcatccccgatgctccccagaacatgcccaactccaaagacagcctgatttttttcttttaaaacccagacccagaagcaggtcattttggggtggtttagcacaaggctctccacagacttgtgttgctcataggcgaggggtggccccctttccgatagtgtcattgattttcttttggatattctccctttttttttaatttgaaaacatattctctcttaacggatgtgactgatgcttgcacttttggatgcttgcagacctaggacactgcagaatagaattaattggagtctgggttttctaacagtttagatgtcattcactgcctcactgcccacacggatatatgtacttgtctcacgttctgtcggctgagccttcttttcttacttatgatttgtggccaaagtgggtcctgttcttgagaactgagggcacaagggaggatccctcactttgcccagattagatcttgaatctcagctctctcgaggattccgtttttgtttttttttttcctgcctttggtggctttctcaccatggagctggagaagtcactgtgggctcatgaagggtctttgctgcttcaaactcagaacacacatcccgcaagctctagtaataatataaggtgacagccccccaggggctcttatgggcagccagacccctctctggctgcaccctttgtcccaagcctgctattttcccttaacttccaggtcctcctcccctccagtgtgctggggccctgtagcacacagcaacatcagtgcagtcatcagacaaatgcacacagccgttctccaaatcacccttaattttttttttttcttttttgaggcggagtctcattctgtcacccaggctggagtgcagtggtgcgatctcggcttcttgtaagctccacctcccggggtcatgccattctcctgcctcagcctcccgagtagctgggactgcaagcgcccaccaccgtgcctggctatttttttgtgtgtatttttagtagagacggggtttcaccatgttaaccaggatggtctcgatctcctgaccttgccatctcccacctcggcctcccaaagtgctaggattacaggtgtgagccactgtgcctggcccatatcacccttaattttaaatctgaatgtcaattcccttgttgaaattgtttatgtttcatgttcagaaattaccatatttcatcaaaaccattggtttagtttggttttaggaacagatgtttcttttctgtcaatcttatttccatttttggttgccattgatatttcaaaaggcaccttttttttttttttttttttttgtgatggggtcttgctctgtcgcccaggctggagtgcagtggtgcgatctcggctcactgcaagctctgcctcctgggttcacaccattctcctgcctcagcctcctgagtagctgggactacaggtgcccaccaccataccaggctatttttttttttttttgtatttttagtagagacggagtttcaccgtgttagccaggatggtcttgatctcctgacctcgtgatccgcccacctcgtcctcccaaagtgctggaattgtaggcgtaagccaccgtgcccggccagaaagcaccatttcttatatacctttaaaaaagaaaaatattgctaactaaattaagacatgtcttctgttgtaagacatattctggtttaagatatgttaaatggaaaaaaaacaaacaaactcaaaacccatgtacctttttctttttcccaatgtgctttttagaatcaatacaatctgtgtcaggactctattagatttcactttccctctgacagagccacttatgcttttgaaatagccaggtaagcaggacaatttcctttcagcccatctctggctctcatggcttccttcttacacatgctaggtaagcactttgaacttgaaaaacacttgactaaacactcatatgatctggattgtttaaccacaaaagatttggtcttctctagtgaaaaatgctgtgggtttcttttttacctttaattttacttttcaagttaaaaaatagcttttaaggtcaaaattttcagagcaatttgtaagtatagatacagtttcatggtgacagtttcttatgttgaaaaggtgacacaaaacacattatcttttactttagattcaaggggtacatgtgcagatttgttacttgggtatattgcgtgatgctgaggtttggggtactgtcatccaggtactgagcataatacccaatagttagtttttcttttctttctattttttttttttttaatttttgagacagagtcttactctgttgcccgggctggagtgcagtggtgtgaacttggctcactgcaacctccacctcccaggtccaaacaattatcctgcctcagccttccaagtagctgggattacaggtgcccgccaccacacccagctatttttttcgtacttttgtaaagttggggttttgccatgttggccaggctagtctccaattcctgacctcaggtggtctgcctgccttggcctccccaaagtgctgggattacaggcacctgccactgcaccctgccagtttttcttttcttttctttttttgagccagggtctcactctgtcacccaggctggagtgcagtggtgtgatctcggctcaacctcctgggctcaagagattctcccaggtcagcctcccacatagccttctggcaaatttttgtattttttgtagatatggggtataactagtttttcagttcttacccacctccctctctcctgcctctagtagtccccatgtctattggtgccatctttatgtccatgagtacccaatgtttagctcccacttttaagtgagaacatagggtatttgaatttctgttcctgcattaatttgcttatgataatagcccccagtttcatccatgttgcttcaaaggacatgatttcgctcttctttatggctgcatagtactccatggtatatatgtaccacatttcctttatccaattcactgttgatgggcayctaggttgattccatgtctttgctattgtgaatagtgctgtggtaaacatacaagtacatgtgtcgttttggtagaacaatttattttcttttcgatgtatacccagtaatgggattgctgagttgaatgatagttctgttttaggttctttgagaaatctcccagctgctttccacagtgactgaactaacttacactcccacctacagtgtgtaattgttctcttttctcctcagccttaccaccatctgttgttttttgactttctaataaccattctgactggtgtgagattgtatctcattgtggttttgatttgtatttctatgataattagtgatgttgagcattttttcatttttttaacagtttgtacgtcttgtttggagaagtatctgttcatgtcttttggccattttttaatgggattgtttgtttttttgcttgttcaattgttaaaagttccttaaggattctggatattagacttctgtcagatgcatagtttgtgaatattttctcctattctgtaggttgtctttttactttgttaatagtttcttctgctgtacagaagctctttagtttaatcaggttccacctgtcaatttttgtttttgttgcagttgttttgaggacttaatcatagattcttttccaagattgatatccagagtggtgtttcctaggttgtcttctattattcttatagtttgaggtcttacatttaaatctttaatccatcttgggttaatttttgtatgtggtgaaaggtagggtcaagttttattcttctgcatatggctagccaagcaccctagcaccatttattgaataggaagttctttccacattgcttatttttgtcaactttgttgaagatcagatggttataggtgtacagctttatttctgggttctctgttgaacagaacagagaacagaatattggtcaatgtgtctatttttgtactagtaccatgctgttttggttattgtacccttatactatagtttaaagtcagttaatgtgatgtctctggctttattcttttttgcttaggattgcttttgtatttgggcccttttttggtttcataggaattttggaatagttttttttagttatgtgaaaaatgacrttggttgtttgatagaaatagcatagaatctgtagattgctttgggcagtatggccattttaacgatattgattcttccaatggatgagcatggaatgttttttccattcgtttgtgtcatctgtgatttctttcaacagtgttttgtagttcttatagttgtctttcacctccttggttagatgtattcctaagtattttagtttttttgctattgtcaatgggattgcattcttgatttggctcacaacttgaatgtcattggtgtatagaaatgctactgatttctgtatgctgatattgtatcgtgaacttcactgaagtcacttgtcagttcgaggtggaggagtctctagggtgtttctttctttgtttgtttgtttgctttgagacggagttttgctcttgttgcccaggctggagtgcaatggcatggtctcggctcactgcaacctctgcctctgtgttcaagtgattctcctgcctcaacctcctgagtagctgggattacaggcatatgccaccatgcccggctaattttttatttttagtagagatagggtttatccatattggtcaggctggtctcaaactcctgacctcaggtgatccgcatgcctcggcctctcaaagtgctgggatcacaggcatgaaccaccgtgcctggctgtctctggggttttctaggtgcagaatcataacatcagccaaaaaaaaaaaaaaaaaaaaaaaaaaaaaaaggtagtttgacttcttttcctatcttggtgccttttctttctttctcttgcctgatagctctggctaaaacttccaagcctgcttatttttgagcagctaaacttactagaaatgtcagggcaattgcattattttataataattataaaatatgcatttattttcttttcaaggtagaatacagaaaagttattacagaaacttcatgtttgaactaaattttctttttttcgttttttcagatggagacttgctctgttgcccaggctagagtgcagtggcacgatctcagctcactgcaacctccggcttctgggttcaagcagttctcctgcctcagcctcccaagtagctgggattacaggtgcctgtcaccatgccaggcttttttttgtatttttggtaaagatggggtttcaccatgttggccaggctggtttcaaactcctgacctcaagtgatccacctgccttgacctcccaaagtgctaggattacaggcatgagccaccacacccagccactaaaatatattttaaaatgacacttacccattcatactggttctgcttctctagcatgagccagtcatgcaagtcttcttaacccactgtcatgtcttctctgaggcttaaaatgcccagtttctataagacaggaagtcagatagacctgggttcaagtccagctttgcaatttactcttcgtgtaatcttgagtgactttctcattttcctcatctttaaaatggggataataacaacatctgtctcaaagagttttgtgaggattaaattaattggtgcacgtgaagtccttagtacactgcctggcaaacagtaagtactcaataaatgttagtatttttagtcaacattctggtaggcttctactactctctacccccaaactgcagtaaaacaaaaacatcttcctcttttgtaacttccaaatgtctatgactggcaatgcaagtcttctagactaataattttgaaatctttttygttttttggttttaatctcttgtatgattttcatgtctgatcagttatcaagtctaccatcctttagtcctccagttctcatgaccacttgctttgacaattataaaaaccactacctagtttgttgtgtctagcatttccaggacagtgtggtgggaaaagcaggggctttcatggtagtctccgttgggctcaattctattgcatacaggagtgtatgggcaagacattgaagcatttcgagacttagttccagcactaggaagatgggacctccatgtctgcctcttctagagtgattgttgggtaatgaggtaggattgtaagataatggctggagaggcctgggtataccagaggcattcattaaatgccatttatcttccatttcccctctggttcgtcctacatgtggtgaccacatgcactcatgaaatcgcaattgtaattacacagtgtcttgattaaatatcctcagtgactccccatttactgtttaggcagatctaaactcttctgccccactgaactagagaaccaggctgaatgcgtttgaattctggctctatgacttactagctaccttgaaacaaatttcataaccttctacctcagtttccacatctgtagaatggaagtgacaataattgtgcctgccttatgaggttatgtagctcaattgtaaatattgaattagcccacatgaaggacttagaaaagttcctgactgtttcacgccctcgctctgtcacaccagcattctctccatctcttcttccattgctcatctttagcacccctaggccctgacaagccagaaaatttgttctcctaaatctgtcccccagttctgcctccctttcttacacagggtttactgttccgaagaacagaaattccacctgtacccagactttcacactaatatggggcagtcctgaaactgaaactatcagcactgcccctctgataacagtttgtatagtcatactaggtttggcctgagtggtcatcttgcatatgctaccacaagagccttctttatggaggtctcttgttgctgctgtcttcccaaatcactttctctgttgcgttgcccttagtgattgtgagtttagagtttaccctaagcatcctacatgttatcatgactcatgccagattaaattctacttagttaccagcttttggcaccttgttccaggtttctttagggaggagggagaaaagggtatgtcttagcatacacagctcttatcagactgttagcattgcttgtttacttctgtgtttgccttattggactgtaagctctatgagggcaggtaatgtgtgtgccttgttcatctctatctgccaacttatagcaaagtatctggaccattaattggcattcaatatttatcgagtagatggatggatgatagatagacggataaagattggaatgtacatgccccttttggcatatacaaacatcaggtgaacttttttctctgcctagggaggaagctattcctagcaagaagacaacttaatactctagattattcctgggctactgaggttactaaataagagcatcttatttagctctgctgctgataagaccatgggaagttatttacatttaggagtggtatcttactaataccaactttcacaggtacttgggtggattccagatttatttccctgctatagttgcattatttgctttgtatgatatcttccttacaaagcacagtgttttcatagaaatattttgaaagacttgctaacggatcctgtagacctcacataaatcctctgtgaagttcgctatggaaagcaagaggattgatgtctaatccgtacatgacaagataaattttataattgaaagaccagtttatatgggcaagaagtgatcagacttccgaaaaataaaaaataaataatgtaggaaagacaaatgtaaaaaagcgtatgcagttatttggtcttaatatcagaattctttctggcttttattcatttccattcgttttctttctttctcttctctctataatactgctataatagtgactgctgggaagaaagagtgctgcccacaaatttttttggcagacttgggtatgagttaattagcattttggcctccagtctggagagcagaccctattctctttgtaatgggtgccggcaaggaagcttttcaaagccaagggaaaaatggcatccactctgctgtcaaggacttttatgagggtcaagtggtattggcaagaattcaggccagaatgatttggcttcagcaaagaaagccacagcccttgtgacaggttagattagccataaacctggatacactaaattcttcagatggtgagagattgttgcactctggcccaagaatttcttgtatgctttttcggtttttgcaagtggaggtttgatggtttgacagctgccctttccttacttgctctgtctcctgctgctcaggctccttctcagaatcaccacgagccaaaccactctggtacttgttggcccacgggtgcctcagtgcaaaagtattcctcagtgtctacaaaatgttacaaaaacgtgtctgagtaagctgatggatcgcagcttatttgtcactgagaaagttcaagttagtgctctaattccacctttgcaagtttttatgctaagcctcagacaaatataaacaccaatcttaatctaagtgtgcttattttaatatttttattaacagcaacagcagcagcattggggcattatttccaaaggcaaagaattcaaggaagaggttaatgtgatcattttaactaatcattgcacatamaagagctcattcaatcttcctcacagtctgatgaagtgatataagtatcatgtctgttttacaaatgaggaaactgaggcacagagaggttaagtaacttacccagtgttatttcttggcagatcagaactagactttttttttttttttttaatttttagttctagggtacatgtgcaagatgtacaggtttgttacataggtaaacgtgtgccatagtggtttgcttcacctatcaacccatcacctaggtattaagcccagcatgcattagctatttttcctaatactctcccccgcccaccctaactagtagacctttcgtaagaccccttccagttctgagattaaaatgttttaygtggatggggatggcaatcaggtcaaaacatgtagccaaagaagtgagtgggagagaaacaggtaggagttgtgtactagttaaggcttttgggggcacatgtaatggaagctattgtttaggcaacacagagaacttacttaaaaaaatcatggtctgttgcctcacaacatccaaggaaggggagaagccagatagcttcaaaaagctcaagtaaaggagactttgggtctcctctccccatcagaagctgtaagctggtggcccccaggctccatgaggcctggagatrtatttatttggcccatacgtttattaaaaattgagctggtgcttaaaaatcaaaaggttactcatggaaatccagatttccagcttctctagaaaaatcagaccaggcaaccttgaggcctcattccccctgccaccccgcctgtggtaacaattggctggagctagatggaagctgcctcctcctcagcccctctacctccagcagtcacytaagccagggttttacaacattgacactrctgacattttaggccagagagttatttgttgtggaggtttgtcctgtgcayaggaggatgtttagctacatccctggtatccactcactagataccagtagtaccccctcctcagtctgaccaccaagaatgaatccatattctgccaaatgtcctctggggagcagagctgccccggagtgaaaatcactgggttgtataatgagcctaagccactgaccactcagtccctaaatctttccattataccatttctgggagtgagatcacttggtctggcttgggtcagaggccttctcctgtgaccaggtggcagggtggcattaaccatcatggctgctacctcctgcagagagggaatcagggcaggcaactcaataggtatccctcacagtatgtgggaaggagggatgcaaaagacactgtgtgaaaacaagagagtccaggaataactatcaatagtataacaatcttcacttcccagaagttctttgaatctrttttctcaagtttattctctccagcattgtgtgaaatagttaaggcacagagttgtcattcatattcaggggatggggaaactagggtgcacagaatggtttaagtggctgcctaagtgcacatagcgaggtagagaaaggattctggagcccacctctgcccctctggctacccctaaaatgacagtcctctgtaacatactctgccctgtctagtccagggagattgaggaagaaaagcaacaccggccatcatcagactcagcccaggcctgaaagcatgaatgatgcagtcacttgtgtttgcagagcaggtttagctggcaggaggccacgctgtctaactcctgttccagtcagtctgggcgtaacccagccattatggtctctctcaggtttcgaatgcacaggagcaattaagtcattctcataatttcatgtggtacagaaagtcccaagccaaaaataccatccttggttcctacttttagacttccagggaacttccccctccctctctccctataattcactttgaytccttctatttttctcttcgtgaatgcattggccagacacagagtcctagtttacttaacaaggggctacagagccaacacaaatcaaaataaatccagccttcatttggcaggaatggtggaagttgggaattgctggaggttctcagaaacaagagcttgaaataaaagagcatgtaccctcatctctaggatgtgagcataggagataggagaacatgccacagaatgatcactgaaagatgatggagtgttggaggtggggcgggggtggggtagttgcatctgtactcccattattatttcagggtcctagataaccacaattaagtcactttatcgttagtacagaagatttcttgtcccatagaaccatgacatcagacctgtgttgcttccttaaataatgaatttttccaaatatccttcagatgcgtattaacagttgcttcctggcagtcaggtggctgatttggtctgtgtgtgtgttgggggatacatatgtccatatactgactctcccttcatgtggacccccatttgggttatatcaagagctaaatgaaatctagttggagatgatttcaatgtttcttctgtaggaatagataattacaaacttatttataagtcttctcactaaagcagtggttctcaaaagccttagccagcaccagaatctacgggaggacttgttaaagcacagattgctgggccccacccccatgcccagagcatctcatttagcaggtttagggtggggcccaagatgttgcagtgcaatggcgtgatctccgcctcccgggttcaagcgactctcctgcctcagcttcctgattagctgtgactacaggtggcatgccaccatgcccggctaattttttgtattattattattattattattwtttttagtrgagtcggggtttcattgtgttagccagatggtctcgatctccagacctcatgatctacctgcctcggcttcccaaagtgctgggattacaaggcatgagccactgcgcccagccaagactttgtatttctaacaagtttcctggtgttgctgatgctgctggtttgggggccccattttgtgaactagcatgatcaaggatggtgttctcgcctaatcccagcactttgggaggctgaggcaggaggatcgcttgagcccaggagtttgaagctgcagggagctatgatgccattgtaacagccagggtgayggagcaagattctgtctcttaaaaaacaaagaatggtgctctaaacgcaaggtttttcacagcagtagtgacagctgctcctttatgcttctgtttcttcatttgtgttgtccctggaaagtccccctcgtcccagtggctgagtcctctgcttcctccaggctcggcccaagttcctgttcctccacggaacctttcctgaytagtgcacacgatcttttctcttctctgaactctttcagttgtaaaaatgaaaccctaaaatttcttttgttgccttgtagtatgctcagattgatgcatgataattgttttcccaactagactgaactgatttgatttgtgaacacgatcatcccttagatgctcttatgtgtgttcttgaacttagcacagakccaagcacaggactcaattatttattttgtgatgaaagttcaaagtgaattaagagagaaaatatattgctgagtgttgtagtccatttggtttgctatagctgaataccacagactgggtaatttataatgaaaaggaattttatttctcctggtcctggaggctgggaagttcatgatcgaggggctgcatctagtgagggccttcttgctgcttcaacacggcagaaagcaacatatggcaagtgcgtgcacgagaaagagtgagaaagtgtgtgagagatagcaagasagggccacactcacttttaaaacaaacccactcccacaataacagcatccatttatttatgagggcagagtcctcatgacctagtcacttcttaaaggttccccctttttctaccttcagcactgtcgcattggggattgagttttcagcacmtgaactttggaagacacgtttaaatcataacgttgcctataacaccaactgggcttgcctgatatatagtgccagagatacccaccaaattaagctttatggttcttatatggtaaactcatgtgatttctgtgcccaaagctgcaggtccttctgyctgcttcagaactgcccaaacttctggtcttctagagcaggggtccccaacccctgggcaatacggtccgtggcctgttaggaactgggatgcacagcaggaagtaagcatgcatgagtgagcattactgtctgagctctgcctcctgtcagatcagtggcggcattagattctcataggagcccgaaccctgttatgaactgcgcatgtgagggacctaggtgacgtgttccttattagaatctaatgcctgatgatgtgaggtggaacggtttcaacctgaaaccgttccactcctatgactgtcatggaaaaattgtcttccacaaaacctgtccctggtgtcaaaaacgttggagactgctgttctagagtaaggaccttgtggttttgctcgttatgatggacatccagggccaccctggatggttgccttgaccatgcctgttgtctactgtgcatgagaatcagttgctggactccagggcagagtgatggctggaggtcagcatgcaggcagggaagtggagggggaagatgatcatgagtacatgagtacgtgggacaggcaggttggggccagacttgagagggcttacatggcacactaagggcttgcttggaatttgtcctacagaaagtggaggtttttaacaaaatcacatttgttctttagaaccataattctgagaccactagcttcttacagagtatatatacgaaactaccaaaggcaacttkgtgaagcagaggaatttgggcacgaaggcttgtttcatcttggtggtcagcccttcccacctttctttagatactataattcatttcctagggctgccttaacaaattgctatgaactggtggcttaaaacaacagaaatgtgttctcacaattccgaaggctaggattcaaaatcagcatgggcatcaggaccaygctccttccgaaggttggggagattctgttccatgcttttgctcagcttctagtgttgctggccagccttggcattccttggcttgtggctgtgtcgccccaatctctgcctccatcatcacatgaccttctccctgtgtctgtttctgtgtctcttctcttctttaaggacgtgagttatcttggattaaggcccgctttgctgacttcgtcttaacttgattctatccgcaaagactatttccaaattaggtcacattcacagatactgtggcctaggacttcaacatgtcttttttggaggcaacacagtgcaacccacaacagatacacacttcgctgcaccttatcattttaggactcaagggggcagtgggtttgctgccacactcaagctggtcaacttggcagtgtcatgtgttcttsgtgagsgctaggaagctgcctggacctagagtaagtaatactagcagctcacttaagtaattatgaagggaaggtgcacaggacctaagcagcaggctgtggagaactgaccaaaaagacgagttagggcgctattgcaggtgagaaataaggggaccttaagtaaggcagtggcygtgagaacagagaggaaaggggagtagtcgaggggtgggtctgaaggagaaccactaagatctgatgtagtgggaggaaggatcaagggtgattcttagcctatttacaaatgtggtgggtggggtatataatccctatcagtatatacgaaggcctatccagacaagcttctctttgwctctacccacttaagttatgctttatgtgctgccaagaagggtaaaaaggtgaaaatgatatggaagaaaccgaagggcaaccttagaaatgcatgtgaataaagatattttaaaggcagaaagacacacatttggcctttctgggaagatttctctaaacggagtgtagatgtctcagggaatggcagctactgccatactgagtggacttctcacaaggcggttctagggccgtcgtccagcctgagaatacacagctggctgacctccagggagactcaaaaattcttagtgaacctgtgttgcaggtcatggcatcaccatcatgatgtcctgttattcttcagtagcatttagtaaacagtttttgcatctgtttagtttacacagcaatcttggaacaatggaaaatcctttgacaagtcagaaaattcaagtcctgtttgttgttgttgttgttttagttgcttttttgggggttgtagtattgtgaggagacacttaacttatggaagcttcattttgttttcagtaaatggagcagcaacaccattcttrtagcattactctgaggatagacatcagttaatgtatgtaaggtgccgggctcagagctagtgcatagtacacagtcatcccttttctccctccccatcaatcttccttctcttctttcttccaggtttttttcttttaatttatttttagagacaaggtctcactctgtcacccaggctggagtgcagtggtgtgatcatggcttactgtagcttccgaactcccaggctcaagctatcctcccacctcagcctcccaagtagctgggaccacaggcatgcgtcaccaagcccagctaatcgaacaggttttctgactctctgaggcccagagctctttctgcaattctgcctctctggggctaaaatataaatatataataaataaataataaacaaatccctctagaggattttttttttttgagatggagttttgctcttgtcaccaggttgaagtgcaatggcacaattaccgctcactgtgacctccgtctcctgggttcaagcaattcttctgcctcagcctcccgagtagctgggattaggggcacctgccaccatgcccagctaattttttttttttttttgagatggtgtcttgctctgtcacccaggctggagagcagtggtgcaatgtcggctcactgcaacctccacctcccgggttcaagtgattctcctgcctcagcctcccatgtagctgggattacaggtgtgagcccccacacctggctaatttttgtatttttagtagagacggggttttgctatgttggccaggctggtttcgaactgctgacctcaggtgatccaccygccttggcctcccaaagtgctgggattacaggcgtgagccattgtgcccagcctaatgtttgtatttttagtagagatgaggtttcaccatgttggccatgctggtctcgaactcctgacctcaggcgatctgcccccctcagcctcccaaagtgctgggattacaggtgtgagccaccatgcccagcctatttttttttttttttttttttttttttttgagacagagtctcactctgtcacccaagctggagtgcagtggcatgatcttggcttactgcaacctctgcctcctgggttcaggtgattctcatgcctcagcctcccgagtagctgggactacagatgcatgccaccacatccggctaatttttgttttttgttttttaatagagacagggtttcaccatgttggccaggatggccttgaactcctgacctcaagtgatccgctcaccttggcctccccaagtgctgggattacaggcgtgagccaccgcgccagccccaaggatttgttttaaactcactggagccaggcgtggtggctcacgcctgtaatcccagcactttgggaggctgaggcgggtggatcgcctgaggtcaggagttcaagaccagcctgaccaacatggagaaaccccacctctactaaagatagaaagttagccggccatagtggtgcatgcctataatcccagctactcgggaggctgagacaggagaatggcttgaaccctggaggcagaggttgccgtgagccaagatcgcgccgttgcactccagcctgggcaacaagagcgaaactccgtcttaaaaaaaccaaaaccaaaaacaaaaactaaactcattggaatcatttacaaataatatactcacccaaatagctagattaggggtcttagagtctatgaagcaaaccctgagagtgaaggtgggaaggaaatgtcagaattataagcaggattaacgtagattaaagttgacagaatctggttcttgctctgtccctttcccatggtggccagccccagctgcccagctgctgttgtctgtaagccaaagctcctgcgtgttctccttccaatagaaaacgactgtgcggaacctcatcctccccgggcccagggtgttggtgcagctgctgagggatctggtgaggtagcctatgctcatgtgccactggagatgcccggagagttccaatgcccaggccataccagcagctccctgggtgatgtccccttggacttagtttcactctgaagctgggaagcaatagcctacattttcagttaaataaaagctggaaatgatgatctcgttaggcctgcctcctgtacttcatgctttggtgctctccttcattttcctgccaggaagactttcccagtgcctctttctatatgcttgcatcccrttctcaagtctctgaccagcggttccactttgaagtccatcccacagaagtattagctcaaggctgcaaagatacaggaatgagaacgcttgctgcaacgctgctcataacagggagaccaggaaaataacccaaagggccattcacacaccaggtttttgagatgaatgacmtcatgagcaactcatgagcatgagcaccaggcgtgcctcaccmtcttggctccttgttgataacgtgtcagtccctaatatccagcctgactccaaggactgagatgatgagtgtgaaagtactttgtaaattgcaaatggttttgcaaacctaagggatatgatgaatcaacaatgagcaaagtcctttgagacctttcacaaataaaggcattttatatatttaaatccttggcactcacaaatttagcatttgaggttttgccaacctgtggagcaaccccatggcaatttgccatttagctgaggcatatattttcctccatccacaacctgagtatctcagacgaggatgaggagtgagtgaatgaaggagaaatgttaaaatatgattacattatagagtctttaaatgctcattaaaacatatattcgttcagtatcttttatgctttcattaatgygccctaggctattgagaaagaaagagtaagacaaaaaggtgaaaactagaaatattctatgtaatggaaaagaccataaatatactcataaaacaattagtgagcacagaaatatacaatcaggtaatctataataatgtacatgtaataatctacaacagattttttcccttattttggattctgagaagtgagcactaacayattgcaaagggatttaattgcaaatgatttgtgtaaacctggtgccataraaaaacttctggggttgaatttaattttatcgcatttaaatagaaaaatgcccacctgagaatatgcagctgtaattacgagggagttttattggttgttactgtggcatgtgtttatttctctcccacttaacattctggatggagggagttcaaggctgctgtgtagctctgcagttgtctggttttcctgctctgccatccttagggtatggccttggtctgtcctcatccttatgggcccccagtgaagctctgatcaagacctcctaattttgaatgtcctagaacttgaatacaccccttccacttatgtcacacggccacatctaaactacatggtaggctgggaatgaattttttattctgggtaactgtgtgtccaataaaaagcccgagattttataactcaaggaaaggaagcacagctcacaattgctgccacaggtcagcctctgtctgtccatgagccagttgttcagatgggaggaaatctgaatagaggaagagacaagtcaggcaagaaagttgtgactcagggtttatctcatctgctggggagttcaaggggcagtttaatactggctgtatttttcgtttctctaagtagaagtttcatttaagttactgtggartaggctgggcgtggtggctcatggctgtaatcctagcactttgggaggctgaggtgggcggatcacttgagctcaggagttcgagaccagcctgggcaacatggcaaaactccatctctactaaaaatacaaaaaattagccgggcatggtggtgtgtgcttgtagtcccaactactcagaaggccgaggtgggaggattgcttgatcccgggaggcagaggttgcagtgagctgagatcatgccactgcmctccaacctgggcgacagagtgaaaccccatctcgatagataaataaataataaataaattgtggaatgatcttctttgacattctgctagatatgaaggctgcttagaggcagttgtttgagaaagaaaaaagcaagccctgacctccaggaactggtgacagtggacgctatacaccactcgttcacagtgttgctcgacgctggtcaggtgctcacagctcggccatgttgtcttcctgttggccataagccgactcacagagcactgaccttggacaaggtcatggtgaaaccatggtaaatagagacaaagcaaagccacttcatatttttttctgagcacagacacaaaaaagtttcctgtaggacccataattttgattatgacagggtaaagacaakttccattttctaggatttgatttgagccaaggtcaatgaatagcttattttgtagcttaattgacaacagtaaatacttttgcagtcttaggtcccgcttgatctgtactagggagggtaatttgaaccaagagcctgattcccgggcatttctgccctaaccagatcacgggctaaggatgcaacagagcatagtttcagcagagcccccttgaaaaaaaagttatgctgaatccatgatgcaacatccatttgaaatgaggaaaaagaaggcaaagatgacatgatttattttgtgtcatacctaaataattagaagaaagcccctttttctagtagcacctataaaaatttcactgggctttggaggtctaaagggaaattctagcacatatttcagctccagttaatccaaggttaccatcatctcagttttgtgaagagatggaaagaagccaactgaaacagtagcgtaggaacccagccctgccttttgctttatatgtgaccttggccacgtacctgaccttcacctttctcatatagaaaaagaaaataggcgggccgcagtggctcacgcctgtaatcgcagcactgtgggaggccaaggcagatgactcacctgaggtcaggagtttgagaccagcttgaccaacatggtgaaacctcatctctactaaaaatacaaaaattagctaggcgtggcggtgtgtgcctgtaatcccagctactagagagactaacgcaggagaatcgcttgaacccaggaggcagaggttgcagtgagccaagattgcgccgttgcactccagcctgggtgacaagagcgaaactccctctaaaaaaaaaaaaaaaaaagaaagaaaagaaawtgaaaatagagacgcctgcctgatactcctccaggcatcactttaatgtgtatggaaactcttaactgtgaaaggccatatatccaggaaacgggccattatattcctgctgttgttgttaattttatcagaagagagtcctacactgccgactcagtagaacaagtagcttttgagcaatggttttgtgtgcagtcactgtgcctggtgttttgtgccaccgcctttccctgtcacatttgtgagccagggagaggggcaaatgcgagatgatcacacttcagtgccactactcgcagataccatctcgctgtgggattatgctgcttactccgaggagagatctggaaggcactgttgcctcttgcttttgcattttatgtatctatttatttatcttttttaatttcttcctttttatttatttctttctttatttttagacagagtctcactttattacccaggctggagtgcagtggtacggtctcggctcactgcaacttctgcccctcgggttcaagcaattctcctgcctcagcctcctcagtagctaggaaagggtctcactgtgttgcccaggctgaaggactatggcacaatcccgtctcactgcagcctcgacctcctggctcaggtgattctcccatctcaggctcccaagtagctagaactacaggcacatgccaccaccacacccggccaatttttgtatttttggtagagacagggtttcgccacgttgctcaggctggcttttgcattttagatgatggattttatcaagctgacatctaattctaacaatcaaatttagacttgatgagggtctgaagctgaagactttatttgcagcatggaactcacctgccaagctggcttctcaaaataccagccaggcattacattttcttctgtrtgggaaccagttaatatgtaggtggcttggagtgattctgaggggtattctcaccagacaacaactgaaagtttcctttctccactctagagatgccttggcctaagagattgtattcataggtgccctggtcaaaatgtccttctcccctgggcaggactggagacagctttaccagtccttaacttccaatgccatttttagcttctaaattggcaagtgtcttttatttactttcaataatttttaacatatttgtataatttatatagtgtccagagtttataatgtattactttacacctcatttttcagttgtaaatggaataaaattgatcaagccccaaggtgtgtcaggcactgtgttagatggactctggagattcagagaaaaagagacagatttctttgctcaggtggcatgcagcgcctagtcaaaaaatcagttgtgttatgtctaattaaggtcaagacgacatgtgaaatccaataatacagatgagtcctagacacagaacttttcctcctggcctcatgagttagattgtggcacccttgtcatggatgaggaaagtgagactaagcrgccttaagtgactgcagtggtcacccagctaaggtgttctgacttctaaatactggccttgtctacccagcacactgccccgcgtctcaccttgtcagcattcttttgcagtatgttgccatttcaagatggcatgttaatgtctgtgatcatatagaaggtctattttggggtgccttttttctcaagacatttaggacagtgccttcgttaattggacatgtccctaaatcttacttgagtcacaaactgatcccctcattggcacgctggtttctgttagcctcaaggtgtactcttttctaacttttcctgcctttttttctccccacatctgatgctcatggtgcctgggactttcctgagaattggccagaccccatgttcttattacctccaacagaggctttagttctgccaggcaggggacgarcctacctttacgtaggtgttctgtttgcattagtttgaaaatgggtttgagggcaggggaaggtaagttatttgagtgcatagcaattaggatgagggtatgtattaggaaaaacgaatcagtagtatcacagatgatctcttgatgttatcaaaataactcattgatatgacatcttcaggttagctttcccgttctctatcttggaagtcaaccctgtgaggttggaaacaaaagagttaaagagaatcccctgggccacccagccagtagtaagtcgcagaagaggaatttggagtccgctcttcaggctccagcaggctccagtgctaagcctcttctctctgccaggtcatggcagaatatggacttagccacaataaagctgcctcaaggaccgaggagagtggttgttactgactgactttattcctctcagcatccaagaagatctcttcaattaaacattatagccttcgggcattagcccaggagacacagttgagggtcctaggtgctttcacttaaggcagggctgttgagtcggtgaggggatgagggcatctcaaaagaaggctggctttcaggattgcacagagatgttcctgctcccagcagactggggtaaaatttcctgggaatgagggcatttctgaggaaaagagaagggaaattttgttgactacaagttgctatagtataaatgggagaattaatctatttttaaatgctcagatgtaaagatacattcttattgttgaatccatattttcctcaaaagagagtggagacattaattaggaagacatttttaatacatcttgaggattcagaggctgccactgataaaatttaaaaaggaaaacaaatgtgccaggtgcggtggctcacacctagcactttaggaggtcgaggcagacgtatcacctgaagtcaggatttcaagaccagcctggccaacatggtgaagcaccatgtctactaaaagtacaaaaattagccaggtatggtggcatgtgcctgtaatcccagctactccagaggctgaggcaggagaatctcttgaacatgggaggcagaggttgcaatgagctggcatggtgccagtgcactctagcctgggcaacagagcaatactctgtctcaaaaaaaaaaaaaaaaaaagaaaaaaaaggaaaaaaagaaagatatacaataagctccctcctccaagagtttgttatgattgtgattttatcgtttggctagcttcttagagctagcctgtgagaccttcaagaaagcctgtcaggatttttcataatcatagctccaacaaaagaggggcagtttgggaatttcttttttaatgggaaccccggaagatttatagctagaaggcgatcacaggtttctagatcagtgcaccagcgttcagcttccttttacaacatgtggcccacttccaggtttcaaaaagtgtgaccgcatcatgggtagactcacttcctcttgtgcttaggtctgagaatgagcgggcagagtggggaaatagcagtgggtggggagggtggtgtctgaagatgtttgtgggagtgtccagtggttctaagcctctagaagtatctttgccaataaagactcagaaatgggaatgggggtgtgtgtgcacaccagaaatggccgtgtgtgtgtgcctgtgtgcaccagaaatgaccgtgcgtgtgtgtgtgtgtctgtgtgtgtgtgtgtgtgcgcgtgctgggcaggcagagccatgggaacaggaaaacccagcacccccttcagccttttcctagggactggcattcattgccaggcatgctggttgggaagaactgcccaagattttcatctagaagagattcaagaggacccaaagcccaggctcttaggatttcaccagatgataaattataaagtagctgactggtttgtggtgaacagttgctcaaatgcccttttagcttctcagtggtgacaaagtatatctcacggagatcttacattacattaaagatttaggggttccagttaggatatttaaaacctttgccagataggagatggtatcacatacctcacaccaaatttgtgcgtctcacagctgggcattgagatttttaaaatagcaacttctgagtggaaaattgttagggaaaatctaatcaacttaatttaaatggcataaatgatgattagagctaattatcgtcagaatttgggctggtgtttctaaaatgaaactacagagtttctttaaatggggtcatcaggttaggattcagttgtcaagaaagatcaatgatttgtgtgaactcacagtcttctcagcttacctggtagccaggggtaatatttcacacttcggagtgaattgcatttatattctttttcttcatagctcactcaggatttttagaagatgaaagaattgaatcttatggcaacaaagcccatttcttcacagtggaactataaatgcagacttaagtaattaatttgtaaacctttgtatctttttaaaacatcatcctatccccaaggcctaacataagttttgttgactaggtgaaatgattgaatcagtgaatgattgaataaatgaaaaatataggatgcagttcaggaaagaaaaccacaagagtgcggcggctatttaaaaaatgccatccctgtaattactgttattgccaattcctgtttgtgtttatgaagcctgaggaattttggagggcactaccagtaatttgtatctcattactcaagctaagggagggataaatgaatcctaaatgtaaaccttttaccgtcaaaatggaaaacctgtgtttttccagtgatgtgtcagcagtagctattaatattaaaatcacgaacctacacacatacctttaagaaatggactccaggcttgtaaaacatgtggccgtaatattgrcagagcaagaatctttggcctctgaataagctcactggccttcatgtctgtgataatttgccatagagaccaggctttttttctgaggatctatcccagtcactgtagttgtggaagtggtggttcttgtataacaaagtcatctgaggtaatatttccacacaataatttttagcaaaaagaaaatgtttaatggttatcccaggtggmagcagattcccttgtggaaacaagaatggcgggaatcaaaggttgggcatagagaagaactttcctctttgtgattcaaggacagatgttggcaacctctttgaactgaatgattggactccatccttttcactcatgttgtcctttacccccagtcctcacctggatttaagcgatctggtctgaaagaactccttccatttctaccctttaaataggttcttatttaatgccactgtagtcaaggaagagagggggaacaggattggagcaggggtgaggttcacaggcaccccgagggaggaaaccagacgtgaacatcccacacatagcagctttgcatatggacagacctgatttccttctatgcctcttcccacagtgctgtctgggccattaagaatcaccttgactcatagttctggttttcagttcagcttctaggaatgcatgatttcacaccttgtggaggtagaacgcaktatcactgatcagggcacagctatcgggcaacctcagcctctctggaactcagcgggctgtgaggaagtcatgtatctaagaagcccaaacacatactccatggcccttgactgtctgaaaaactcagtttcggagtttaatacattcccccagggtaccaaataactagatttgtaaatgtaaattttttcagtcagttcttaaggtttgatgaggaacaggatatttacatagtcgcaaagtatctcaccacaaatcactttgcatttgtaataggaaaaattacgcagtggggaagttggaaaatacttaaccaaatgatgaaagtgaatatcacctacaaatatcatgtacctctggacatcatgccctcrgaaggacacaaaattatttgcctagaattctagtyaaaaatgtraaagatgaatctaagtatgacaaatatcaggcaaactcaaatggagggaaattctataaaataacttgcctgaactgtttaaaatgtcaccatcataaaagacaaaggaaaactcatgcctgtaatcccagcactttcaaagcccacggtgggaggatcactcgagcttaggagttcaagaccaacccgggcaacatagtgagacctcatctgtactaaaattcaaaaaaattagccaagcatggtagtgcacacctgtagtcccagctactccagggctgaggtgggaggatcacttgagcccaggaggtcgaggtggcagtgagccctcatcgcaccactgtactccagcccaggccacaagagcacgamcctgtctcaaaaaattataaaaattttaaaagccagacatggtggctttttatcccagcactttgggaggctgaggcaggcagatcacctgaggtcaggagtttgagactggcctggccaacatggcaaaaaccccatccctactaaaaaaaaaaaaaaaaaaaaaaaaaaaaaaaaattakctgggtgtggtggtgcgtacctgaaatcccagctactcaggaggctgaggcaggagaatcatttgaaccaggaggcggaggttgcagtgagctgaaatcgtgccactgcattccagcctgggtgacagagtaagaccctgtctctaaaaaaaaaaaaattctgacaaatgtggtacatgatcctgcaccaggggaaaaaataagtaataaaggacatgattgggataataaaattagaatattgacttgtataaaaagtattctatygatgttaaatttcctggccgggtgcggtggctcgcgcccgtaatcccaacactttgggaggccgaggcgagtggatcatgaggtcaggagatcgagaccatcctggctaacacagtgaaactctgtctctacaaaaaaacacaaaaaattagccgggcgattagccgggcgtggtagcgggcgcctgtagtcccacctactcgggaggctgaggcagaagaatggcgtgaacccgggaggcggagcttgcagtgagccgacatcatgccactgcacttcagcctgggcgacagagcgagattccatctcaaaaaaaaaaaaaaaaaagaaaaaagtatgtgaattctttgtatatttgtgtaactgttgtattgaatttaaaaatagatggtttaaacagccctaccttcattgtcctgcactcaaacacaaaacaaacagaaaacccagttgtctgctttactctgggatggatcagcaatcactaaaaggactggaagaggtctccatcccctctgcccctcacccttcctccaaaatcaagtcactccagttgatgtggacagtgcctgcagagagacacctaccagcacgtcccgactgtgtttcaagggcaattaagcccagggaactgctgggcaaatgagctgttctccctaggccttcatgctggcctgtgttggtaggagcccccgctctgccatgcagagccaagaattttctcagcaacagtaatggtggccgcaaattgaggtcagtaggaaaacagatctgttttggtttgtaatgttgcacacaatttggtgagtgaacagaaaagaatgtaccccagtgaagggacagcctgtgaaccctgtgtttggttctgaatatccttatgatgcccagcatagaaaacaggaagcatcagttaaaatgggaaattgctgtgggctggattactgtaattcctcgtcttacttagaagttggcatagagcagggtcctttatccacagcgtgatgtctcttgcttttctatgccttgataattttgccctttctttagggtggtgcattgctaagctgacaggcttttaggctggaattgctaccttttagtatgcttagaaattgtgtttttaaagagctgtttgttttttctctgtctctrggttaaaagcagtctagctccactgctggttctggttccctcctcctgccccctctttaggtctaagtaggcgagattgagcacacagagggactcacagctcagcttaataataaccccgcagtaagtgacatagccattgttacactagacagatacacagaggtaagttctccaaagcagatgagctggaccggaaatttgcacatcagtccttccccgtctcttccactcctttggggtcctccaaagcaggaggggaattttgccagcctttccacgctgtaacaccgagataattatacctgctctccgccctcctggcagagttgttttaggactctcctgggatgattaacggctaagttgtgaaacactgggagcaaatgcgaggtggcattattttctctcgctggatggggatctgactacagtagttggtccctttccctctggaaagaagacagtttttctgcatgacctgggctgcaccctctgatggagattccatcttggctgcctgtttcctgtctgtagtgccaagtactcagccttgccttcctggccctccttcggtcagctctattttcctacttaaccgaggctaccgtttcctcaacacaaatccgcctttctagtccagttggtctttttagggggttttcacgtggtgaaaagctcagtgcaaacacaagcgatgttgttaccctcgtccatgcctttactctccttgtttccctctcaggaatgccttttttttcctcctctctcccaattcagtgcttaagcttttttcagtcctaactcaaatctgatctccctgaagcctcctaggatgactcaacttttagtgattttgtctcattcattacttcattgaacaggcatttataaagccacttatgtgcatggctctttattaggacaaggagagttcagagatgaggcatgccccatcctcaggtcacttacagttgagaaagggagggagaggagatataaataagccaacagtgggggtcagaggacagacaagattaccgataatctgggaacttgcaggctttaaagaggtagcatttgcatggggtcttcaaggatggactagattgaacatgcaggatatttggtccaggtggtgagaacatcatggactaagatgcagaggtcagatgttccatgcaaagagccccaggcagactggtggcaggagcatgaggcattgtgggaaatagcactggcaaggagagtgggctatgagctaggctaaggaatttgaacctcactgactggtagggaggagctcccctgagggcaagagaaaccctggctgttaggaagagtcaaacccccgtcctgtgggggctgaaacgacaggggcaagggagccaagaaggcctgtgttctcccttgagttcctgtggctgccattgacaattgaaagcgggagggcaaagatactggcatttccaggacattttgtggtatatggcatgacgtgaccaagcacagctatctctcactatccaaagctgtttatttccaagttcaatggggtttgggtaggacatttgggaataaggaatgctcctttgtccaaatctatttggaataggaagtagtgagattccagataagaggtgatttatcaaaaattttatacagatctatttagttcctgattttggacctcagagaatgagggatatctgcctttgaagcagctggcccaggaaaatccgagagacctctaaggggcacgatcatgagatagaactcacaccaaaccatctcagactgttacagtttgtctagttggttaacataagcaggggtgatataaaatgtttaaatagttagcaacatgaataccgaacaatcagggtggaagccagccagacgctctttccagtgggaactgagtatcagttctgtatatatgtcagggtttctgttgttattttgttttgtttgagacagggtcttgctctgttgcccaggctggaatgcagtggtacaatcatggctcactgcagctttgacttctcaggctcaagcatttctccacctcagcttcccaagtagcagggaccacaggcatgcgccaccatgcctggctaacttttgcatttttagtagagacagggtttcaccatgtttcccaggctagtctcaaactcctaggctcaagtgatccacccacttcaacctctcaaagtgctgggattacaggcgtgagccaccacagctggcccatatatcagggttttttgttttgttttgtttttgctacatcagatgaaaaaacttttgagggcttcatttaccttttctgaattcactgtgatgcctaaaacaacactgtacatatgttaggggcttaatattttagattcagctgaatttcattagctttatacatattttttaatttcacaaaaattatttattttattttgtttttttttttagagggagtctcactctgtcacccaggctggagtgcagtggtgtgatcttggctcactgcaacctccacctcccaggttcaagcgattctcctgccttggtctcccaagtagctgggattacaggtgcctgccaccacgcctggctaatttttgtatttttagtagagatggggtttcaccatgttggccaggctggtctcaaactcctgacctcaagttaataatcatgccagcattatggactgttgggacaattgaatgagttagtataagtaaagtgcttagaatgttgcttggcagatagggaaccctcaataaacttaactgggagggggtttcattctaagccagtgtgccttccatctggtagatgggggtgattgtccgttgcccttcttttcctagcagaataaaaagggtgccttgctgaattctaaactgttttctcccactcagtgcagacttattccttacctgtggtgtttggaccaatggtacccccatgcctccctgtgcaactccagaaaagtggcttccccagcccagcacacaggacagcttaaacagtttatgagccgaggcctcccctttgtctacaaactcccatttgcctgccacctcaaatcctatgggatagatccccctgagactttatacaacaaggtcacctctcaagctctggcttgtagaaatttagtcccttctttggcaatgtggatgcctgaagtagtagatagtgggctatgttcagataagaaagaccccctaaatgggtagacccacgctcatttcgcggtcttgtttgtagctgtagtactgtcgcagttcagttgagattttcatcacactggtcaggaaattcatagtgaaggttactacagcaaccttaactctgctctggaaagcatagcccttacaatggggcctttcagaggctggccctgaagctgggcagtgattcagtctattcagaacacaatggggcaaaccagaatagaaaggaactgcacattgttttaggcctcccattgccatctgtagcatttcgtattgttgtccatccttgcggccaacatgagttttagtttctctagtaacgcactttaaatttcagaactcatatgcctgccagtcgtagtacatttcatgggagttgaaatagtaataataattctgtagtggtgtacaaactcacagccagaagatgctgtagaaacacatgtaggaaaaggtggattaaggcttttcatttggagacaagggaaacacccattgggtgtgtttgaaacaaaactgatgaatttgccttgaaatcctgtaaaactatcatagatttttttctttaaaaagaatgtaatctttaaatgaccagtaaaataaaatcaccccttgcctttatccacagccactcaaaacaaatccactcaccaaacaaaatttacttaacaataggatctgaacggtttacttacatttttaaatctagagagtgttgggtagattttaaaaagctgaatttagctatttagcatgtgaactatagttatactaagcaaaagagctgtggtttccttagaatgagagttggaaggaaactttttaaaatttttttttcctttagagcatttatggtatttgatttattcatactgcttgccctgtgatcaaacaacttttctttgttgtctatttagatccctagggttgttttatttccttcccttctttaatgtttccctcatgtttaatttaaatcatttgctttttatcttcctcggcatctcaagctatttctctttttgttaatctttgttttctctctctctctctcttttttttttttttttttttttttttttttagtatttttagtagagacgggatttcaccatgttggccaggctaatctcaaactcctgatctcaggtgatccgcacgccttgacctcccaaagtgctgggattacaggtgtgagccaccacgcctggccacctttgttctctttttgctgcactaaatttaaaaaataaataaaaaataattgaaatgtgcttttgtttgtttgttttagtgcaaagctagcagctacttctgtatcttaaacacaccagcctccaacaaacaccaacaaacaatcggtgaaaccttttccttttaactccggtgaacttgaattgacatgtagtcacacccaggtatctttgggtgttggttatttgattaggaggtaatactgtgtttttggtccaactccaaggaaaggaaggggtcacagaccagcaaagaatatcaggagtactggtgctgcttttcttcatattttgggtcgctgggctcaggtagaaagagacttttgtgcacttgggaacagagtatcgtacaaatcctttcagcatttttgcaaccagaaaccatgcaaatgtttttgcagatatgcttgtggtcttgctggcagtttgtgagcacaacgctctgtttgaggtggtgatgttgacttctgttttctattcactgtcctgccccaaatcgagcatgccgtcttgtactttaattgtgtgagcacactcttttctacctaatgcggagagtgggtatcagttggtctccattccttgcataaaatgatttttactattactgctttgagataatttgtgtgtttatctcagcacctttgactctcattcctgtcagtacagcaagggaacccagcatttactaccagctctgactttgcagggttgagagtggcatgctgtttgactttggaaactatgttaaaaattcctccagtggatccctagctgggactgttttggcaattgatgtctatcttgcctactttttctgaggatttctgcaaggttattttaaacatattcaagttgtctgattgtgctgaggcaccgttgtcacaaaagaaagtcacagtctattacctctgcaaaatttttgaatgagaagcccgctgttactgaacaccaggcatggggagtctgactttgaagctggctacgaggcatgctttcaaggagacaaggcagaggcccaaagatgtcgcagggtggctccaaagctctgatctcagctttgctgaggcatctcctgtgcccgtgatctttctaagagtcagtcattcaaggtacccaaaatgtccctctgtttagaaagggtagctctgttccgtagccaaggtaacacttcatccagtttaccactgtgggatctaaaggcagcttcaagggttgcatatgaaacctggctctcagaggacatctcccgtgagatattttcaccgagtggggaatccatttcttctgtcttctaccgtagccttaatagaagctgccaggtttctaaagccaccaaaccagtacaaatctggattccatggacacacacactctgtcaccaagtttttcatctgttaaatggggatcacagtacctccctgtttctagaattcttttgaaaccaaatgaaacaatgtacgcaaagcacctaacgtagcattgggaacatggttggtgctcaagaaaagtgatgcccgttccccgatccccaaacattgtggggcacacttcttgatgtgggttgcccttttgatgccatattatatttcacagatacaatgagaagtaagtattcttggagaaggaaatscaaaaatttccttggattttctagggagttgtgagttttaaactggtgtgacccaaccatgtccataatcacatcagacatggtcagtttgtgttttgctttcagttttagtgattctggcaggagagagttactggcagaaggaacaccttgaaatgctacagccagagatctctaactagatgacagctttctaatttctgctggcattgcccctcatcttctggagattgcctttttcctttctgtctgtcttgtttctagatttcaagccaatgccttaactcttactttcttcccataagcagasacctgtgtcttgggtggatgacaaggggttctgggaaagagatctccaaagtggggtctatgcacttttatgtgcaaggaaactcactggaaagaaaatattaaaacctaatttgtatttatctttacattaaaaactaagatgaaattgagctgctcccatatataatatttggatggaccccagtctcctcatgcagtttgattgccagagggtcagggctcacaaatggtattacttattatttgagaaattcaaattatataaatgcctggattcagctgattattttatggtaagcatccaaaatagtgccttatttttcttcccagaaacaaaaaacttttggtacagatttgctcaggagggactgraagcagagagctgcacagtgctgggctgggagtcagaggacccgagttctagtcctggttccagtccaggatggccccgtggacacatcctttcacctctctggccctcaggtccctcatctgtaaagtaaaagttttgcactgcttaatcgataggccaggccccttccagctacaatattttagggttctgaatgtaaatatgtaagtattctgccccttccttatccctgccactttgttgtttgtttaaacaccttaattttttgcctacaaggcatcagtctgttgctcaaatggtctttgtcactggcttccattttggttagcctgctgaactccctatgtatcttctctgcagctactgtctgtcgtcttcttttctgtggcggatccctattctcagaatccmatattcaaattgactcacatttatagtgtccarttatacatcacttgagcatcatgaaactttaaaagttctatattttttatttgaatcctgtccctcctattatcttattagccagatgagatgacagtacccagtctctttcttgaaatatcatacatccaatcagagctatattagtggctagtagtatcccagttcacttattaataaccaatgcaaaactttactcatctggtactgtgagcttgggtaatatgaaatctctgtgcgttatctcttttaatgtactcaaaagcactgaacggggctgggtatgacagctcacacctgtaatcccaacactttgggaggccaaggcaggaagatcgcttgaacccaggagttcgagaccatcctgggcaacatagtgagacccccatccctacaaaaactaaagaaattagccagacatggtggcacacacctgtagtcccagctactcggtaggccgaggcagaagaatcacttgagcccaggaggcccaggctgcagtgagctgtgatcacaccactgcactctagcctgggtgacagagtgagaccctgtctcaaaaaagaaaagaaaagaaagattaatttaaaaaaagtaatagaattatttgcccaatatttggtgagtcggtgagtgacagtggtagtagtagtggggtttgagttaaggaataattgtttgcaaagtgagaactgtaaggagtgcctctgtgcaccaygcagttcaaaacccatcaggaacatggcaggctcgctgagcgccttcgctgcacattgttgattgtcatgtatttgtatgactatcatctactttaaaagttttcatttgacaataacttataatcattcattcacgcattttctgatccactccttctagttgagggttgcaggtggccagagtctatcccggcagctcagggagcatggcaggaaccaggcctggacaggaggccatcctatcttagggtgctcacacaatcccccacattcactcagactgagaccatgtcaacaccccaatgtactcaatgtgcatgtctttggcatgtgggaggaaaccctcacagacatgggaaaaacatgcagactcctcactggctggaccaggaatccatttttcttcctcattatctttatcacaaaatggcgtcatccgaggacctgctctattggcttgctgttgaacctttaataaagatctaagctgatcaaaggaaggcagaatctacctatttgtggccaccctagaagcatacaacagtgagggtcctggtaagatcagtgaagccgtgctgatcttccaaattggtttttattgcaaattcattctagagcttgctgattgaacttggggctggggaggtggcagcaactgcaggtagccctcagaaagtctgtcgggaaggacacatcaatagaagataaggctcccgtctctgcatgctgcaktgcttgccttctgcaaactgggcttgcgatttgggtgtgggttccgagagacaagcccctagcaggcccattagaagacagtgcctcccttcatgtctatcctagggcttttagttgaattatcaagcttgttcttaattttccccaccccttctaagttccccaagcccactcctaaagtccaaggtatggatcagaagaaacagcaagatagccctgcatcctctgtcaggtggtggaagggagtgagaggatgaacttgtttgtgatcacacattgagcggccctgagcctgcaggacccttggcgacactgatctgccatgtggattagtggctgctcttgtggcttctccctgagatgtgcccacgggactctcatctctgccacccatcaaccagctgtggtctgagatctctgtttgtaaacatgtgtcattgataccctaaaggcccctagaccaatgcccttatggttacattttgccccaagagggacatggtgccactgtgccatagatcagagcagatcaggcaagccaagggtccagaagtaaccatgccagaaacaggcattcctcacttctgcatttggttcagcgttggctagtggttgttcagggaatgctccttgcccctgagcttggcttgtttycctggactccgtatccctatagcaaacccacaacaaaggctgtgcccacatcaagacacccctgatcacatccagacccttcccccgcttagcacgtccagacacagtacccctaagtgagagatgacacaccaacaccttacctgtgtcaccgctccttaaaatccaactctttatactcttgtggagtttccacgttggcttttaaaagacagagatgagaaaataatttcatcaaccttataaaacttttaaaaattgagttcttattcagatatgccccaaacatttttcagaaaaatagggcaatctgagaaaaccataacatgtgagtagttggttaactcatgtcagcatacctccagcattttgcatgacttataaataatgcgtattttgcaagcagtataggagagattcttccaaggataggaagtcctgactttttggcaggttgatatcaactctgccacagcctgctgataactctttgcatactgttctttttctcagaatagcatttaaattagagtttctttgttccatggtacagggtgatagttcatattatgtcacaagaaattgttcagttacctccctgtctttatttatatgcacagctgctggtgtttctagctagtcttcctgcctcattaccttggctgtgtaattgaattagaaaaaggtattgagcagctactacttcagagactatcattttcaaaccacaaattaggacacagagtctggtaggatttttgacttatgaatctattaggccggtgccattaatggcaaaaaccgcaattacttttgtgccgacctgtatgattaataaaaatcttaatggacatgcacacactaatttggtatgcatttaataggctgacttaattttttcttttctttttcttaaaaatttttttcacttttatttttaaaattcatttcagctaattaattaattgattttattattttttttaaagacagtgtctrgtcgggcgtggtggctcacgcctgtaatcccagcacttgaggaggccaaggtgggtggatcacttgacgtcaggagttcaagatcaggagttctctactaaaaacacacamaaaaaagaattagctgggcgtggcggtgggcaccttctgtaagcccagccactcggggggctgaggcaggagaatggcrtgaagccggggggcagaggttatagtgagccaagattgtgccactgcactccagcctgggcgacagagccagactccgtctcaaaaaaaaaaaaaaaaaaaaaaaaagagacagtgtcttgctgtgttgcccaggctgttctcaaactcctggccttacgtgatctttctgtctcagcctccactgagatgaaggacatgaaccgccacaccttgcaagattgctttaaaactgtaaataataaaattctgtgaaactggccttgcccaaggcacagaggcatgtgagaggtagagcttgtacccaagtctgttgattttaatcagtttgctagattaggaagaaaagttacrttcctgaatcgtattaccgaatgtctaagagctttgcacttaaaaacaagagtggtgatgtgggagctctcttaagggactgttaagtgcttgatgtatgtgacatgctagcagagccacagctgaaaagacagggactaacatcagtgtgactctcttgtcacttgtttgattaaaatataatcagagcagaagtgaaatgagcatttgtcatattaaggaatctcaagcatttgattcatattattctgtagcttgaaatgtccttacctcactaatgatgtggtgaagattaattgcctgttattctgtttaaaaagttaatcatccaggctgggcacggtggcttacacctataatcccagcactttgggaggctgaggcaggaggattgctcaagcccaagagtttgagactagcctgggcaacacagtggaaccccgtctctacaaaaaaaaaaaaaattttttttttttttggtagagaaacacagccaggtatggtggtgcacacctgtagccctggctactagggaagctgaggagggaggattaattgagccctggaggttgaggcctcagtgagctatgtttgcgccacagcactccagcctgggtgacaaagtgagaccctgtctcaaaaaaataaaaataaaaataaaatagtaatcatccaacctcaaatatctgttactcttaactggactacttacatggttaagagaaggagaactgtgtttaggggcaatatctcttccctttgatctcctgagttgggggcaaataggaacgccttggaaacttatttcttccttggagcagactctgggcccaggactcctatttgccccacgatagctgctgccacagtgctgccgtgtacctacagcaaacatgttgtgaggtgagtcagtgtagcctggaatttattcacccagctagtaaagattgggcactcccatgccccaggcaccaccctggtggggacatggcagggggcagacatcatcccaaggctgactccagggcacggaacttcctctscattatgcaaggctgtgcagagccaggctgctccgtgagctcctagcttgcagggctttgtaccaggtattctgtttaccacgtggtacttctttttcttctgtaaaaaaaaggataatacaagtacttggtggtgtcattgggcagatgaaagaagttgatacgtgacacatagtaaacatgcaataaagcagttactatgaactttagaattattgctgtttccaactgctgttactttattatgagaggcagtaggtacaatgtttaagggcaaagatctgaagcagactgcctgggtttgaagcccagctgtgggagctgagcaagttacttaacttctctgtgcttcactcagtttcctgcctcgtgaagttgtaaggattagataagttatatgtaaaatgcttagagcagtgcttggtatgtaataagaattagctgttacgtgagaataataataatgtatttcattcattcaacaaatacttgggggctgcccatgccatgcatcatggcactctactaggtcttggggcagaatggtgaataagacttggtcctaggggtcagtttaatcagggagccaggcactcaggtaatgctgttagagcaggcttcttagcaagatgatgcctgacctgtgctgggtgagagtttagtaggcatagagttgggttgaggtagggaggagttcatagaagaataccctaagctgggggacagtgggaatgtaggtactgaagatcccacctcacacacacactgtggaaaaacagaaacaaagcacagcatggtatgcacagaaaatggtgtggtgggaacctcaaaacggagaaagcaggggttagagatggacaaggacaggtcagggaagcctcgctaagatttgcacttcaaatgcatgcgcagctaccttgaggggttccagaccaggcttgtgaaggcagccactgtcctctgaccgcccgtctccctgggatgagggcaaccagagccctttttgtgccctggaggatggatgccctgagcatctcagagagcctgggctgcccaggcctttccctttcccctttcccctttcccctttcccctttcccctcccctctcccccctccccctccccctccccctccccctccccctccccctcccccctccccccctcccccctcccctccctctcccactcccccttccctttccttcccttctctttctttgtcttgctctgttacgcaggctgtagtgcagtaacgcagtcacggctcactgcagccttgacctcctgagcttaagcgatcctcctgcctccggctctcgagagtagcctggaccacaggcatgtgccaccacgtccagctaatgttttgattttgtgtagagatggggtctcgctatgttgtccaggctggcctctaactcccgggctcaagcagtcctccctccttggcctcccaaagtgctgggattataggcatgagccaccacacctggtcttcaaagggacttttggtgaggatcagagataggagccaccattctagggttcctggagtttgtgagggaaagaggacagaaccgttttggtaatgcttacgggaagcacttcctgagagagaaagaataaaaagcagttacccaagagaatttcctgctcagcctcaagacaagccctgaccctggggactactgacatgtcccacctgtggctgggagggttttctgaggtgggaggtctagacagagcagggggcttgggagccctgatggaaagtgcagggaattcakaacacaaacatagggtaggttctacttgtgagaacacaacctagactctcgcctgcaaactaaaagggaaatctggtcttaccatgtgagattttccacagcagagtaaaatgcatttgggaaatcgaacagaagttatttaaattccctatggctggacttgaaattgacaagaaaaggcccaatagggaatgccagtgtgtccccaggtgtggaacatggcaccarggtagaccttaacatcggtatgtacaaccccacactggtgtattttacaatatttctctttttcttttccttttttttttttgaacagggtcttgctttgtcaccaggctggagtgcagtggtgcaatcatagcttactgcagccttgaactcctgggctcaagcaatcctttcacctttgcttcccaaagccctgggattacaggcatgagccaccgcgaccggcttacaacatttgtcttcgtagctatttttacatgttgaagaaacaaaactagcacaccaaactggtggattttatgaagattgttgtgtaggtttaatcaaaattattaaggaccatttatagaaaaatttgaagcaagtgctgtggaatgtggttataggaaacttgttaaaatagttgaaaatgactgaggtttaggaaagattgcaatatggtgtggtgtatgtcagaaaagtcatgggggccgggcgcggtggctcacgcctgtaatcctaaccctctcggaggccgaggcgggcagatcacctgaggtcaggagtttgagaccagcctgggcaacatagtgaaaacccgtctctactaaaaatacaaaaataagcttggtgtggtagtgcacgcctgtagtcccagctattcgggagactgaggcaggagaatcacttgaaccagggaggtggaggttgcagtgagccaagatcatgccattacactccagcctaggtgacagagcaagactctttctcagaaaaaaaaaaagaaagaaaagaaaaagaaaagaaaaggaaaagtcatggggaaagtcagacatcatagtaatcccagggcagacatatcgcatggagggtgggacacctttctgcttcaaatggtgttaatattgaaagaacctgtaggctgaaagagatacaaacttgaacatgtctttacaaagcgaagaggaaattacgtaaagaccttgctttgcgagctgtggtctggtgatgggtggcttctcttgggcagcttgtcatccaggacccttgtcctcatcctctagtgggttggaggtgaggatgggggagggggtggcagctacaaaaatttctgcaacaaagcctctaaaactgggtgatcatcagcctcaccagtaaagccactacacagttcctgacgtgagattagtatttggtacaatgcttccagagtaatcaaaatttttataatattttttcatctgtgatgatattaaacagtgatatttgaagagtacctggcccttagtaaatgtcatgcgccagaatatatcacacctaagatgctactggttataaaaggagcatcattattttatttacagtattgaaaaataaaaaaaaactgccagttaagctataacacatcattgattataagacatccttttttttttttttttgagatggactttcgctcttgttgcccaggctggagtgcaatggcgcgatctcagctcactgcaacctctgcctcccaggtttaagcaattctcctgactcagcctctggagtagctgggattacaggagtgcaccaccacgaggctaattttgtatttttagcagggacggggtttcacaatgttgaccaggctggtcttgaactcctgacctcaagtgatctgcccaccttggcttcccaaagtgctgggattacaggcatgagctgctgcgtccagttgattataagacatcctaatttcaaaatgtgaaaatgtgaaaaagaatgcatcttagagttgatggaatacattaactgttcatttacaacatcttatctttgaactgttcattgatatagaaaatgatccttttgagattgacatttcaggcagagaaagtaaaagaaagctgtcgtgtctcttctttctgggagcctattgttaaaaaaagtttgctatatctgcaagctggaataaacaaaaagaattggagactgagttgacatgaaataataaaaaatatggaaaacagtgtcagacatttatatatttcattctgcttagcaagactttcacatccattatcttatttgatctaacttttttcacaatgaaaacagctctgtgtgtgtatattttatatatacatactcagaaaaataaaacagtgcagaaagtacactgagataaacaaccacaacattttaacaactgtatttttgtacagagatagtgcatataaatactatcatacgttcaatcaaaacaaaattggggctccttaccatcccttgttattttcaacaaacctttttttccctcccccttctaacccactcarccaatgttgctrgcttggtgtgcaccttccatgcactggatcatgtcatcatgtaaaaccagctctacccctaaaaggattgggggtggtttgatggtcagtcttatttgatcttcccagtggcccaggggggagtgtagtgttatgaacccctttttgctgaggaggggacaggctccaagaggttgactgatttgtgtgacaccctatggctaagtggcacagggtcttggctgggagggctagtctttgagagttgtccttggcttttttgagatcaagttggtcacagatgcaacctagcagcctgagacagtcccagtttatgtgccttcctccagctttatcattaacaacactctcttctgcatcaaaagtgtcccgggctgaatgatacattatatgtttgctctagtggtggaacacttctccaccgggggccagctcttctaggaaggttgattccaggcaccactgactaagagatcactggacccacagtagacctggagcctgtgtctacacttggacttaacgatgatattggaagtgagctttggtatcgcagaaagagcagagaaaaggaagtcagaaatccctgtgtcaggtctcagggatgaaaggagaccacgtgtatgtgaaaatgctacacaaataatgaatctgtggtatggtcacatatatttaaatggatgaaactttatgaataagcacatactccatattcattgagtattcccttccccgagcytcacgtgccaccccctcagtgcacttttccacccactccaagcagaggcaacatggtacattatgaccccaagcttcagtttctccatttgtaaaatagtgcagaaattataatacttgtgtcttgcaagtgttgtgagaattaaatgagataattatgtaaaaagcattggcacgtatttctggtttcagtaaatgttccaattatctaggagtgtaaggggttgagagtgggttgttggctactgactaccctgtcccccatgcactgtttcaggaacactttttcctcatattgtactctgtgcactgaagtccagcacacacatacttgcttcagagacacatcttcccatcaccaaaatattaggggtttaaatttcataaagttgaaataaagtgcaagcccaatgctggtttgtagaccagtttgcaagyccagtgccttgtatgtagcagacagacaaatatttttggttgatttttcatcatttgcagtggaagtaaatgtttcagtccagtaaaatggcagaaatgtaaaaggtggaattccagaatgtcttaaaattaaaatagrtagtccctttcctgttattactcacggagacagaaaaatcccattacaaaacaagctcagtttgactgcaggccagagtgttacccattgtccattgttcaccgtaagaatatggtttatctgcttctcagggtgatctacttataacactgggggcattctagtcccaggttttctgaaatcaaatctgctgtcctgttgtgctcatgggccaactaaatggctcagacatgatactatcttactgtccacacagcgtcttccaatcacctttcaaacctggacttagcatagaatccagtcttaggacagtcctggcttttgactttgagagcctggtcagtgcccaacagcaacccagaaaatgctcaattatattgatgtttctatttattttaagattttactaacacatgcatatgattaaaaaatgtaaactgtacagaaaggtctaaaatggaaaataaaggttacatttctcctaaaactccaggtcttctccccaaaagtaccaacaaaacaattatagcaaacatgccgttttaaaaaaattacacaaattcaataattccatatgtattccacatattgactactctttcaatgaaacagtatcttcaagctctttccatatcaggacatgcaagttcctttaatgactgcaaagtactcctttgcagagcattctgtattctaatcagtcccttaatgatgcttctgtttccctattacaaactttgctacagtgaacaaccttgcacatgtatcttttgcaggtgtatcttgaggtagtttcctaaaaaatacagttgctggctcaaagaggatgaggctttgatgttttttttttttttttttttttttttttttgtggggggatggagtcttgctctgttgccaggctggagtgcagtggcccgatctcagctcactgcaacctccgcctcctgggttcaagcaattctcctgcctcagcctcccgagtagccgggactacaagctcatgccaccatgcccagctaaattttgtatttttagtagaaacagggtttcactatgttggctgggatggtcttgatctcttgagcttgtgatccgcccaccttggcctcccaaagttctggaattacaggtatgagccaccgcgcctggcccagactttgatttttatttagttaactatgtttatatattggtctgtgtgtctaaaatttcaataccgatttctaaattgctacctaaaaatactgtgcagtttactctttgtagaagtttgtaagagtattgatggtcacctcctccccactgccctgtayggggtgggggaccttgttgtatttacacaacacacttaattgtctcccttttctgggcatttgaaggcatttgaagatagtggttaccaagtatatgggtaactcctcctttctcccagatgcatcaaagaacagtgctccctgggacactaatgaagtgtttgcagaaccgctgccgcgtggggccaggcctaccctggggctgtctcctgggcaatgaaggtggactttcaggagagaataatccttcctgtgtatgctgactcacctttgctcttcctggtccccaccctggtaaacagacaccagtcagtgaggttccaccttygaaaaaatcagtcagggaatcacccatctgaggttcccagcctcaaggccgagttcttcctgtgtgtgagggactctggtgtttgggttccacctcttaaatgttagcaacaaaccaggctattatgtggataggggcgtaccctactttccagaacttgcacatgaatcaactgctttttaataaactacgtcatccttagaaacggaatgtggatctgagagtgtctgcactcaatctctatctaatggaaatttctccgtcataatttgtaggaagtgtcagggataagagtaacttttyattattgttatyattacgttcatgtcgtagctggcacgcccgccactgccctcctccctttgtacagtgtgctgcgctcaccaggagctgctgtaaaatgcaataccttgctgagtatccacctgtttaaaatggtaccatttttagtgggggragcaaaagggaattactcaaaaatgaagctcgcctgagagtcatgaagtagtagcccaataaacaatgcctttgccctctgaagagaatggctgccctcacactgatgaggaaccatctctgctgcccctctcccagcacacatggcagccaaacctgcccctgcctctcagcaggggtagaggaagaaatgaggggcaaaacgggtgcgaagggttagttgccccagagccctattgcatattctcacaattctagggcggtagtttgtgtcttagaacaactttcagcctctgctccctagagcgtaggatagtgcgtggtaacaatgccccaccacaycgcccatgtaactcctggcattcagcggctgtgtgcagaggctgtgtgcctctggacaagtcacactagtagcaaattctgttgtcccctacccagcaacagaaaatggtttttgtttcactgtggggaacttttcagcttccctggctgggctgagggtctgcacatccatgtttggtttccagctttgctgataaccatatcaccctctgctaaagcttcccagctttcattgatccaccttgtccttgacgatctgggcaggtcaggttctcccaaaggctctgagttgctcccacctccaggttctttactctctccctttgcctcatctgggtgggtttttaggggagtggggagaataaatgcatagtgaggagtggtcactaaagacagaagttaccattagaaaaccttgggcagtttacagttttttcagcagtaaaatagagatagtaatacatagtatggggggatggttgtgaaggttgaatgagttcacatatgtaactataattgcctggcagagggagggagagacggggaagggagacagggagggagggcggaagagagagagggagagggagagagagatacagaaactgatatgtgacctattggatataaaaaacgtatcaaatcaaaaataactttggtgttttagtctctaatgctaagaggaggtggtcatgaataaaaattgtatgtctttttaatgatacattgggttttggagacagtctgtcattccattgtcatgttaaacttaacgggtagaaatatccaataagtcagtcattcatgtatgagactgtgaagaaaccacgtttggatgcgtccatagtcatcgaatcttcggttcacatcttggcttttgctacytactagtcgggagatctcagtttcctcctatatggcatgggaatgttaacccctctctcctaggattgcttgcagtagtaagtagaacaccctccacaaatcaaataactaattcctttgcatattgtaaccactgtcaccttgttatatagacagcagactggaaaatgagtcctctttgagcattagagactggggctaggaatcttcagtatcgagtgatacttggaactatgagaatcaatgaactctaccgtgagtgcttttctgctaggaaataactaccatgagaaaaaggaggaaacagcctctgaggtggggcagtcaggaatgtgtctctgtgcagtgagacagagaaagaccaatgggtttgatactgagacaaacttgggttacgctaggaaggcagtttcttcggatcaatacaaacatacgcaccatgacacagagcttctctgtttcttgtcctttatagaagttgaataagtacttattaacagcccttgtgttttattcaactctgcttccatttttagatgtctatgggggttaaaaaccaaccaaccaatctgcaggttggttactctgggaccctagttttctgtgcagagtaaccgtgggtgcccagaaagctggaaaaggtggggaggtgaggagaggaggaatcactgggaattatctggctggaagtagaccatgggcattcaatggaaatctagtgagtcatgctgtggccagtgcttttttctctttctgctttgccacaagaggaagaaggagtggtgaggtctgaggtaattttgtagaattgatgctgtatgtggttctgagaatgccagatatagagagtttccttctgcaagacagcatgggtggcaggccttccagaatccctttccagagcaggagcccatgacactgtacacttttcctgtggtagctccttcttggctgattttaaaagatggcttttcccagagcttcttagaacttgctcttagcaaaggatctgtgtttcccatcgaaaaaaaagtaaaccatttaataaatttttaaaataaaatttggaatggcttccatcttgtttcttgtcatcttctcctctcaaaaagcctccttttcccttttttcatcctagttttgatgtctgagcagttggcctttctagatacccttatttagaatttttctcttcttcattcgaagtcccccgagcagtgagcagggagggggcaggggcgagtctcacccagtgcagtgcccactgcacttacccactggcgacactcccagtagaatgcaagcatttgaaggtaagggaggatcttccaatattgtcatgtaatatttgccattacttcatatttattagcttttttgctgataagtgtagattataatgaatgtccttcctcctctggtctcctccggcatagattataatgaatgtccttcctcctctggtctcctccggcaaattctaaatatcttagacctacttcaaatggctccttttctgggaagtcatttcttctgcctctcccaggacaaagtggcctaacctccactcctggaacacccattttgtgtgtgtttatgttgactgttattgacgcatgaatcactttattccatcattatctaggtgtccttcaagggactttgaactgcccaagtgctcagctccccaagtgctcatgagtcactttgttccatcattatctaggtgtcttcataggactttaagctccccaagtgtgccataagaacttgtcacgtagctgaacacatgggggaccccactacagaaatgccaaatgaaaggaagccctgcagcccacagagtgttcagaggccgcccctggtgtgaagctgaaaaatcccagacgtagatgagggccacagcttcatctacccaagggggccatgcggggatgaggccttcccctcctgggcatgttccgtgatctcgtttcgtctgtcctgtccacatcctcgttattggagcagtgatcagtcataaaaatgtagcctatcttttgaatatggaaagccagtattacacgtatgacagtgataagtttatgaagggaaagtaatttagatgacttgagaaattatgaccgtgtgacatagcctttgtgtgatacatattctttccatttctggattctgtcatgtagtttgcaaaacaagactagaaagtttctatgtcgttgcttattttcaccgacaaattcaacacaacagtatggttgaaggatagtctcatccgagactgtcaaccgtgtgttgtgctgtattcctgacactgtttagcacttcacacatattattttatttaatccttacagcagcgttgtgaaatgggtctgtctcccattttacaaatgagaaaagagaagtcactttgtgtcacttcagggacacatgagcttaggtagcttttccccacttaacttagtctgtaggtagcaaagctggaacttgaatcctcatcttattgattgcagaatctttctctgcactgctctttctgctacattttattttaagaatatttgggaaattaacagcattttgtctttgttactacaggggaaaacaaactatcctagtaattgtatgttttatgttcccagggaagcaaaggtgtctaccagtaccactggcaaagccacaatgtcaagcacagtggtgtggacgacatggtgctactgtccaagatcacagagaactccatcgtggagaatctgaagaagagatacatggatgactacatttttgtatcctttattggctgctttggacatttctaagtgatattacagtgtccacagttaaattgtggctttatgctgggtgcagtggctcacgtgtgtaatcccagcactttggaaggctaaggcaggagttccagaccatcctggcaacacagggagaccccatctctattataaaaaataaaaataaaaactgaacttgtggctttattcctggcttgagaagagctatctgaaagtccgaacagatgctgtgtgctcacattgttttcaccgtttcagaatgaggttttgtatgtttatatcacttggttcaggctgtgcaaagggcaaagatgatgcccggttattctcctggcatttcacaaagtaaagatgcagccagtattcatctactttaatctataatatcgtccctttgacatgctctagtcatgcacgtggtatctgaaacctctgctcttcctagaggaagtcctggtttgcaaagagttctatcaataatgcatcctgactgcaaagcagagacatttgagtctgcacttaaaagacttaaaaatgttgccagtttttctgcattttaatgtttactaaaggaaatgtgagaagtgaagatggactattgaaaatgcttgacgttcttcagttgttctttatgtttcaattttagcttgccggatgccattttttatggggctttaaaaaatgcagaatggaaatttgattcaaatatgggttgacttcattatcaacagggaactgtgatatttgcttaagttctataggaattttgtttgatgcaactatgtaaagatatcctggtggaactattgtgagagttagtcatggacatgcaaaactctgtgtcaaatctatataatagtaccaaaaagtttaactttgatgccaatagtgccttctgaaagtatggtatcatggatgacttattaaaaagtggagtctttgcttctgatgtaatatacatcttagatttttacccaaaaagcttggggaagaatagttttcacatcagtggcttattatgattacttaaactggttttttgactattagctaaaagcacrggaacctttgcagtaataacttttgcagcggctgcctatcccatcactggtaagtcgtggggggtcgggttcaacttatcaggtatttaacaaacaatactgttaaataattaacagcattattccaaggcatttggaccattctgaccagtactctgctgtttcttatttactataagggaattttaccaatatctgtagttaaacctctgaacctctgttttcaaggattaacagatatagttggatttattggctacattataattgcatcatttaaaacatttattttctttttatagcactttgggaggcagaggcgggtggatcacttgaggtcaggagtttgagaccaggctggccaacatggtgaaaccctacctctactaaaaatgcaaaattagcggggtatggtggcatatgccttgtaatcccagttacaaggcataacttgtaacttgggaggttgaggcaggagaattgcttaagtttgggaggcagagattgcagcaagccaaaatcgcaccactgcacttcagcctgggtgacagagcaagactctgtctccaaaaaaaaaaagtgaatttattgtatttttaaatgacaaatagtaattgtatatagttgtgggatataatgtgatttttttttcttttttcttttctttttttttttttttttaagacagggtctccctctgtcacccaggctggagtgcagtggcacgatcccagctcactgcaacctccgcctccccggctcaggtgatcttcccacctcagcctcccaagtagctggactacaggcagacaccacgatgcctggctgattttttgtagaggtagggtttcaccatgttgcccaggctggtctcaaactcttgagctcaagcaacccacctgcctcggccttccaaagtgctaggactacacgtatgagccactgcgcctggcaatgtgatgttttaatatgtatatacattttggaataataaaatcaagctaattaacatatccatcacttcacatacttattgtgtgtggtgtaaacatttaaaatctatactccacaattttgaaatatacattacgttattatttacttatataacttctggatcagggtggtgacctatggctgacagacaaaatcttacttaccaccattttttggacagcagttttgttggaacacagccatgctcatttgtttagttattgtttagggttgttttcacactatggtggcagagctaagtagttgtaacagactctctgcaaagtctcaaatatttactttctggccctttgcagaaaaaaatttgctgacttctgctccagatacctgtgcagggcttccttttttttttttgagatggagtcttgctctctcgccaggctgaagtgcagttggcgaaatcttggctcactgcaaccttcgcctcccagattcactccttcctcagcctcccgagtagctgggactacaggygtgcaccaccacgcccagctaatttttgtatttttagtagaggtggggtttcattcaccatgttggccgggatggtctcaatctcttcacctcatgatctgtccacctcagcctcccaaagtgctgggattacaggcgtgagccactgcgcccagcagcttcatttaattgaattgtacaaaaacagttaygttcagttgcaggtttttattttatttggtcaaaatactgaaatatgcttactttatccggacttaacaccgtcaaaaaatgttaatcacttttacgtgcagcacccacagcacatgaaaactggcagwtaattgattagaaggagctgggtggcaggatgtggatctggactgtctggcttcaaaccttgctctgcatagatttggtgaccgaaacgttttgtgacctctgtgccttgctttccgtacctgtaaaatgggagtaataataaaatctcccacataaggctgttgtagggtgaaaccaaataaagaatgcagcaagtaaacagtaagtatgagtcattattaccatgcaggtgtgtaagtgcttcccatatttccgagttattttccaaaaattccactgtaaacttgtttattggaaattaaaatgcattttgccacagaaaccgttataaatggagtattgacaagcccatagaagtcttcatttccgctgaatgtagtagttgtacaaattatattttgaaatgttcttggaatgtgggctggacttactgcattataaagatggaaatacggttttttggtaagctgagtataaaaacaaacaaatgatgtccgtagtcagtccttcataactccaggcggcctcactcctcccaatcacgattgtttactcccaaaacaccagaagcagggactatgtcttatatatcttcttcaaaaagcagcatataaaaaccctttagagcaatgtaggttcatttaacatggctcataccatgcagtgaagcaaaaaaaaaaaaaaaaaaaaaaaaaaaataccaaagtcacccagaacccatcaccaaaggttagttcttattaatctcttggtgtagagctttcagtttaaccacatatggccatgcatatatgtgtgctttcttgttaattttaacaaaaatggcatcatcctgcctcatgtatttcttggttttctgcataatttttggcatggtgcattgtattaagtattcattgacaatttgttgactgttaagacttgctttttaaattcagacaacagaatttttaaatgactcacacagagagggctgtttatgcgcctttgaattaatgcctttgaatcgatgactgactaatcgtgtgttctaccaaggaaatgagttacttgaccactaatgactttatgttttagaaatctctacccactsaatatatgggaagcccagcataaatgtgctttctatcattagcacagagtagctttcagctttgagggagcttgatggatgtttgtgaaataatacaggggctctgctgcaagtcttcctctgctaagtggtaaaagcatcctttaacacttcaatgttaagggaatattataatagaatggcattactgtaagtaagagttgggttttttcctctcctatgtttaattgttaagacgagaagagacttgatttcacattgagttataaaattgctcactttatcccttctatatctaattcctgcacattgtcttgtgttgaaagtcagcatttggggcgatcgattgttaatgcattcaggctgaatgcacatttcttctacattaggaaaaaaaaatccacttagaaaatgctgacatcgtttaccaataaaactccctatttttgagttatttgtcctatgacaaggtttaatttgccatctgtttgtcatcaatgttgccacactttttacaattacattgtaagatctatgaggaaaacattacagtgttgtctattgtgcatagggagagagcacttctgaccacttggccgacgaaaagagttcctgcgcaaagcactctgtgctcattcggtccaactttctccaaacttgtttttactcaaagaccacactcaggtgtgtttggcatttttaatccttgaattaggagtccagattttcgtgccagacccactagatttcaaagcagcgtagttgttccgagtgaggtctggcccttggcatccagttcactggaggggcagcatgctatatagcaagacagatgccgggctggagccaaagcttcgagttccaggccacccactctccacgtgactctggggaagtcaactcacctccctgtgccacctcagggatgaacccaaggaagtccactcgaccagcgtaggtggttttgggaaattcactgactattcaaatagattttaaccggctgggcacagtggctcatgcctgtaatcccagcactttgggaggctgaggcargtggatcatgaggtcaggagattgagaccatcttggccaacatggtgaaaccccgtctctactataaatacaaaaattagccgggcgtagtggcgcatgcctgtagtcccggctactcgggaggctgaggcaggagaattgcttgaacccgggaggcggaggttgcagtgagccgagattgcaccactgcactccggcctggtgacagagcaagactccacctcaaaaaaaaaaaaaaaaaaaaaaaagattttaaaagttcaactcttagcattgcctaataagactattaaaaacaaacatttgaggctgggcacggtggctcacgcctgtaatccyagcactttgggaggccaaggcgggcggatcacaaggtcaggagatcgagatcatcctggctaacaaggtgaaactccgtctctactaaaaatgtaaaaaattagccgggcgtggtggcgggtgcctgtagtcccagctactccgcaggctgaggcaggagaatggtgtgaacctgggaggcggagcttgcaatgagccaatatcacaccactgcactccatccgggtgacagactgagactccgtctcaaaaaaaaaaaaaaaaagaacagcaaaacaaaaaacaaaatttgaaagttgtactgccatcacatttcataaaagaaaatatttttacaccaaaaacgtaggaaggacataatctaagaataaaggacagtttctttattttgaataaattaagctttatgaaaaattcagtgcattgtttgtttttttgtcattcttgctgcaggtcaatgaaaactgatagatccacgggcaggcatttgggaacccatcagttaaagatatcttgggtttcttctgtctcccagagtcttttaaataattggcatttttttccttctgttttttggtatcatagcttcatatctttatgcagtttgaaaattaaccttaggccacaccttcaccaccaaggattatgtgggtaaagacaatgatccgaacggcttttcccagaggcacmcctgaattatgcaacaggagtgggagtgagcattgttggaattacctggagttcccaaagcagcaggagagcacaggtgtccggaaaatagctaaggtctctgcagacatagcaaggtggaaaaggtgagaattgtttagataaacaattattccaaactctcaccggaaataactacgatatgtttattttctttaaatcaattaaattctccttagtttttctgtagaaacagccattttattttttgagacttttttttaaattttttattttattttatttgctctgtcacctaagctggagagcaatggtgtgatcacagttcgctgcagccttgccttcccaggcctaagtgatcctcccacctcagcctcccaagtagctgggactacatgtgaagaccaccatgcctggcaattttttttttttttttttttttttttaaggagatggggtctcagtatattgcccaggctggtctygaactcctggactcaagcaatcatcccacttgtcctcccacagtgttgtgattatagcacccaaccagaaacagccattttaaaccaaactttattttttaggtgtcttcccaaatagtattatccccaagaaccctactgataaatttagggagcaggtacaaatttccctcttcatttcattctgacctgagtcattgattcacgattggcctagaatagtccaaaataaatttttgtttttgttttttttcctgaatatctccttaaccaggccctaatcagaatttatgtaatctacttggtgaaaaatcaagacttaatgagatatctctttatatagcaaattaacagtttttaaaatgttggtcactttaggagctcatatgcaactgaattcatatttattgagtaaccaagggattggtggggagktggtacctttgtctgttgtcctgagggcagccctttattctttgtgtgcagtgatcaatttgtctaggacaaggcggcagtaaccacattccctttacaactaagggaacaagtaccctcctccatggaaggagcttatttgcctgtttgtttttccctggggatagatgtagacatgaaataaacatcttcctcttctgaagtgaagatggttctagcagtgctgtgtttctttaaaattgggtttaccataagaatcattattacttcattcattaattgtttgtttgttttcttttttgggagccagggtctggctctgttgcccaggctggagtgcagtggcatgatcatggctcactgcaacctcgacctgcgtggcttaagcaatcctcccacctcagcaggaactacaggcacgtaccaaccaacatgcytggctaattttaaaaaaattttttgtagagatgaggtctcacyagattgcccaggctggtttcgaactcctgagctcaaggggtccacccaccttattctcccgaagtgctaggactacaggcttgagccaccacaacctgctcgttcattcaattttgattaggtccttaccaattagaaaagatactttaaaaatccacctaagggaattaggttttcgagtatgcaaagcatcagagaatctaagttagaagaggctgccaatttagggttgccagataaaattcaggactgctggttaagtttgaatttcagataaacaacaagttactttttactataagtatgtaccaaatattactggggaacatacttatttggaacatacttaaaaaaattcttgtttgaatgactttccaatttaactagttttctgtgtttttatttgctaaatctggctaccagtaataatattaacgcaacagtacctgcttatcttagacattctagcttttgattaagagtatgggcgtgggatccagactgcctgagtttgaatcctagctctgcmacttatagtgtgtgaccttaagcaacttttaaaaatttctccgtgcctcagtttccctgtacaggctgagtatccttaatctgaaaattccaaatttgaaatgctgcaaagtttgaaatgttttgataatcgacacgatgctcttcagagcatttcgattttggatttttgggttagggatgctgaactggtggtgagtgtaatgcaaacgttccaaaatatgaaaaaaagcacaatctgcaaaaagcattttggataagggacagtcaacctgaagtcaaataggttgttatttggtgctaagatgtaaatgtatatgtgtttaattaattttatgacgccttattgagtcttggctacggcatcatggacgtcttacctgcttgataattttaacagtacatgtatgtgtcctaaattttcactaatctatcattggcctcatctgactttggcaattgggaatacattttccatggcccttcttccataactcttcagtaattttcagttatggctcamtcactgtctcatcagcattttctcttagcactatggcctgcccttagaccagaactgggcactgctgaagtggtcttaaaaccacttcatcttccctaatagcaattcatgttccaccccttcaagtatgaagatctttctggtcagtgacaaagagaagtaaaagcataatcatgtcattctgcatgcttacctttgtatatgcacaataatctaaaatattatctttaaaaaaattatatgattatatgatccatctcacattgatttgtattaagtagtaataacactgtgtctaatagaaactaacaaaccattgcctctaaaacagcacctggcatgttaagccacacttgaaacatgcatcatgatttgagatattacatgataaaacatgtgccttagaggatattaattaaggaaaagccattactatgtgctgtgctcacagtgctgagtgttctataattattttatttaagtaaaatgagactatcaggtaggtcctattttatctccatcagcaccagccaatctgactgaacacctgggctggttttcatggtacacaggtcttaatatgtaaatataaaaatgttctcctgtgggaggaaatctcatagttttaagtctttatctaaaactatatatttgtaaataactttctgtttaacaatttatttgtaaaatttctaaacaccttgaaattgatcattgaaagaaacagttttgaatgtctctgtgtgttgtttagattttttttctccatgaagtcaagaagttatatttattctctccatgaagtcaagaagttatatatattctatttattttgttcactgtcatatcccgagcatctaaaacagtgcctggcatgttaagtaagcacccaattcaaattagttgattgttgaatgaataattggaaatatttttcatgtgatcataagtcttcatttattttcrtatattaaaatgtgtaaaatttttaaggcccagcataagcatagcctctctgagaggccatcttgtattccccaagcagaaataataccttctttccctaaacctgatgtaggtgggtttataattttcttctctgaaaactaccttatttatgattattactgttattttgagacaaggtctctttctgtcacccaggctggaatgcggtgacgtgatcttggcttgctgtaacctctgatctgggctcactgcaacctccgactcctggcctcaagcaatcctcccgcctcagcctccccagtagctgggactgcaggcacacgcccccatgcctggctaatgtttttgtttttgtttttgtttttttagagatggagttttgctatgttgcccaggccggcctcaaactcctggcctaaagcgatccacccccttggccttctaacatgctgggagtacagacaggcatgagccactgcacctggccagaaaattacctcattgatgccttttaattcctctaagcttctggagaacagagctgttagttcatcttgtatccctgtatttgttaaataagtgagatgaatatttttttttattttttttttggagacaagagtctcactatgttgcccaggctggagtgcagtgacatgatcttggctcactgcaacctccgcctcatgggttcagacgattctcctgcctcagcctcctgagtacagtagcagggactacaggcgtgtgccaccacagctggctaatttttgtatttttagtagagacggagtttcaccatgtcggccaggctagtctcgagctcctgacctcaaatgatctccccacctcagcctcccaaagtgctgggattacaggcatgagccatcacgcccggctgatgaatatgtttttagtgtacctaacggatacgaaagttcaaaggaaaaaatgcatatcatttgaggggaggactgataactgcttttttcactctttggccatttttcctttgttttcttttctccttgctgtacgtgtcacccatcttgaaagaatgtgctttagttcatttaaaataatgatttcattttgtagcaccttggtaatttattactcttccttaggaggaataaagcctgtgctagttggatgattgctttcgtctttacttgtaatcttttagaaaacaagtacacaaactttccacttggacagtcattgtgaattcttgataacatctggttacttaatttgaaaaatgtgtagctatgaatattaatgatggaccttaactgagttaaattcagacatatataggatctgtattaatctcagtcaaccctttcaagcagatgccatattttggggaaaaggaaattgaaatgtaccaaggagcggtaagttacgtgtcacataaattactgccttatttagggcttttatgatgcagacatggtttttcttgaagttagcagtacttttgcacttttctattatgaattttttattggagaaacttgagtgacattgtttgatttttaatgatctgctttttatttttattttttaatttttattattttatttttattttattattattattttttttgagacagaattttgctcttgttgcccaggctgggcatgatctccgctcactgcaacctccgccttcygggttcaaacaattctcctgcctcagcctcccaagtagctgagattacaggcatgcaccaccacacctggctaattttgtatttttagtagagacggtatttcaccatgttggtcaggctagtcttgaacgcctgacctcaggtgatccacctgcctcagcctcccaaagtgctggtgagccaccacgcctggccaatgatctgctttttagagcagagctcaaaaaagcttaggactgtctaatatttgagccttatttgcatagaaaattagttaaataggatgtaggacctacagcttagggatcttcctgcttccatatatgccacaaaaatctaaggaataaaaatcagttatgggtaaaaaaatagagcaatgggtactgatttgcagaatcagaaccattgttaaactatgactatgacttcaacatgaaaaatgaatcttgtattacttcatttattaatttgaccctggttcctattcataatcagctccatagccatttcagttgtatagtaaaaatggaagctgtaattctccttaatatattttattctgtggttcatcacttccccaggcctccccatctctgcatctttttcctttccttttccttcccactgcagcagaagcacaagagtattcattaatcctgacccctaaaaagcaaacaaaagagagcccacacaaattcatcagttgaagtggaaggcaatttacccagagcaagagcccaccccattgttgccagatgaatggtgctggtagctggagccgaaggaggctgccacgcgaaagacctttgataatgctgcctttatgggagcccagcacaagggaaacactgtcagcagaggctggccctgccctagtgccctgatcagcaggcgcacagagctggcttggcgtcctcaatgacagccaaggcgctgtagatggtagtgctgtgcatgtgtgtttctctccagttttctgaaaagggttgctgtatacacatcccttttagaccatttatcttttgaagtgttctctttaaggaaatgtagaatttctaaaaaatatgctcaattttactgctaatagtaacagattattgtaaaactggtatttactgagtgccatgtactatgttatacttgcagcaataataaaacagccctggatgctggctgtgtcataacatctatctccatttcacagatgaggaaactgaggctcagagagatgaagtactaaaatctactgagtgatggagctaggagttgaagtcaggtcctaatgactttgagagtctcaggggagggaagaatcaggtaaaggaaatgcccactctatagttttgtcacagatagctgagaggttcagtaagaccacagataggaaacgagtttggaaaatatagagtgacatgcaaaggtcaagtatgacagttcagcagcgttgaagccttactgggcaatgactttcccccactgcccatagcttgcttttcactccatttccttccattttccatcttcgtgtctttcttacagtcctctactttctcattttcaaagagtcattaatgttgtttgtgcacttgagaccagaaacccaaaatgagggtaactgagaggggtgctaagggctaagttttggtgacactctcacctaagtgagaacctgacctaaagaggggaatttttaaacaaaattatgagagtccrttgttttggactgatctcatgcagtagcccctaacagaccagaccaaaccaaaccaacatggaatcactcatgttacatgtgacataatcgaaactttaaagaaacagaccaggagatgccagcaggaggaggtccgctctactctaacccttacaaaaagtaacctagagtctttgttccaatcttacaaaccctactgttctgttatttctcaatgatatttgagaacaagtaagtacatttttacaatggtgacagagtgacatcagtgcctaaagttttggtcagtgtctcaaaattgagaggaygaccaaaagagggaaattggactgggcatggtggctcatgcctataatcccagcacattgggaagccaaggtgggaggatcactggagcccaggagttcaagaccagcctgggcaacatggtgagaccctgtctctatttaaaaamaaaaamaaaaaaaaacaagagaggggaattgttaaattaagtttagcctaaagctgcctccttacatattttaagttggatctaaatgttttcttcttttttttttttcttttgaaacaaagtctcactctgtcacccatgctgaagcgcagtgctgtgatcttggctcacaggaacctccacctccaggactcaagcgatcccccgaccgcagcttcccaagcaaatagctgggactacaggcacacaccaccatgtccagctaattttgtttcttttttgtagagaggaggtctcactatgttgcccaggttgatctggaactgctgggttcaagtgatcctctggccttgcctcagaaagtgctgggattacaggcattagccatcacacccagcgctaaatgtttctctgtgcacagtgaactgtagcctaascagatgtataaacaaactataacctacttttctgccagtcactgagttttggccaatcaaaggtggccaactattcaaactgtgttcaaataaggcaaattctaaactaatctgtaactaatctggctgtttctgtacctcacttccattttctagwtatatatttttttgtttgtttgttttgttttgagacggagtctcgctcttcaccagactggagtgcaatactgcaatctcagctcactgcaacctccacctcctggattcaagcaattctcctgcctcagcctcctgagtagctgggattacaggcatctgccaacacgcctggctaatttttgtgtttttagtagatactgggttttgccacgttggccagactggtctcggactcctgacctcaagtgatcctcccacctcagcctcccaaagtgctgagattacaggcctgagccagggccagccctcacttccattttctgtatatcactttcctttttctgcccaaaaatcttatggcatatggcagcactggaggctctgtgaatctattcttgttccagggcggccttattcacgaagcattctttgctcagttaaactctgttaaattaaaataataattataataatcctgcacaatcttattgtggactagaagtccatttaaaaccatatcctgaggtcctatccaggtatccactcctgaccataaggttaaggcagagatcacatattctggttcctgcatagggttctttaggtgaccagtcctaggcatagcttgcagccctcactgggtagctccccctatgagccccctgcctacagcatgggaagaacactgggtatcggatacaaagccccctcatcctaacccctccccaccaaactctcatcttccagagcacggcagtgagcagcaacttctcagccaggcccccttttctacagtaagtcactgcacaataaaatggattaagtaaattaatccaaagatggattaagtaagttaagcttcacctttgtatatcactctgtcttttcaaattgctttcccatccgtcatttacactgtgagacttgcagcttggacgctattattcccacaattgtagctcactgcgtcctccaactcctggactcaagctgtcctcccacctcagcctcccaagtagctaggactgcaggcatgtgctaccacacccagctaattaaatttgtgtgtgtgtgtggagactagactccaagtcctagggttaaacaactcttctgcctcagcctaccaagtagcttggagkgattacaggctaggagtgttctttctccatatatactcaacaaagtatttctctttttagtaatttttgaggttgtggtaaaggtaggtgtcaagaaattgtataaagcagggctgaagtcagcctgataatttattaagcatggaaaatgtatttagtttgatatttgtgcatagctaagatatcccataagatgaaatcacaaacccaggagaatatcttagcgtggtaggatttttttttccaatagagatgaaacaaactggccaaactagcttatccctttaaakaaccacaccttcttgccctcttcttatggaaagatttaagtattttttctgatccatagataatctcacctaattccctctgaggccccagaatctacaacgtggcctcttagaaaaaattacgtaagagtttagaattctggtagaagtcagatctaggtgtttggcaggcctctccaaagacctgttgcccaagtgtctacagaaacatttagaaatggactgtcacctgcagaggcgtgtatgggtggaagggtggggtgttggagtgtctaaagacacggggcacatccggaaggctgaatcatggatatgcctatgggagactgcttccaaattccgtcttaattttgtgagggtgtaaccttgatgacctaggaagttttatgaattcttgtatcatgcaacctttaagatgtaatgataggcattggaactatagtgcacgattcgtttccaaattcaggaaaagaaattgagtgtattgcctatctgaccatgattttgtttttatttttaaatttttattattatttatgtattattattttttgcttttctaggcacagtatgaaaacccaccacatatctatgcccttgcagataatatgtacagaaacatgatcattgacagagagaaccagtgcgtcattatcaggtatgaaaaagatccttatcagtgggcgtggaagatatgagactatgctgtggttatggatttcggtcgataagcagtggttttgcaacagctactgatgtcacagcctggttaatgtgtctgagtagcaagcaggttagctgctttatcttgctttatttataactctatataatagagctccatatcataaaacttttgagcttccatgggattgcagtaagtataataaacatgttttcactgtttagtcagrtgaattccttttctgtaggtccctattttttcattcccttcataatttagtagttcatgtttgaacatttttggtgaactttgtcatttgcattgaatttgggggaagattactggtaattgccagcattaggtgtctgtagccacatttcataatccctctagtctgacatggctctgaatcctggctgggtttaagtcaagcttgtccaacctgtgggctgcaggccatgggccacatgcggcctaggacagctttcagtgtggcccawagcaaattcgtaaactttcttaaaacattatgagatttttttgcaattttttttaagctcttcagctatcgtttgtgttagtgtattttatgtgtggcccaagacaattcttcttcttccagtgtggcccagggaagccaaaagattggatactcctgccttaagtgcttttaaaattctgcttatttacaaaaattagctgggcatggtggcgcacgcctctaatcccagatactagggagactgaggtgggagaatcgcttgagcctgggatgaggaggttgcagtgagctgagatcgtgccactgtactccagcctgagtgacagagtgagactccatcttgaaaaaaaataataaaataaaattctgcttactaactccagttggggtggctcacacctgtaagccgcagagtttgagaccagcctgggcaacatggcgaaaccccatctctacaaaaaaatataaaaattagccaggcgtctggtgtcatttgtctgtagtcccagctactgaggaggctgagtggggaggatcacttgagccagggaagtcaaggctgcattgagctgagattgtgccattgcattccagcctgggtaacagagcaagaccctgtctcaaaaaaaccaaaccaaaccaaaccaaaaaaaaaggcttataccttagtggaggctgagacaggcagatcacttgaagtcaggagttcaagaccagccttggcaacatggggaaaccctgtctctactaaaaatacaaaaattagccaggtgtggtggtacatgcctgtagtcccagatactcaggaggctgaggcaggagaatcacttgaacccaggaggcggaagctgcagtgagccaagatcacgccactgcagtccagcctgggcgacagactgagactccatatcaagaaaaaaaaaagctctgcttactattgtgaatattttcaaacactagaaagtataagcatccatattctcatcacctagaatttgacagttcacaatcttatcatacgtatttgtgttcatcttttttagttaatttttctgagacatttttgggaaaaaaaaaaccttttattgtggataattacaaatatacacaaaatgagaaagaatagtagaatgtgtccctgtatatctattatccattttgcactgttgtcagtatatggccaattctgttttatttggtcctcccattctgtcccacttgattacttaaagcaaatctggcagggcatggcagtagattcatttccaaggtcaagaaaagagtatatgtaatactagcactttgggaagccagggggcaggaggatcacttgaggccaggaattggagatcagcccggacaacatagcaaaccctgtctccataaaaaagtttttttaattagctgggtgtggtggtgcacacctgtagccctagctactagggaggctgaggcagggagatcgcttgagctcaggagtttgagattacagtgagctgtgcttgaaccactgcactctagccaggcgacagagatggtgttttgttttgttttgtttttttaataaagcaaacccaaagatcccctttattcctcaataattagtatgtgcctctaagaaatcattcttatcacaccttaaacatgaagaattcttttatagtatctaatatcagtattccaattccatgattttcctataaattcttttttatagttggtttatttttatttaggatccaaacaaggcctacacaccgcacctggttgctgtgtctcttaggtgtctcggtctttaacaattttcccttcccctttttgttttcttggctttgttaaaaaaaaaaaaaaaaggttgtttgtcctgtagatcttactatacagtctggcattgcctaattgtatcctatgatgttgcttaagtattccattgtcccctacattttctgtaaattaatagttatatctaaaaacttcattagacgccgggagtggtggttcacacctgtgatcccagcactcttgggtgggcagattacgaggtcaggagatcaagaccatcctggccaacatggtgaaaccccatctctactaaaatacaaaaaattagccrggcatggyggcgcatgcctgtagtcccagctacttgggaggctgaggcagggaaatcgcttgaacccaggaagcagagttttcagtgagctgagattgcgccactgcactcaagcctggcgacagagtgagactctgtctcaaaaaaaaaaaaaaaaaaaactcgatcagactcagattccgtttttggcaaaggaaacttcatcagtgatgctgtgcacttcatgcctgttgctctctcttcgtgtgtccagattgtcagtgaacccgtctgttataaatcatttcagagccattgtttaattagtggttgaaaaatcgttattttctaattctattatttttctgcagttattagttcttttgcttggtcaccttcaaataaaaactatgtgggaaaattagacaaaacactggattcactgccattactcacctattttcaaaacaattaattgttgccctagcagtctcccaaggtgatgtgttttattttcagtattactcaaactagtggacttttaatattgtacctgtttacattgcagttatacttttcaaggctgaaatgatcctgttgttgaacagtgacactcttttttcttagctcttatgtcctttggacatgaccgcagtaggctctgttggtttccttctttaagatcttctagctcatcttgtatatttcctgcgtagaatccacagtctcttcaggggccttggttcttttctttttcctttgcttttccttttcttttgagaccaagtctcattctgtcatccaggctggagtgcagtggtgtgatctcagctcaccgcaacctccgcctcctgggttcaagcgattctcctgcctcagcctcctgagtggctggggttaaggcatgcaccaccatgcctggctaattctttcgcttttttttttttttgagacagagtctcactctgtcgcccaggctggagtgcagtggcacgatcttggctcattgcaacctccgcctcctgggttcaagcagttctcctgcctcagcctcccgagtagctgggattacaggcacacgccaccacatctggctaatttttgtattttcagtagagacggggtttccccatgttggccaggctggtctcaaactcctgacctcaggtaatccgcctgtcttagcctcccaaattgctaggattacaggcatgagccactgcacccagcctcttttgcatttttagtagacagggtttcaccatgttagccaggctggtcttgaactcctgacctcaagttatctgcctacctcagcttccgaaagtgctgggattacaggcacgaggcaccgcaccccgctaggccttggttcattttaatgggaaatggcattaagagaccactaaactagacaccaagagtgctcactgccctgtgttttcagtgcctatagttctttaaaagtacaaagctagggaatatgagctttttaagagaaaaatgaagttgaaaaattaattgttttcaattaatttttaagatttcagagtttttatttctttgattttaatttttgtatcccatttatcttatgctgaacaatcttagttcctgattacattagcaattatttgcattgcattgtatgcgttttagacagatagaataagtttgttaatgctgttaaagtaacaataccartattattagtagcaatactgaattcattttaaaatttcttttctggtttttgtccaaatatccaatatttgcagtcaaaatactgggtttcataaaagtcacttaaaataatccttttctatgtcaacctgacctacagttgggttcatttatttcatttacaatttcagttgttttgcatttttaaatgtaattttgtttttataattatgcaaaacatttacatggttcccaagtcagtactgcaaaacatgagcactgaagcatttcaaggtaaatacatatctgaagtatttggaggtaaatatagacttcatgacattttacccctaaatatttccacatgcatctctgagaaattgaaacattttcttactgatccgaagaccattatcataactcagtaattaatagtacattttcaacatcatctaaaaacttcaaacttctctaatagtcgcaaacgtccttttctgctggtttatgcaaatcaagtaacgctgactgcatttggttatgaatcataaatttatttttatcctaccacaattgccctattactgctgttttttttcatgacactgactttttgaagagaccaaaactagttttcctacagacatcatttacatttgtctaattgcttcttcctggtctcactatacttattccttcagttggattttctacaagtttaaggttatatctaatgacttgatcagatgcaggtgcaagttaaattttatgaggaggaacacctgggtcatgttgaatttggttgcttaataggaaatgcttctgtttgatactaagcggaggtcaccgactactagagaggcaggaggtattttcctagctggaatttaatgagggtccaggatgagttttctgatagagtcctctgccctttctctttcctcacattttccctcttctgggtgtgtgccaaaacragtgggatgggaatggtcttcttacatgagcttgccagtctggaggccccctcagtcttctgcagcccacgtgtctccctccacctgcactgcaaggtccacctgcactgaagcgggatgatgcccacttcagatccttgtttccagctgttcaggtggcagagatttcaaggacctgctcccaaggatttctgttgcagtggctgtgttttcatttaggagatgtgctttaatttaggagctacctggagttgggccaaactccaggttaagggcacaggcctcctcggtagactgcccaccctgcagacatcagctgcatgttcagggctccccaggccaccctcatcaattcaggggttcccactaccccccgcccccgccaggttcagtagttcactagaacaactcacaaaactcagaaaagccctacacttaggattacagtttcgttctggcaaaaggaggatacaaattagagccaaacaaaagaggttgagggcgaggtctgggagggtcccgaggtggagtttctggttttcctctccctgtggagtcatggacagcgctacctcctaccggtatgaggtgtgacaatactcacagtattgccgaccagaaaacatcacctgagcctctgatgtttggcctcgatcacgcaccgcctgcctggcccaccttcagtttccagctgctctcgaaggcttgtgcaaatgcctttagtttccagttggaggtcagaattgcgatggtatgtcccaaagcccccgacataaatcatatcgtcagactctcctatggtcaaagcccccaagaaaggaaaagcactcctcttaggtaggacattccaggggcatagacatcaccgcccagtcaccgagggcaaaagcctgagcccttgagttaattctcttctgcaccagggctgtggtttgtctgctttgagaaagcaaattggaaacctctggcatgccgtggttcatgctcacctgaccctgggcagcacgcctcacacctgtctgggccttggctttttcacctgtgaaggaactggttttggaactcttccttccaaataatgttggagaggaggaaaggcagggaaatcctgttctgggtggaaaggccaagtttgtagcccctgacactggatggggcaggtgctccatctgttaggggccgagttgaatggtgccttttaaaatgtgtttgtgagcagaaaacaaacgaaaaaaccattttcttggaggctggaagagaagcctgctcctcatgctaarggattctggcatggctggaaagactaggaatctttagtgtcatttaattaggaaataaaaagtgagcgatgacctaatttctatggtggtgttttagacttccacctcccagtttccctggtgtgactttgtctaaatgacactttagatggcataawgcagcccataaaggcggcgtttctagtttcctgtcagtcttactcatattttccaacgcagtggatacggtgacaggatggacaggcacctgaccatttcaagactagaaatgagtgtaacaaatcggattttttttttttttttttgagacagagtcttgctctgtcaccaggctggagtgcaatggcgtgatctcagctcactgcaacctctgcctcccaggtccaagtgattttcttgcctcagccttctgagtagytgggactacaggcacctgccaccacacccagctaattttttttgtatttttagtagagactgggtttcaccatgttggccagggtggtcttgatctcttgatctcgtgatccacccgcctcagcctcccaaagtgctgggattacaggcgtgagccacygcgcctggccacaaagtggattttgaaagaaataaatcaaggaaggagacgtgctgctttctcaagcacagggctccatggamgcctaggtccatctacaaacttgatttgtcaaaacagctggagttgagcagccttgggtagactgacttgccaagcaaactcacaaggaagtgtgaatcagaccccaattcattattgcataggcagaattctgcctgtggacagccgattatgtgccctggaacacagtccacgaagggagctagattaccacgagaacgctggatagaggggtgaattctgagcgaagggatgatcgtatttgctaaatcagctcacagcagtcacctctatctgaagatgtgaacacatgaactaagggtgttgctctagtctgcagaacagtctttttacttggagaaaaccccccatctctgctgtttactttcctgtcctgactctgctgtaagtcaaccccctttcattaacctacactctctcctgccaagccctgatgtctattaggccaacttctagtaaggaataaacacctggggttgaccttggatatttcctatgccttcctcctcagcccactggcagacaaatcaggaagagtggcttctatggatgctaactttttttttttttttttttttttttgagatggagtctcaccctgtcgttcaggctggagttcagtggtgtgatctcggctcactgcaacctccatccccccgggttcaagcgattctcctgcctcagcatcccaagtagctgggactacaggcgcccaccaccttgcctggctaatttttttgtatttttagtagagacagggtttcaccatgttggccaggctggttatgagctccagacctcaagtgatccacctgccttggccgcccaaaatgctaggattacagttatgagccaccgcacccggcctatagatgctaattttatctaccatgccttgtgttcactaatttatctttttttttttttttttttttttttttgagacggagtctcattctgtcacccaggctggagtgcagtggcacactcttggctcaccacaacctgtgcttcctgggttcaagtgattctcttgcctcagccttctgagtagctgggattacaggggtgtgccatgacacctggctaattttttgtttgtattttttagtatagaaggggtttcgccctgttggccaggctggtcttgaacccctgacctcaagtgatctgcctgcctcagcctcccaaagtgctctgattataggcgtgagctgccatgcctggcctaggttcaccaatttaactttctagggataagtatttctgattcctgaattgccttactagttcagtggctctacagatatgtaggctccacctccagagattctgtttcaactgatttgtggtggccttggagcattaataccttttttcaagctcccccagctcactctgcttaaaagccagggctaaggctcttgaaatcctgatttcaggtcacctcttgctgttagcaccatcagacccygcaagatagacttcctgagtgcctgccctctgctggttgctttcgtataggttgtctcttaatccttaccactctgttggcattgttttttgaagctgcatctaaaaaatgaggcttaagagaattccaagatccaaaactagtagatggcagagcctctatttgaatttagccctgtctgacttcaaaccttatgcactttctttatacctattagcagtgatgtctctctaggtctcaaatttcccatattttaatggagatgtaatagytaccatataccataggacagaggtcaggacaggttcgccaggttagttacccctggacttgagctcctaggattaaagtctctcactctgtccccacaaatacaggtgcttttttattttagtttttgaaaaagagtctcgctctgtcacctaggctggagtgcagtggcacaatttcaacacactgcaacctccgcctctcaggctcaagcgatcctcccacctcagcctcgcgagtagctgggaccacagatgcgcaccatcatgcctggctaatttttaaattttttgtagcgacagggtcttcttatgttgcccaggctggactcaggtgctttttaaaactaaccctttgtcattgttggccgtgatgctctctgcatacccaggaggatgatgattgggcttgtcatcaacggaggataaatgacgcacagacttagttaacagaagaacatgaccttattgacacattagctttgatttcttaccaagaggtgaagatgcatttatacaccaaatggccatacctgggcagtttctgtattttacctgacttgttatccagtggatttgtctgggggccagagctcagtcttccccttcttttcatggttctctatggcctatttctatattatagcaggcctctgagcagagacatgatagcactgacacctggttcaaaaagataaggttaytggtagaaaagagatgggatgttgagggaatatggaaatctattgcagcagtgagggcctgacctgagttagaaaggcgaggaggaagccgacgtatgactttcagtaagcctgtaaagaaataaaggaatgggcaagtgtgaaggtagactctggkcagtgccaacagaaaaatgcaacagcaatagctacattagcatcattaagaatgatagtgaagctgggcatggtggctcacgcctgtaatcccagcaggtgggcagatcacctgaggtcaggagttcgagaccagcctggccaacatggtgaaaccccatctctactaaaaatataaaaattagctgggtgtggtggcaggcacctgtaatcccagctacttggaaagctgaggcaggagaatcasttgarcccaggaggcagaggttgcagtgagccaagatggcaccactgcactccagcctggatgacagagcaagactctatctcaaaaaataaaaaaagattaaaaatttaaaaaatttaaaaaaagaatgataatgagcacctgaaggcttggtaggtacctgtgagcccagtaaatgagccacccatatctgcttagctcattaatctgttctccaaaatccagaatttggatttgtgcattaaaaccacatatgtgatacctttggatgtcaagagacatctctgcaaatctgtttaacaaaaaggtcatgatgtggtaaaggaagaactggcaagctttgttcatgatctctaccatctctccatcaccagacaagatcttgacaatgtggccagaggcatttctgaagcccttgccaactgacccatggagaatcatcgggccttggagaacatttatgtggcagttttattgctgccatcaaaagtgaattcttatcacttttggcctaaatcagctcttgcaccttaggctgtttaaaaaatatgatgtcaattggaaagcatcccatttggtgctgtttctactttttttatttgaagtatcctgacgcagttgttttctggtgagtagaccatctgtcctaaatatatccaataccagtttgcaaagtctttgtcaggtgcatcctgcatagaagctaaataaatacttttttaaataataaatagaggcgagagatattttgaaggtacatcagtgggatttgctgactgattgagtaagagagttttcatagaggaaaaggagatagtagtcatcactggagctaagatttctgacccgtgtgcttcaacatatattttagatttgaaatatgtaatttttgcagtagtaaagataaaagggaaaaattcccagtgccgctcatatttggctcgtgggtctctcgtgctctttgctgtggcaccatcaggtgtctccggattctcaagctatcttcctgcctttgatgtatttcaggaaccttttattattagcatggggacgcttttcagggctctcctgagttgctgtgggtccacccaatttcttgtttatcccagcagcaccggcctttgacctcgccatccccctggcctggctttgggaggccctgtcagcccatacctctgactatgacggggttgcatggggctgccgctgsctgtaaatctgaagagcaagggcctagattgaccctgttccccaagctttctgcaaatcttacattctagtctggttgctaaaattcctttatcatcagccaaggagtgctattcaggagggctgcctaattaatatattacccataaacataacagcaactctttttcgagtacttgctttgcatccttttaattgtatcatttttcatctttacgtcagcctagcaaactaggtattgctgtcccctacttttgcagatcaagaaactgagtctcaaagaggtaatgaaactgttaaaatcttgcatttgaaatgtgacaaagttgtgctcccagccagagctgcccgcctccgatacagcagtctttatacttttctctgctgctttgagccagcaggtgttaggttaactggttaataatccattaccactttcagtcatgaggtgcagtggaaagacctctggggtgagtcatagggtagactctattctctctgtctaaggcgtgtgacccctgcaagcctcagttacttcatctataaattgggaatttataccttaaaggaatataaagaaagtgtaatgaggaaatatacatggaaaacattttttaactcttaaagagtaatgtaaaagatctgctagtaacattcaaaggaatttcagagctgggaagtagctgggctgggactcaaacttggtcttcatactcaacattgggttcctctgactgcatcaggctgggccaagatgagcattgccatggggccatccatattcttggcagagtaggtgaaaattttgtttgcttgacaacaccaattaactagatatttgtctggggttgggaagaaataacagctgttggtcttattcacactttcctcaatctgttaaggaatgaatttgtcttatttarccagtggtttcagcatggctgtttgtttttgtcttttataccattagccatggcatgtatttgagaattagttttttagtgtaattctaaagtccgatggaggacccctctctccatgaccctggaacctcccagatgtgcttcacctccgacttgtttctgttccagatctagtagggctgccaggaagcggagtctgtgaattgagccattggagaagactgtccaggaccttctttgatgtggtttctcattctcgcagaattatttgtcttatgatcacagtgatgtaggctatttattatttgttagttccaactctgcgtgaggtaataaatgttgttggcagaaggcttgcttaaatgggtgtgtatcagtaargactcaggagtagctaaaagtttgctgatactatgaactgtgctgttcatggggttcctttgtgaaaccttgttgatttttattgactagtcaacccatatgagggtcttaaaggtttaccgtcctctgagcagtagagctcttgcccctgacacagactctctcacctccttttctagctcttccactcactagctaagtgkccttcagcaagtttcttaccttttctcacttcaaataatggagattataaaagcacctaccacacaggactcttatgtggaccaagtgattgacacatgtaaagcacttataacagtctctgacatgcatgatacacacaatgaacacatcgtacctccaattatcatagccacaatatttcagtgtgttcctttcaagcctcctttggaattgatgttatttctcatcgtctagactatgttttaatagatgaacaactgcgttcatcttttataactctagaattacaaaaattggtttttaaaaactatcactatatttttaatccttgggttataccttttgaaataagagttgtgttcaatactatatctctctatatttgaaaaaaaaaaaaaaaaaagcagggtctaattaaataagtccagtgggaatttccactgtcttgtttatctccctgacacattgacatggttaatcccaactccgttggcccccatgaagccacatgcatcttcctgcttctctgtgtacctctctgacttttctatcttgttctctgtgtttgccatgttttttgccctttacagctttaaagagttcaggcattaaattttgtgggatgacttcaggctgagtctacccatttcctcgtgaccaggctcaggtcatgcattctaggctggactaccatagaaacaatgcagggctcttgatcacctggttctgtaggcatctgctaggtttcttctcattaaattaattttattttcttttaggatgtgtattttgtggggatatattctcagatcatgacaacatccttctccacatccaaacctccacctaccagccttagcatccattaatgactcctggtcacctgtatgatggctgccaaatggtgatatatctgtttccatcattccttccacatttattagttggtattccactgtgaggaagagctttcctttctctcctatttactgattgacycgtttactttcgtatggcactatggaattatggcttcctattttattcaaaggatcgtaatccattattatcattacttattttgatttggccagtgggaaccccttccagctggctcttatatgcttgacacgtccacaccagtcactgtacatttccttaccttttggcacagttatatgttccacgcccagtttgaattttccccactccagccctggcattggtcatttcccaaagcagcccttgttctttttattgaagaatagtattcagagaccaacaaaaagtgtgtcaattttgaaaactaagtaaataatatatcagttgttctgtataggtaaaggcaagttcgtcggtatgctgccttgagaaaatggaagtctagagtctatataaaatgtagcacraaatggcacaggccagaacccttggtgcatccccaaacctgaacccaaggtcactgtcttggatctctgcactgccttccagttccactccctacccctcccagcttcccacatcacagtcaaggcctattatttatttacttgtttattttattttattttattttattttttagagacaggatctcactttgttacccaggctggagtgcagtagctcaacaatagctcactgcagcctcaacctcctggactcaaacaatcctcccacctcagcctccaaagtaactaggaccacaggagcacactaccacacccagctaattatttttaattgtttttatttaaaaatttttatttttatttttatttatttatctatttatttttgagatggagtcttgctctgtcaccgaggctggagtgcagtcgtgcagtctcagctcactgcaacctctgtcccctaggttcaagtgattctcctgcctcggatctcttgagcagctgggactacaggcgcatgccaccacacctggctaatttttttgtgtttttagtagagacggggttttaccatgtcggccaggctgctcttgytgctcttgaactcctgacttaaggtgatccacccgccttggcctcccaaagtgctgggattataggcgtgagccactgcacccagccaattgtttttatttttatttgttttattattatagttgttgtttcttttgtgttttggggttttgtttttgttctttttaagaaacgagatcttgctgtttgctaaggctggttctccaactcccttggcctcccacattgctgagattacaggtgtgagccactgtctcctcaagtcctgtttaactacccatggttcccttcatgtgtaccccacagaatttttgcctcttatgtatggctcaggcttcatcccagcccctgacatgtatacacacaagtacacatacacacacgcaacacacctggctgatttgattgtccttattgagatgtaactagttgtgacttcgtttagtaatcttctgatcagggatagctgccacccccaaatccctaaagccatacccacatctccactgtgttattaatagcctttgtatactcgacttccctgtaagacagtgagtgagctcttctctgacaggagccacatctcattctggccttcggcttaacacactggggcagagggggttgttagacagtgtgtgttgcatgaacaaaagtagacatcatttttgttttaagtgtttgtcctttttaaaccacaaacaaaaagttggaaaagtgatatttcaattacgttgattcagccagttacaagggaacaccagttcctgtggtacagagccaggagagagatttttagatcagaaatgggggatgggggtgcattggtgagtcrtccaacagtggtaacagcggatcctacttattttagggaatatctcaaaaaatcaaaataaaaaagaactgaaatatttttacatttgctgaataagttgaagtgaatagaaaatactattgacttttaagtgaggaataacctttctcagaaaaataattatggtccttggattataccattgtaaatggctttttttccccagaacattctttccatttcgttgatattttaccgtatgtttccatttctatagttagtacacagaccccccccacacacagacacacactctacaatacttcctatttgaattaatatttcctataaagtctgttatgactttgatttaaaattgcttggcttgttcccagctggctatacaagaactagggagtttgttagaaattcctattcctagactctgtccctggagrctgggatccagcaggtcagaagacrggcccagacatgggcaattaaaaagtactctgacgattctgatagactgccagatttgggaaccactgggatattttcctaatttctagagtatttgtgtgtgtgtgtccattttataagtcaattaaattaggacgggctgcctggaagcgtaaacaaagcaaattgctgtacaataactgctgtgagatgcaaagtaaataatttgggatatattattttgtctaagaccttcactttcttttaacttgggttttagtgccggagaagaaacaatattttctcatcccaaacaggccagcataattatggttgcatatactgtaggtttcaagtcattctgtaacattccattattgtaccatattttgaccaactcaccagcctctgatcaataaaaattcttcttaagtgtctgtaaattgaaaccaagtaatgaaaattccgatcaatgtttagtgagaactaattattttaagtctgctggaaaagatcatagttgctgagaatgcagatatcctatttttggaactggtatacttattttgatatattaaaagagctactttccattattattacttgcttttgtttccaacaaaagagacaaaatatttcatgtctgaatacagtattaaccaaagacacagtgggaggattactgggattactgtccttttataattcttttttaaatttaataaattcccctttatatatattattttataattcttatagggtttgctcacgcttgctctctctctctttcccagcttgttctagtaaagtttaaatgtgacagtgyaaacttaaggaaaatatacatacttatggtgatatgtaggaagttgaataataataatgtaatgaaattgatcagtggtgattattgtgaggtgtgatccctcccttttctctggaaaagctgttttaaaaaatctgaaatacacaaatttwaaaaaawaaaawacacacatatatatatattttttgacacagtttcattcttgttgcccaggatggagtgcagtggcacaatcttggctcaatgcaacctctgcctcccgggttcaagagattctcctgcctcagcctcctgagtagctgggattacaggcacctgccatcacgcccagctagtttttgtatttttagtagagacggggattcaccatgttggccaggctggtctcgaactcctgacctcaaatgatccgtccaccttggcctcccaaagtgctaggattacaggcacgagccattgtacccggcataaaaatctaaaaaaaatagaaaattatgagaaagcacatgaaaaggaaaaagagccaggtgtcgtggctcacacctgtaatcccagcactttgggaggccaaggcaggcggatcacctggggtcaggagttgggaccagtctggctaacatggtgaaaccccgtctctactaaaaattaaaaaattagctaggcatggtggtgcacacctgtaatcccagatacttgggaggctgaggcaggagaatcatttgaacctaggaggtagagattgcagtgagccaagattgtgccactgcactccagcctgggtgacaaagtgagactccatttcaaaaaaaccattcctataccagcctcctaacaagtaaggaatatttctttttccttgtcaatttgtttttgcccatacattattttcacatagttgtaaacttgttataaatatagtatcttctattcacattaccacttaacttaggctgcattatctttatgttgctacatactctttgtaagtacttcaaatgcctgtgcagtattatattgggtggttgtgccattgtaagcttggactttccaatattcttgaatgtttacattgtttacaacttctaaaatggagtttcattgttgccaaaccgtgtaattccaatgagagagtgtgtgtgttgaccctggatctagtaaatacatcatctgagtatgtcaaccatttgaaaagataatttccccatggagttgaatttgcccgacctagttgctgcctgtgagtaagcatgtcctctggaagagtgtgacacctcgtcccaggcttgctggttttctacttgctactgtagcttacgaaatttcagtttggttttcttattcatgtgaccaggaagccaggagcatagcactaggatggtgagtgacttgcataggtgggttcagacttttgcaggtcatgagctctgaacagaggatggttcccgcctccccataatttctttaaaaccgtattattagttcaaggaaattcagcaaagttctgagtttcgctatatggccagctcaattctctgttcatttgtttcttttgttttgttttgaaatgtaaaattatttcaaatttcagtttccttttgggaataggagtgtcaccttgcttggttgttccccaagcaaatgttttctctttccttgagtaactcagcaatcgataacaattaatttgggctggatattcatagaagaacatttgctctgcgccctaaaattttttatcgcgaagcgcgaacaaaaatattgtcctatgaacttgtagcagtctgcatttttcatactaactcccaccatcattttatatgatatggggttctttaattctatcctggtaacacaaagggtaccaatagaaagatgaaaaatctgactgacttaagcatgttttgaattgaggtcattatcaattcagggggattttgtaggaagaatggggattttgaagagcagactatatattattaacaaaaggctctccccatgcaggaaggctacccagcrgaaggtggcctttgttactccggatgtgattaatattgcttcaaggtttaattttagaacttctaaaataaggaagcttgcatcaattcaaggcacatggtttgaaacctcagagtgcccactttttcttttctttttttaaattacaaaaatagcatatgcattataaaatgtttgaaaactaatgaattaaaacaagtttctctagtctctggcttgaccaaagcctttgttaatattttgtggtagttccagtcttttttttaagaaaaamaaattgtaatcatgttttgtatataacttgaatgacttatttcacttaacatgatttcatttgcttgtttcctgtgtttacagtcttcatgtcagttgtaatttatgtagaattccacccttgtgatactccataattttcctaatcatatcccccattattgggcatgtaaaatgcttaatggtcagtggtgtgcacagtggtaattatccacaccatgttaatccggctcacacgggtcacatgggcgacctaatcctgctgtaacttgcctttctctactggtattgtacttaaaaaaaaaaattcttttctgcctgttttttttgtttttttgtttgtttgtttgttttgtgtgatgggggagacaaggaagggagctggtcgcaatccacttctcaggtggattctttgtctgtctttctttagtggtgaaagtggtgctggaaaaacagtggctgccaaatatatcatgagctacatctccagagtgtctggaggagggaccaaagtccaggtgagtgggcagtggcccattatgataccttatgttatgggaaatgtaagaggctccatttgctgttagaaaagaatttttcttccacagaaaagacactggttcttctataactgtgaaacttgaaatctggaatggaaaggaatagcatatgtatgtgtgtttgtgtgtgtgtgtgtgtgtgtgtgtgtgtgtgtgtgtgtgtgtgtgtgtatatatttttttttttttcttttttgagacagagtcttgctctgttgcccaggctggagtagtgcagtggcgcgatctcggctcaccacaacctctgcctcccgggttcaagagattctcctgcctcagcctcctgagtagctgggattacaggtgtgccccaccatgcccagctaatttttgtatttttagtagagacgggggtttcactatgttggccagtctggtctcgaactcctgacctcaggtgatctgccctcctcggcctcccaaagtgctgkgattaaggaatagcatattttaaggtagatgtgcctaatatataatgaactcctacaaatcaataaaaagatcagcagcccaaaaggaaaataaacaaaggacatgaaagacaactcatagaaaaggaaatataaattactcacaaaacatgaaagtatgttcaccatcatgataagaagaaaaatgcaaattaaaactgcattagaaaactattttttgcctatcagattggccaaaatcttaccatgttttaaacgcttgattggtaggaagtagggacacagttgttctcatacattgctggtaggagatgaactagtacattttaatgaagaacatttcagcaaaatctgttaaacttacacatgtatgccattcgactcagcagttctgctgaaaagaatttattctttagatatgctgaaatgtatacaaaataatacatgtataaagttatttctgtcaattttggtaatgcaaaagactggaaacaacttaagtgttcatcactaggcaactggtgaaataatttgtggttctttatataatagaatattatacagcaataaaaatgaggcttcatgtaccgattgtactgatagagaatggtctccaagatgtatcattaattacaaaagacaaggttcagaacattgtttgtaatatatgctgccatttgagggatcaaaagagagtgcacatttgtatttgtttgggtatgttatcacatatccctcgaagtatacacaagaaactgtcaacaatggttgtcttgagggaggggagctgggaggttgggagaagggcctacccttcctgtataccctttagaaacttgcatggtttgagctatgtgaaccacttgccaattcaagaaacttataaaaattttaaaggacgtagacagagaaaggatttaagagaaggaaaaaagagagattaaagagtgtaaaggagtgttgggaaagagaaaagatccagagaatgaggatactcaagaggtgaaaattaaaatcagcattggcaggaatgagtaaagcctgctccccagagccatggatgagggtgatggcgagctaaggtccataaggggcagcccaagcttggcgctcatcaccagtatgcaccgctggtgacagaattccttccaaagattagttttttaaatcagaattatgtaatgttattgccatggtcagctgtagactttcaaaagacacataaaattctctttattgtggttcccttttttttttttttttttttgagatggggtctcactctgtcacccargctgaagtgcagtggcatgatctcagctcactgtagcctcctgctcctgggcttatgcattcccttccacctcaacctcccaagtagctgggaccacaggtgtgtgccaccatgcctggctaatttttgtttgtttttggtagggacagggtttcaccacattgcccaggctggtctcaaactcctgagctgaagcgatccacccacctgggcctcccaaagagctgggattacaggcatgagccaccatgtctggcccctttctattaattaaatagtgttctatcatgtactggtagatcagaaagcttaaggtagagccaaacattcctcctttgagtttgtggatcaactctttctatcttttgtttgcgggccagacgtgcctataccatttaacgacagcttctgtcagggagagaacaaaggacagaatcttctctatctcttcccttctttaattacagactttaaaactgagaatatttatggatccatccatccatccatccgtgcatccatccatccatgcacccatccatccatccatccatccatccatccatccatccatccatcagtgatcagtgatgtccaacagaattttgtggcatgtggtgagcatatcagggaaaagagaaagagcaaactaaggttgcagagtgaagggtccttaaagtggcctctttctctgaatgaaaggaagatggagagcagctctgtgcagtagaaagatgaagcaagccatatgtgtaattctaaattttctagtagccatgttaaaagaagtaaaaagagaaaaaggaaattactttttaaaacagtattatttaacccaatatgtaaaaaaagattttattatataattaatataacaaaattaatgagattttttttttttggtactaagtctttgaaatacagtgtgtattctacagttacacctcagttggggtagcttatggcttccctattggacagtaagggcagctatagaacctaggttcatgtggttcagtccacttgcttttctctattcctgtgattgtactggatcctgagagggttgacmtggagacaagaatccaggatgctgttttgctgccttttttttttttttttttttttttagacggagtctcgctctgtcgccaggctggagtgcagtggtgcgatctcagctcactgcaacctctgtcttctgggttcaagcgattctcctgcctcagcctcccgagtagctgggactacaggcgtgcaccactatgcccagctaatttttgtatttttagtagasatggggtttcaccatgctggccaggatggtcttgatctgttgacctcatgatccgcccgccttggcttcccaaagtgctgggattacaggcgtgagccaccgcgcccggccgatgggctactcttttacctcagtttgctctttctcttttccctaatatgcccgccacatgccacaaaattctgttgaacatcaccgattgttgatgaatacatatggacggacggatggatggatgaatggatacataaagattctcattttaaacactgtaatttaaaaagggaaaagatagaagaagattctggcttttgttctcttcctgagagaagctgagttttgttaagtggtatgggcatgtctggccagcaaaaaaaaagatagaaagagttaatgaagatccacaaactcaaaatagattttacaaagaaaagcagagtttatataaatccatgagtttttaaaagagagtaggcaggttgggagtatgtttctaagctttgaaactgacccatgaaaggaccacccagaattgcccttggtgccatggctaaggatgattccctcgtcacaatgaaagcccagttctcatttctcatggcagtttctcttctgaatgttcaggagggtgcctgttacaccctttgtaacactttggctgttacatagtcagttagtagttcattaatttactcctctttgctacacccctacgacctagtagccagactgcagacagttaatgttgatttttctcttcctgttttcctatgaggacaatgatacagagcccttggcttggaattagtcagtagctaaagagcacaagccagaagacttgttatttctggaacatgtttaaccatagcatgtgaataattagaagtacaaggaatgactcacttgttgaaagacttctccaacatcaaattctatctattgagctgtctcatgtctatggtgtgttttgcacacttctgcatagaactgggatgtttgaaaaacaaatccttccccccaggccaggactcgttccacacgatccactgttgacccttgctgcttaaagtgtgtatcagtgctggcaaaaccagcaacaccagggagctggctacaaatgcagattcttgggcctaccccaacctactaagtccacatctgcattttgacaagatccccaggtgattcatgaatattaaagtttgagaaacaccaggctatatttccataaccttgtttggggaggagaagtggattaattttccttaaggtaacttgcagtgaagcaggtggagatgggatgagatgggttggtagagtagttgggaaggggtagtgagaagaaagaccctggccagaacagcaaggacacgccccttcaggtaccacttcacttttggtgaagttgcagcaatcaatttggacactgagaacgtttgtatgaatagttcctgattgacagtggggccctggctcctggggactctgcatcaagccatgggaattggaagacccaaatacacaaacaggttgaggtctgtcatggtgaaagaataaatcctccagaaaccccaccagtgacacaygggtgtggggcccctcaccttaatgcattcagaaaccaggtccttagagaargtttggcgtacaytgtgtggtaggtgttcacaccttcctaacctccggtctatttgctgggacagcacgtgaaggacattatcctgcagtccaacccgctgctggaggccttcgggaacgccaagaccgtccggaacaacaactccagccgatttgtaagtcccttccctgtttcagagagtgtcgcttgattgatgatgttgatgcttctgactgaagtctagtatcccacaggaaatgggagcctttcacatatcatcaggaggccacctcttcgatcttkccttcattttctatagcagcatgccgccaagctgcagtttgcctttttttgcgccccggggatacaaacaagataattttgaaaatcattttccacatcagttgccttactaaggaaaataaatgatgaaagtggcagctttggccttggaggagttgtctttawgccctagagaaaagaccttctttcccagaccaagaaataactagagtagaggggtatcccaggtatsatttcccactggcagtggttttgcttcttagaacttggtccatagactctgaagggtgcacagagttagactgatctggcaccttggagagaaacttcctcctctccatccctcagagcgagctgcctgcccaccgcagccctctggctttgtgcatctgtcttatgccctactcatgtaacctaacgacatcccaaagtgactggacctggcytcacaggttgcctcttaactggcttacctaactggtaatgaaaatgtcaaccaagtgcattgttatgaatgctcatttagtcatgtttctgtctgggtgtctccagagggggtaaataggaaagctggcaaggctgaatatgaatatgttccccttgacaaaagccacatttacaaagaaacaaatgtttatccagtaaccttgatttatatagattttgcatcttatttcaaccatagatcatgtctggcactaaagcattcacggagccatctgtgaggctgattctggaacgttttaaaataaataagtgggaattttggagaaaaacaattttcttttccactgtctattttggaaagaagcttctatttccaagagaatttttactatgtgctcatataataactgtcaagttccctggtgggttctatctgttagacttgcccttactttctttgctttccaatattattcaaactactcatttgtttgtctctcatatttgggcccaatgcctgagttgtgttatcctgaagaagttttccagataataaaataggaaagaagaattaaacaaattttccacttgaattaattttcaatctaaatcttataaaaatggacttgaccaaatttaactctttatttaccttttcccctgtcttggattccttggagaccagaaaaaaaaaacaattaaaytgatattttcattgatttttgcaatataaattattcattatatttggaggatatatcagtttctgtaaataacaaaaacactcaacatttattatttttctaattgcaaaattttatacaaccctgatagaaagattggaagagacaattcagacacacattcacctgcacacacacacacacacacacacacacacaaacacacactgtctctctctctctcactattcaccatcatggatgagagaaatgtaaatgaaaaccacatataattttctgtctctcaaatgggcaaacattaagttgattgataataatcgagaaaacacgctattggttgagaactgacacattcttccaggaaagtgattgggcaattgttattaaaattttaatcgttcattatctttgcccaacaatacttttagaataaattacataagcttcctgcttaaataactacttattttaaaagatattcataatatattgttaaattaaaaaaacagattacagaacaatatttacaatatgttcttgtttttttttaatgtgcacattatatgaaaggtaactaagaggtatgtaaatcaaagtttgacatctatgacagtaattatttagcaagagaatgaagaagtggcatcagggtagaattatgagtaatttcactttaaaaaatgcacaggtattatgaagcataagaatgtatatatttaacacttacaaatcttttcaagttaaagaatgtattacgaaatacttcaaacacgatttaaaaacaatgcaatgaacatctatgtatctggcacccagcttaggaaataaatcattaccaagagtcgaggtgaaacttcttttcatttcattatcaaaatgcaaatgcaaccttttattccctttataaaatttcctgtcatcccccccaggctgctatacagcagtcctaaatatgttaaccttttgttagaaattttaacttttatatgacaattatgagccatgcatatgcattttattatgttagagcagtggttctcaaccttgaccacacataaaaatcagctgggtgctttttgaaaaccacacagctccgggccctggtcctagagtctgatgtgcgtggcctgggctgacagcatgttggaaaggctccccaggtgtttctaaggggcatccaaggttgagcactgctgctaggaggacttgggagcttgcctgtccaacacctgcccttcctgggtcagatgttctgtttggtttcattttccctcaactgttgaggaatgggggacaggcactgaagtattccctctatcacatgccaaaaggaaagggtggtgaaggtggccgccaaaggaagcacgggagctctctttcagtgagcttttctcaggtgccactgacattccgcagagcgatggctggtggttctctgtgcctggtgctgctgggtgtttttgttttttgcctggaggaaaagaatcatcagattaagacacatagacagttagaggctggccgccttcggtggtctttcttgacacctagaataattacgaacaggaacacggcatgtactcacacatttgcagtgtgcacagtacttttcttgcccttaatgagtttacagctccagtcacagacataaaacccagctgaattcatccctgagatgggtggatttagtcagcatacacatttttatgttattaaatgtgaatgcgatgaggctgggcatcttctccagtttgaccatagaccacaccactccctyttttcctttatccgtatttacccttctggcctctgagggtgcttaagtttctaagcacaggagacaaattaagttctagtgagaaaaaaaaaccaatttaaatatacatatgaaatatatataataattgttataataattatatatataattttgattcattttattttggtttttggacagagtctcgctctctggcccaggctggagttcagtggcatgatctcggctcactgcatcctccacctcccaggttcaagcgattctcctgcctcgctgggactgcaggcacccgccaccatgcccagctaattttttgtatttttagcagagatggggtttcaccatgttgaccaggctggttgcgaactcctgacctccagtgatccacctgcctcagccttcaaagtgctgggattacaggcgtgagccaccgcgcctggctatatataattaatataacaacctagataccttttcaactacagtctaggtttttattctcctttgttccctattagcagtcatttaaagaggaattttcataacaatgacagtgacaaaaatccctaggcccgtcagtagctagaaagaactttacttttaataaagtgtttccgttctagataaacattttagatgctccgtaggtaagagagattgagtgtttttgctcaaagccatgagatgaagcctgacagagcaagagtgctcttcctctgaaagggtgccatgccatttttctgcctcatgatttacaccttctggttgagcagacaggcacctactgggggaaaatgagcaaggaatagagcatatccttatttagtcatgctggaatgataggtgctctctctaacagaatcgtgtggctggacaaaagcacgggttattgtctgattgaaaactaaggaagtctagactcaaattaggagtaattcagaatgtgtattttattaatgaatttccttgaattatatactgtattcaaagcctgtttgggacatcatgttttgttcaccaaccattgaaggaawtccctaactttcttgcagggaaaatactttgaaatccagttcagtccaggtggggaaccagatggtggaaagatctccaacttccttctggaaaaatctagggtggtgatgaggaacccaggagagcggagttttcacatattttaccaggttttcctgtttacttttttcctacccacttcctgtcccttctctacattaaaatatttctcagacttcaggcatagactatagtctaggaagccagggaggactgatgatgataccatgtacaagtcaatgtgcagaattgtgagaatgtcctgccctcaaggagagtgagttctaattggagtgataagacagaaattcctccaaagctaaatcatcaagaaagtattgatgtaacttcaaaacaaaacgaggagtgttggagtctttgccaaaggaattcaggtgggcaggtttggccggatagtaggagaggtgtgaaggaggtagagcccggatggaaagtggaggggattgatgagggaagacaggtgacctgcaccaaagcagtggaggtgggagagggaaagccagtcagggagcccggcctcagcctgcctgcagggcaggcgtctccagaacgtgagctaccggaggaaagatttgagataggtttgggatctttaatgccaaattgaaaagtttccacctagaccctcagaagtcatggagagtttggggccagagcagcttgcagggtgctttttgattatgttacaggcttcagcagtcatctgagtcagctacttttattttatttatttttttatttgagacagtgtcttgctctcttgcccaggctggagtgcagtggcacaatcttggctcactgcaacctctgcatcctgggctcaaatgatccccctgcctcaccctcccaagtagctgggactataggcacatgccaccacacctggctaatttttgtatttttcgtagaggtggggtttcaccatgttacccargttggtctctaactctcggactcaagtgacccacccacctcagcctcccaaagtgctaggattacaggcgtgagccattgcacctggccctgattcaggtacttttgtaaaaggtttttaagtacttaaaaaatataatgatgttaataaccaaattttttatgttctatttacttattagtattttatattgaagatccacattagactttcttcgaagaaagacctggtcactgttttttgttttgttttgtttcgtttcgtgtttagtttgtggatcactggattagaaggacattaaactgtggaagtagctcacattcartcttttcaattacacacacatcttaggcaatgccaaataattcttttagtttgtacctgttggttgaaaaagtatataaatgattaaaacttctgtgaattcagtcatttttaaaattgtattaaagcaacatatatagataagtgaaaaataattatatatttcacataaataatacccagtgctagatggaagtgtataatggatgtcaggacttctttaaataaatgcaagccccaaccctcccccaggagttctctgcccttaagtcagaaaccaccagaatagaggctgggaactgatgggcgcaggggttcaagattctgacatgaaagtaattcttggctgggtgcggtggctcacgcctgtaatcccagcactttgggatgccaaggtgggtgaatcacgaggtcaggagatcgagaccatcctggctaacacagtgaaaccctgtctctactaaaaatacaaaaaattagctggccgtggtggtgggcgcctgtagtcccagctactcaggaggctgaggcaggagaatggcgtgaacctgggaggcggagcttgcagggagcggagatcgcaccagtgcactccagcctgggcgacagagtgagactccgtctcaaaaaaaaaaaaaagaaaagaaaagaaagaaaaagaaattcttgaagctacgaaatacttgggagtggatgtggggagaaaatcctgccacacaggaccaggggactttctagatatgtaggatcgggaggcattgaagagccagcagggaagtagttgaaggataaggaggaaagccaggatcctgcagtgtcaccaagccagggaagcctcagggcgacatcgacaggatcaaatggtcagagctcttgggcaaaagggacgagctggggtgtgggggccaaaaaaaaggctgttggatttaggcactgaaaaatagccatgcaagggttccgccagagtggtgaggggagaagctagaatgcaggtggttatgtcatggcaaggaagtagatcctgcagcttggaggagttcacagtcaaggaaaagcttctaaagaaggcaaagagtaccagagagcaggaagctgcatggcagttttttaacatgcaccctgcagtgagaaacatggaaaagccagcttaaaaagccatagcaagttgggcaggaactaagtaattaaaatctgttttgctttccactcttccgagggtggcagtccagttcctttcagtggacaatggaaartcctcagctcttgcaggtctttccagagttaggaatcaaaatttgcagagatgacctggggctactacaagtacatatttgggggccaggactgcctgtaattttagaaagcagagatagaaagtccttagggatggtggctgcaggatgcaggagtgacttcgggtgccttgtggtccacatcatggctcaacctgtgttctcttgctccagctcatcgagggcgcctctgcagagcagaaacacagccttggcatcaccagcatggactattattactacctgagcctctcgggctcatacaaggttgatgacattgacgacaggcgggagtttcaggaaactctggtaagtgctggcrcagggccaggcaggatctgctctcccaactggccatttcctgtggccaaaagggcagtgaaggttaataaagcaaasagctgcatgaaatgtccgcctctttctctgtgagcactctgtatgctcatacatgtttcagtatccttaaacagccatgtgccagttgcctgaggaccacttaatgatttgagatgggtaaaaagaaatgaattcatcattatcaccctgcaggagctctgataaataggcaaaaatgattcatacgttgagcatacctgtttgctgatggcctactctattcgtgagctatttccttagaaaagctaagcaaaccgcacgtctatggactgaataggtttagacattttggaacgtctttagtcttttctcttatttcttttcyggttttgaagactctcttcccctctgtattgtttagggcagaggaccctttttctgtgccatgcccttcacattgcatgtaygttatggtccaagctgtgaaactaggtagattatggaggggttccatcctgggggcaataatgtagaactttctggaggtaggctgaacacccacttggcctcaaaggccttcattgccacccactgccctttgagtctgtttcaagctggggactattcctcaacccagatccagaactgagcagtagactctgaatgagcagcgtgggttcagtacatttgtggttgaaagggacagaaagttcaaacagactgtgtcctgggtgccaggaaacaaaatggtatcaacaggtcacatggcctcaaagcagctgcggggaaaagtgccaataaggagtctgcacactggtcctagagtgtagttttcttaggagatgtttctcttaagatttagacattttagcggtatttattgcatttaagggacctcagaaactggacttttaaatgatgcttttattggatttcytggagatttttcattaagatccttttgcaagtacaatatattcttatccctcctgatgaagggaaagatctcgagtccactttgagtaggtggaaaggtcagcagcgaccttcgaggggaagctggcaacaagaacacatcaaaggatgaagayaggacttggagactttgtgtacaactaccactcttccgagtctctttcctcctggagtattctcttattcctggaggatggcatgctatgcttagagacagaagtgcccttccagcatgactttgagacgtgagaagaatgtgtgcattgggcagtgaccatgttgtacaagaacgtcctgctgtcatcacaagctaagccacatgtgactgcacaacccaatcttatgttttggcttttttttttttttttctttgtaactcgtctgtacttgtcacatccttatttagagcagctgctgtgccttggcttcttcctaasgtgcttttaaarctggtgaccagcttctctggakagtttctcttttctcttccagcacgccatgaatgtgattgggatctttgcagaagagcaaacgctggtgttgcagatagtggcgggtattctccacctgggaaacatcagcttcaaagaagttggcaactacgcggctgtggagagtgaagagtgtgcgtagccctggcatgtggccattgaatgaggggtggctagctctgattagaagtaacctagcactttcctttgcttagatctcaaatgggaatattgggaagaagtgataaatctacatgtcctctgtggcaaacagaatggcttcacgasagaccagacctcttctatgcacctgtccctgtccttacccccagcctttccaagtcccacaccatcgattattaatggaatcgtttcaatttatcattaacctggggaaagctgggaggatttcacaccttggtttaaagataaagtgatctctttaatggggattagagtaatggcttaatgcaaaagatttattgtctttatcaaaaccttttcagtaactggtctttaggatctaaattcacttacaggttttaaagagcaagcaatataatatatgtaaatatgggaagctcacagcttcacagtttgttccatggattggattacattggatttctgaacmcagaaaaagatggacattgactgttgtgttgacatttctgatgatcacttttaatgatcacatctgtatacctggagcctcaacacctaaatggtcgtttttactctttgagaaaaaaaatcagggttcttcctacagagaggtgctgctggttacatgtgcccaaaatctaccataaatacagcggcacatgactttagcctcttaggcatcaacagcttgcaggctgctctcagaacccacacatcctttaaccacccaggaagacattcttcctttctcagcattctttaaggatgataaatttagatgcttagtaataaatagcatcccactcattgctgacaatgcagtggggatatttccattccaaataaggttctttttttatgtttttgttttcttttctgataaaagagggaagttctgctaacttctgatgtctatctgataaagaaaaagatgaattatgtttaccagggaagggagtagaaaacaataaatatacagggtgtccataaagtctaaaaacatgacctaataatcataataaggataactatgtttctaaactttgtgtacattatccttgacatttaacaaatgcacatatatttccagtaggatcattaacacttggccttttaattgtaacagtgttggtttggtggtagtttctgttgaagtagactggattttttttgccttcttggatagtaaaataatttactgcctctttatgcttgaaaacaaaatcatgacactgaaacagcaaacacttccctagatgtttgaaacaagaagtgttttattgcacattgatgtccagagttagtagtcttctcagccagatgggtaaggccgagcactggcaactgcccatgaaattccctgactagaggcgatggaggcatggagattggaaaaggctgagatggaagccagagaggtccaggaaatgggcctccccctaccaataatttcctttgatttggggttttgttcatttggtaatacattaacgtggcttgagggggtatgcagtgaaagttctcccttctataccttttctagtccacttgttcccctcgtcagaggtaaccaagattcycagtctcttgtgttccctttaaaggatgtgtgttccaaaacaactacacacaaccactcctttttctcacttttgtgcaatawtgggggcttatactgcaatgttctacagttgctttttcacttaacatgtgtcttaggccaggcatggtggctcatgcctgtaatcccagcacttcaggaggctgaggcaggtgatcacctgaggtcaggagtttgaaaccagcctggccaacatggtgaaatcctgtctctactaaaaatacaaacattagccaggtttggtggtggtgcgcacctgtaattccagctactctggaggctgaggcaggagaatcgtttgaaccctgggcaacgagcgagtctccatctcaaaaagggaaaaaaaattatgtgtgtgtatatatatataatatatatataaattttatatatatattatatatataattatatatacaatgtgagatgatgctatatcaattcctaacgagctttatcttattttttcttttttttttttaagagatggggtcttgcttagttgccagggctggtctcgaatttctggccttaagtcatcctcccgccttggcctccggaagtgctgggaatcgaggattgagccactgcacctggctgtcctttttgtagctgcatagcattccattcattggctacactttatttatctgttgttggacattaatatggtttctgatcttctgctgttacaagactgaatgaacactactgaaaggaatagccttggtttctatcatctttctcatattttagtatatctatggaataaatttgtagagggaagtggtagtccatgcctttataatggaaaaaagcagactttctcttgctcttgcagtgcagaaaaaaaatggaaaaaaatggtaagattttcatcagaactggcctactaaagcaaaatagccattaataacagcaagcttttttgttttattttgttttttgtttttgttttgagacagagtctttctgtgtcacccaggctggagcgcagtggcgctatctcggctcactgcaacctccacctcctgggttcaagcagttctcctgtctcagcctcccaagtagctgggattacaggtgcgcaccaccacgcctggctaacttttgtatttttagtagagatggggttttgccacgttgaccaggctagtctcaaactcctgacctcagatgatatgcctgcctgggcctcccaaagtgcagtaattagaggcgtgagccaccacacctggccaaacaagctttgttttttttacctgaccttagactaatggaaatgtagcatttccctggtcaaacctttacgttgctgtgaagctaaacaaactaagaaatcccttcttagttggatatgttggtgaatgtctcttgattctcacaacaacccgacatgggtccagtctgatttatgaatgtcatctgtccttactctgtgcacaggagtgcaactctgtgagatgaatgcacacatcgcaaagaagtttctcagaatgcttctgtttagttcttctgtgaagatatttccttttccacaacaggcctcaaagtgctccaaatatccacttgcagattctacaaaaagagtgtttcagaactgctcmatcaaaagaaatgttcaactctgtgagatgaatgcacgtttagttcactggaagacatatccagattcctagacatgtgttaacagtaaaactaaactaaggataatggccattttcagatcagtgcatttgattttgtttacatgtcctttctaaaaggaagcccttctattgctcaaagcatttttgtgaaacactcatatagaggataaatgtcttgttctggcattatactttttcaaaatgtattcactgacttaatctcattggaaggtgtatactgagaaatgtcagcccgttatattctaacaccatctgtgaaattcaaacagattatcctttattgggaggcttgtgattttttagcattatcataaggcctttaacaaaattcttttatcagataattttggtaaagcattatgcagaaaaagaaaactcagccaagttcaaaatttkcattgcatctrtaaaaatctttcattcatattggaaaaatctgagcattctttcatgtcaaagaatggtgtcatttatttatatgagaacgttctgcccagaaatcaagraaaccccatttatatcactagccctccttggtaagtttcatggtctgaaacaagatgttgagctatggaagtctccgtttttctatccaaagaccacagactgccataccatgtgacattagggcaggatatgaacaataccatccccttcatttcactccatatgctaccctcagaggaatcttcttataatgcccctctttattagccatcaggcccccttttgcctccagcccaaatatatcataccattcaaggacccccagcattggaatctgtcctaaccttttaaatctgacctgaactttcacctgtagccagtgctagtccacacactgtagaccgtctcgtcttgatcatgtctcccacacttctgcttcctccccttggtacactcccttctcctctctgcatctgcacaaatcgtattcatcctttacacccagctcaaatctcttgactaccccagcaagtagtaatatcttcctgttctaatttctccagatcttgtctgtctgtgttacatattcagcttttccaagggttctttatttggcaaactatttttgcctcatctagattgcattcaagatttcttacatattttctatcttttcctctctctttagtaaccctacacatgctaaatactcaataaacatgggattggttgtaattattagttcagtaatatcaggtgcttcaaaaatgatgctatgaaaacattktactaaaaaggaagaaaacaatatttggagccaaagaaatgtttcttgattgagttccttcctggctgtcgtgctggaagcttggagagatgtccattttaggcatttgactgtgatctcagtaggagggataggtttgccatccttcttgaatccctgatttgtattattggaagtctcagtcatcataggaattgactcatgtcataaaacaattgggaaaaacaaaggagatggatgtgtatgggattactgataagcagccttcactagaacgtaagctcttggggcccgtgattgtgccttctatgcacacacacgtgcatgtgcacataagtgcctccatatgtttgtgagatgacttggaagtgtcacaattctgaaagattgtcatgttttgttttatgttctacagttttagcttttcctgcatatctgctagggataaaccaggaccggttgaaagaaaagctaacaagccggcagatggatagcaagtggggaggcaaatcygaatccatccacgtgaccctcaacgtagagcaggcctgttacacccgggatgcgctcgccaaggccctgcacgcccgggtctttgatttcttggtagatgtaagtaacagaagttgatgctggtgatgcttcatatcttagctataaagagtaaaactagtaggctgggtgcggtggctcacacctgtaatcccagtactttgagaggccaaggtgggaggatcactgcagcccaggagtttgagaccagcctctgcaacatggtgagaccctgtctctacaaaaaaacacaaaaattagccaggtgtggtggcatgtgcctgtggtcccagctactcaggaggctgaggtggttaagatcacttgagcctgggaggtcaaggctgcagtgagccgagattacgccactgcactccagcctgggggttagagtgagatcctatctcccaaaaaaaaaaaaaaaaaaaaaaggtaaaacgactgagggttttgtgttcctgttctggctccttcctttcacccattrccttacttcactttctctcactctgtgattactgaatcctgcttttccttctagaactgcccaccaagataccttagctaaatctaatgtggtaacaagtttcttctggacaaaatatttagtaaagctaggactagagaccagaaaaagaggagagccacgttcatgggcctttcttgacttttggacctaaagatttaggaatatgtttttcacatatttctatgttacaaattaacccaaaacctagcggcttgaaaccataagcacttattttctcagtttctgagggtgagatatttgggatcggctgagcttggtggttctgactcaaagacgaggttgcagtcaggaagctgattggaactgtggttgtctgaaggcttgcctagggttggaggatctggctgaaagatggattgcccatgtggctgttggcaggaggtctcagccccttgctgcatggacctctccttgaatatcctcataacataatggttggttttccccagagcgagwgatctgaaagagagaatgagcaagaagccagttttttatgtcctaatcttggactcaggtattgtcactttgccacattctgtttattagaagcaagtcactaagcaaagatcacacttaaggggaggggaatgaggctccaccttttagaggaaggaatatcaaaaactttttgcatgtattttgaaactattagatatttttggttatggcataattatgtgtgtgtgtgtgtgtgtgtgtgtgtgtgtgtatgtgtatatatatatatatatatacacatacacacacacacacacactgggggcccttcgatccaaaagatagatagatagatagatagatagatacacacacacacacacataaactcttatatatgaatatatatttatatatgtatatcacatatatattctgacaattagtctttcagcagtgtagagctgccagtaacaatctctgttaatcactgtagcctctaaatggtaaaataataatagcaggcacttatatagaactaactatgttagtgcccagatactgttctgagtattttaaagagaaaaaaccctcacttaattcttacaacaaccctgtgacttaggtattattatctctgctttacagataaactaagggaggcatagatygattaaggaatttgcccaaggtcactctgttattatgtgagtgatctaggaggccctagattcctagctagtttgtttctttgacgtttatatattcaagctagaaggaccctagtcaagggacaacagtgggggccattcaatccaaaagatctgtatttgattccaggcactaacatttatacggcttaaggtatggttagtgtggttagagtagggtcaggcaggacagggtaggagaactattctaggtactttagtggctatttaaaggataacattgcttgggaaggtcagggtcatactaaacagaagtcatgcagttaggttgtccagacccctcattttactgagaagggaacttcaggcctgagcaatggtggttttgcccaaggctggtcagcaagggggtggtgcagcctgggactagaatccatatctcttttctctttgttcagagcaccttccagcgctgggcttcctacctacctttctacctgtcacctgtcagttttttttgtgaatagtaccagtacaygaatactcatataagtgatcctaatttgaggtgggatttactgggcactgactgtgtgttgtgtatgattactcattcgctcacaaaagatgatatttcattttgtttgcctggaaaacacctctggtacttcagaattcgtccaggtattcatcacctcaaagaattgttcgcttacattcctcccccactgcatcccccaccaaccgctctatccaaacctcccttgctgtcattacatctgttcccatgaattgcttggcctcttctcacggtgattaagaacacagatttaggcatcatactgcttaaatttagtcccagaccctgcttcttacatagaacaaccttaagcaagccttggtgtatccatgtggaaaattgggaaaataatggtatcactgccattttgagaamtgaaatgggaattaagtgaaacaacacattgagagcacttagcaaaccctggcaaaggtgaatgtttaatagacgtaagctgcttctattatcaattcaaaaataatgactattgttactatctgcagatagctcaccctctctwtaagcgcctaggaacaagggttgtcttgtccttagcatccctggcatattgtgttgggtcatcattaaatgactggtgaatggaagacactggaaatgacaattacagatcctttagtgtgggttctttgtgtgaaataggttttacttcgatcatccaagatgacatttttttctaattgttaagacttcctgaaaaagcttacttggacagaaattaatggttatcatcattaaacaaacattttttgtttctactgtactcgcttttctgaatcctggtggttttccaaagtacttgactttggactgagagattgttaaagcagcaagtctcctgccttcacttgtcctctgtttcctgcaagcagtagtgtttgccgtgtagaatccagcttccctttccccagtgcatgcccgtttttagtatgaatggaaaggagttcactgccatgctgtttactttctctagtccatcaataaagccatggagaaagaccatgaagaatacaacattggcgtcctagacatctatggctttgaaatattccaggtaaggccagttttaataactaggggttgaggagggtgacgtatttcatctggcctgcaagaaataattctaggcaatgcaaaaacaaaaaaacagaaaacaaaccacaacaacaaaaaaaacaactcaggctcatttttgcctttgtgagttcttcatgtgcctttaccaaattagtttctcctaaatataaacttatttcttttgatgcatccaacatttctattaaagcttttcacatgaagacatttcaataaatcactccagaaatgacttttaaatgattttgtgaaagaattacatgtgaataactttttttttccagaaaaatggctttgaacagttttgtatcaattttgttaatgaaaaactgcagcagatttttattgaactgacattaaaggcagaacaggtaagcagtccctcttccttcatcctattctatttataatttattttgtttaagagggtatagatttctgtcttttgttaatagatttcggttccagtcttatattaggaaatgcatctaataaagtcaggcagaaaaaccatatgccattgtggcattttaatctatgaaatataaataccgtctgcagcatttgccttcttctttaagcaaatgatgctgtgatgttggaggtaagactggctgcttttactctactgactcattgagcacgtgggaaatgggagcctagttccagccccgactgtctgtggcaaatattgtgttccaaataaaagacttggtttcctcagatctacgccattttcaatcttccctaacaatacgtgcatttttaacaaagctggtatttgaatacttacctgaggtaacatgccttggtatagtttcttctaaagttcactgcaggctgggtgctgtggctcgtgcctgtaatcctagcactttgggaggccgagtcgggagaattgcttgagcccgggagttcaagaccagcctgcgggacaaaatgagaccccatccatacaaaaaaaataaaataattagctggacgtggtggcataagcctatagtcccagctactctggaggctgaggtgaaaggattgcttgagcccaggaggtcgaggcttatatcatcacaccactgcactccatcctaggcaacagagcaagactctatctcaaaaataaataatagccaggcgcagtggctcatgcctgtaatccctgcactttgggaggccgagacgggcagatcacttgaggtcaggaattcgagaccagcctggccaacatgatgaaaccccgtctctactaaaaatacaaaaattagctgggcgtgatggtgtgtgcctgtagacccagctactcagggggctgaggcaggagaatcgcttgaacccaggaggcagaggttgcagtgagctgagatcgtgccactgcactccagccttggcgacagagcgagacttcgtctcaaaataataataataataataataataataataataataataataataaataaatagttcagtgcagtttccattgtttcctgatagcatattgtttaggattcctggggccaccataacaaagcaccacaaactgagtgacttaaaacagtagcagtttcttccctcccagttgtggagcccagagtctgaagtcaagaagtcctcagggccacactcctcctcctcctcaggatagaggggagaatccttcctcttctagtttctggtggctcctggcatttcttggcttatggcagtttgactccagtctctgcctgtgtcttcacgtagcctttttcaatgtccctctgtgtctatatccaaatctccgtctctttcatgaagacaccattttagctttgcgcaatggcaatattttagccagggctgttcatctgaggcatgattattgctaattgaaaacttttcacaataccctgccatgatgactggaaatacagtcagcattgacaatttttgacagtctctatggagagtgaactgtaaaaaaaaagaaaaagaaaagaaagacaccattgttttggatttcaagttcactctaaacccaggatgacttattgtgagatccttagtgaattacatttacaaagaccttatttccaaacctcacattctgagaggttccaggtggatgtgaaatttggggggatactattcaagccattacacacatcaaaggctgtttggggtcatttagttatggaagtgtttatgcctctgcttaggaaacaccataccagggggtttcacgtgaccttctgccctggaacctgcccttggttgttttgctgtagctactctaaggggtggggtaggctagaggttcacatgaaacccattgctcccattgccatctaagtccctaccacgtctagcccagtctcctgcagtagtctcctaactggtttggtagtttccatatgggtttcctgtgaacctctagccttccccaacccttagagtagccagagcaaaacaaccaagtaagagtgcaatagccagtgagatgggagaggggaggcaggggctagattgtatgggaacttgcagggcatggctgagactttgggtgttacagtaagtggaatgaggacccactgaagaattttgagggaggagtgacatgatgtgatttgttgtgtttttgaaagggtcactctggctctatagacttatagagtgggatgagtcaggggaaagcaaactagaatggaagtttaaaaaccagtgagggggatactgcaggagactgcgctagacatggtagagacttagacggccatggtagcagtgtaggtggggagggggagtatctggagagtgagagaatgggacttgctcaaaataattagcaatagccaagaaagaaagagcaatcacgggtgattcttagctttataccctggataacagggccgatggtgacactgtttactggagggtaagattagaagaggggttgtttggaggtcacgggaaatatggaatcagagttcctctaaacaggttaagtgggagaggcctatcatacatccaagtgaagattccaatctgtagaatggatttgagtctggaaccccgtggcgaggtatagactagagaaataaattcaggggtcattagcctgtaggtggtatttaaagccatgggattgattgaaatcacctagagaaggagggctgagaaaatgagaaagctgaaagattgagccctgagactctaccacatataaaggtctggaaataagaaagacctggcaaaggaagctgacaaagtgaaaccagtgaggaaagaggaaaaaaccaggatggtgttgtggtgttcaagttaaatgagcaactcatagactgaagaaccttcccattaagtacctggatgctaatctgtactcctgtcctatattcaatttttttttttttttttgagttggagtttcgctctgtcatccaggctgaagtgcagtggcacaatctcagctcacttcaacctccaccttctgggttcaagcaattctcctgcctcagcctcccaagtagccgggattacaggcgcgccccaccacactcagcttctttttgtatttttagtagagacagggtttcaccatgttggtcacgatggtctcgaactcctgaccttgtgatccgcccacctcggcctcccaaagtgctgggattacagatgtgagccaccgcgcccagtcctatgttaaattttargagttttgtgatttttttgtaactggatttatcagttcggtgctactaaattgtagttttctttggccagaaacagttgtgtggcaataatttcatagggttcaaactaaacataaaaatcaccaagtcataaaatgttcctttcctgttacctcttagaaaataaaaattaaagtccctggtctttgttgcaggacattcaggtttttctcttttatgggaatttttgtccattcagggtctgtccgtgcagagctcttgctatctgggaaataatgtgagttccttgtctctgtgttacaggaagaatatgttcaagagggaataagatggacacccattgagtactttaataataaaatcgtatgtgacctcatagagaacaaagtggtaagtgttcatttagtatgtcttttcactgctcacaggtttacattaagtgagtttttattctctgtgtcattgttttagaacaggcaaagtgacaactctgatttgcagagaatttgagcaattgtactagttttctgtatgtgtgaaaagagaacagtacggctttattctggcagtaaatatgaacatgtggatatgagtaaaatgtcaatktacaaatggaagttgttattgaattctaagagaagacaggatcacatgatgacttagcatggaaagagccataaaattggccctgtgttctagtccaacttctaggactttagccttaatgactgattcaggctggtcatggtggctcgtgcctgtaatccsagtactttgggaggctgaggcaggtggatcgcttgagcacaggggttcaagaccagccccagcaacatggtgaaaccctatttctaaacacaaaatttagctaatacaaaaattgtattagctaaatacaaaaattagccaggcatggtggcacgcacctgtagtcccagctactctggaggctgaggtgggaggatygcttgagcctgggaggttgaggatgtggtgagctgagattgtgccactgcactctagcctgggtgacagagcaaggcaagaccatgtctcaaaaaaaaaaaaaaaaaaaaaaaaaaaaaaaggtgattcaaaataaaagtgatacagaacaaatatctctataggatttttttatatatataaaagccaaaaactggaaacagtaaaaacatccgtagacaacttatttatttatttatttacatgtttatttatttattttgagagacgtctcgctcggttgcccaggctagagtgcagtggcgccatcttggctcactgtaacctccacctcccgggttcaagcgattctcctgtctcagcctcctgagtagctgggattacaggcgcccaccaccacacctggctaatttttgtatttttagtagagagggggtttcaccatgttggccaggctggtctcgaactcctgacctcgtgatccacccscctcggcctcctaaattgctgggattacaggcatgagccaccatgcccggccagacaacttagttattaaacaaactatagcatatcagaacagagaagtatagccattaaaatagtaagtgtgaagaatgtgtaaaacatgaggaatgcttataaaatagtgctatgtgaaaaaggaaatgcattatagaatgtgtacactaaataastaccgaaatgatgcctatatgggtaacacgctgaaagagaacattaagaaatagattaggtcaaaggaaaatgtttttacttttggattcttaagcaagtcaatttggcatgactatgagtgagcagataatgatctgtgcatgactcttggataaaacttcagggagttaaacagctttttggaaagtggagtttcctccctctttagatctaagtggtgactccctatttgggactattaattgcattcttgcctgaaggggaatactgactttcaagatggtatcttaagtctggggagctgtttccttgcctaagaaaggacctgataagcattgtctgttttggagaggtcagtgactagggccttgccttcttgctcccatcagaaccctcctggcatcatgagcatcctggatgacgtgtgcgccacgatgcatgcggtgggtgagggggcagatcagacgctgctccagaaacttcagatgcagattgggagtcatgagcacttcaacagttggaaccaaggcttcatcattcatcattatgctgggaaggtatggccaatatccattttaatgtctatctgttttaagcctttgggtttgtgatctggtttctcatgaagcaaatcatatggctcgccgtattttattgattcaacaaacggaatttattaactatcaaaggaagcaaaacaaaagattgtatatactactgcatttttttgtatgtacatttatttttacattgtagaagaagctactacttttttacagcatataaatgaacataggtataaaccagcaagaatgaaagaaatagcatatatctaatgaaaagagtcggaatttctagarcacaataaatacctacatcctactttttgggaaccaaatgccaactacatatatataacatggcaagtgctgctacatcagaggtaccaaaaatacttaggaattgtaaataagtatcgtccagcacgtggatgctcaataaaagagctggaggactaaataaataggaaartcactctacctactttcctgtttccatcttttaggaattcaagtttattcaaaatttcrttatataatcctgtatctatgatctcttcaataatttcggaatggtagttttaggcaactttaaagcttaagcttattctgaatttcccaragtgtttttgcactttttttcagatgggcctcttcttcaggggtcagctttatctttataaggttggtaataccgttctctcccaggatacaaggaatactgaggaatacttcttcatctattccatagaggcccttrrttatggtggaaactggatgtattctcctaagattcttcaaaatactttctgttaaatcggccacagataggccaatggcccaagaagtataacctttcattttaataatctcataggcagttgcagtcacttctttgtggacatttttccattgctcaggatctttatcmgttcctatatcagagttcagatccttcaaagrgacaccagctatgttcactccactccacacaggaacacttgagtctccatgctctccgaggatccatccatggcagctttcagaatggataccaagcttttgtccaatcaagaaacgaaaacgagcagtatccagattacagccgcttccaataatacggtttttgggaaatgcactcaacttccaagctacataagttaagatatccactggattggaaacaataatcagtttgcartgggggctgtactggacaatactggaaatcattaacttgaagatggccacatttcgctggactaaattaaggcgcgtttctcccttttcttggcgtgcacctgctgtgataatcactaggttggagtttgctgtgacaaagtaatctttgctacaaacaatatttggcattttcgtgaaagggctgccatgttgaagatccatygtctcacccttcagtttgtcttcatcaagatccacaagggcaagttcatcactcaagccttttaataagatgctgatagcgcaggccatgcccaccgatccagttcctatgatggagaccttactgtgatgaacgggcttctcggaagtgaaacgctcaataagctcactcttcacagtcgccatcttgctcacgggkgtgaagagccaggtgccgttgagcgggatkcgcgttgcttgacgcrgacacagggccatccccaggcataggaaattcgctcccaccgagctcaytctctggctggcccgcacaacaggcacagtccaactcatggctgctcactgaagaagtrgagagagagaatggaaaaaagctgctgatccgaacgttgagacgccaagagagccgttggcaggaccttcagcactctacggcaggtgcgcgtgccccgccccctggccctctactgcggctgcgcgggccttgccagagtctccgacacgtgctttccgtgggtgctcagactaaggcagtgaagggctgcttctctagcaagtgatttctggagttagttttgctaagagtattatcaatagttgacatgcttaagaggctaaccgagatccctggaattactagttttttatttttaatatgaatgctgaggaaacatgcttctgttaactacagatgaaaataaggttacgttttctgaaccgtgaccctgccaggaaggatagggctctatgctttgcrtactggtggctgcctgcaccatctcccagtgtcccagaattgggcgcctgctttctggtctatggcgctggaggcctattttgaaaggattccactgccttggtgccagtcctggccaggacccaccctgggacagtcrgctggggcttsagcagggtaggggccggctgggagtcactccagcactaaatctcagcatactactgcatatttttggaaaatgaatcaccctgctacatgtattagctgctgaataaatggattttcgtcttgcctcttgctggaatcacagactggcattccttgtctccccatgcctactggtagtataaatcaaggcccagagtgcacttttggtgttcttataaagcccatcagtattgggtgcctactggatgccaggytgtgtggggctgctgatgataaaaaagttaagttgaggtcgtggtcttggggacttcctagtgctatggaaatcccctggtctcatccatcatcccagctgatctcttgttaaacagagtatctgagcatgagtttctggccagattggtgcaactttgataccacttctgggagaaactgcaaagcctcagatgacatggctcattgcagtgaattactgagcatgaggggcttcacttttgctctggcttagctaaaatttaggaaaagtattgagtatgtcacttagacacccctatggatccactgaagaaggggtatggggacttgagagctggagttctgattacggatcagctgggccatccaggcagccagatactcatcagcatctgcaggccttccccactaagtcagctaacaagtaagacgtgcacagccttcctgtgacagkgcacaatgaaatcccaaatgcaacatctggaaatccacatgttgtggtgagggtagccatgacagctttggttttttgtttggtgaaattagattttttgttcaataaatgattttgttcaattaattacattttgttcaatgaaattmgatttctttccattcttggccaggtatcctatgacatggatggcttttgtgaaaggaaccgggatgtgctttttatggatctcatcgagcttatgcagagcagcgagctgtaagtatgttttgccatagctgacaggggatataggtttgatgaaattttcaatatgaaaacaaacttatgagctgggtgtggtggtgtgttcctatagtcccagctactcaggaggctaaggcaggaggatcacttgatcctaggagtttgaggctgcastgagctgtgatcactcctgtcaatagccactgccctccagccaggcaacataggaacactrtgtctctaataaagaaaaaaacaaaaacaaaacaaaacacctgtgatgtttagtggttagcattttgttccttcatgctattgggtctggattatcatttaatctatttggtttctcaaaatagctttcttttctctatatcagtctctcccttttatgtccctaacacttcatgcccccaaattccaagtgccatctacaggtccttcagggcctcaggctttctacctttcaatactattatcagggagaaataagcccactggctttggattgggatggccatttctgactatttaagagtggaacagtctggttctatgatactttgcccctgagctcttcttcatggtcgttgaatttttaaagatggttaatggcttagcaagacccacattaaccagagtccctgaagtactgaagaaatggcttgagaactctgggagggacaactaaagaaggagtgactaagagatccattttaactcccaagaccctgtttcagctgtaggggtagaagagkgagggtatcccccttgcacgctgctagaactctcaagaccacctctgccttcctccccttttccctgaaaaggttctcaagatcctggataacacataagatgtaatttacatgagcaagtccatcatgcttgcgaggcaaggcccatgcatgccagatcttacaatttctagagcttctttcaagtaagagctgcccttttgctctctrttagttaagctgtcacaatagcaaggccagcttctctgatcaacagcagcgagcctgataatttcctattaaagggctgactgcaatgaaagcaaagcaagagtttccttttcaggccctggtcagctgttctgctccgtttacttctctccctgtagctccctacccctcctcaccctctgctctccatccctgcgcttccttgcagccacaccaccatttctgagattttgcatttctttttattmaaaacatacawaatcaatttgttcttctctgagatgtttaggtaagccacaagtcctggcttgtgggttttatggcagtcaggtgcagacttgcttccagagattgtttttaaaaaattattaaaattcstgccaagtttaagagctattattgcttccacataaactgctgtcatacggacatggcctattattttgtaaacacacttgatgtcaaaatctgtagttgtatctggtcaagttaaaagtagactgctggggagacttcctggaaaattcaaratgcccaaaaagtcattgaggaggaagtgagtttgagtttgaatgtcagattgctaatttacatggatcccgtcattcacccagtcagcaaatacatattatggaccaactgtgcaccatgctatgcttcagacaccagggacactragatgagtaaggcattgtccctgccctgttgctagtgaggcagacgtataaacacatgcagctcaaatagcaccactaatgaaagtatcttcaggctgggtgcagtggctcatgcctgtaatcacagcactttgggaggccaaggtgggtggatcacgaggtcaagagatcgagaccactgtggccaacatgttgaaaccccgtctctactaacgatacaaaaattagctgtggtggcacgcacttgtagtcccagctactcaggaggctgaggcaggagaatcacttgaacctgggaggcagaggttgcagcgagccaagatcgcgccactgcactccagcctggtgacagagcgagactccatctcaaaaaaaaaaaaaagaaagtatattcagccggcagagcctggtgatttgttactgctccgcttaaaattgctcatactcaaaagcagtttgtcagggttttctgtgtagagctgggaacagtgtgctactggcatctggtgagcagagaccatggatgctgctaaatatcccacaatatgtagaagaggcgccctcctcggcccccaacaaagaattattcagccgcagataccaatggtgcccagactcagaaactctgctctagagcaaagcagcatctgcactgaatccagacatttcatataattccctgagctctggtctatcttgcttgtcttaacaaacacatgctggccaggcgcagtgcctcatgcctgtagtcccaacacttcaggaggctgaggcaggagcacctcttgagtccagttgtttgagaccagcytgggaaacatggcgaaaccccatctctaaagaaaatacaagaattagctggacgtggtggcgtctgcctatatatagtgccagctactcaggaggcggaggtgggaagatggcttgagtctgggaggtcgaggctgcagtgagccatgattgaacccctgcgctccaacctgggcagtagagcgagaccctgtctcaaaaacaaaacaaaaacctaaaatcccctactgacctccctctgttatgttctgtcaagatatacctcaattcctgtgactagggacgttggaaaggcaatgttttaaaatttattttgcagtctttgattccaaattgcttatatcttagaattctttcccttcatgacttttgtccgttgttcatttccccaagtcacatcttgatggcccgcgctgtgagtcagatggcttttctgtagccaaggttatgtgcctggggacggcccttcaccccatcctctaraaaggcaggctttcagccccagaggtacttacagattgttaattcattctctttctccttttccaggcctttcataaagtctttatttccggaaaatctgcaggctgacaagaaagggcgcccaactactgccggaagcaaaataaaggttagttctattttaggaagtttatagattcttataagggctagcgctttctaggagtaaggaactgcacccctgggccaggatgaggtcagtgagacgtgaggaggtggttacagaagatgcccagaagtaacatcgctgcttgttacaaggttccaggatgcaagctgaatttgacttggctgtaccgaaaccttaaatggatattaagtacctcatagcttaatagtcagcagaygataatcagctactttctaagaggaaatggctttaaacagaacctggaagaatttatgttaaactgtcagagaaatatggttsggagccatgttttggatactgttgacagttkaccaggccaggcccaaaaacctgccagttatggaacgttacttgccagaaattctacttggtcttttaggggcaatttatgcatccctcctcactgggtcctacaggcctctccttgctgtgaattgaagacacatctagccacatggtgtctcaaagtctgaaggaaatcttacagtgtttctcaggaagtaggcagggttctgtggtacctgagccattacactgaattaagagtttacacttaattacactgaattaagagtttgtgggctgggtgcggtggctcacgcctgtaatcccagcactttgggaggctgaggcgggtggatcacctgaggtcaggagttcaagaccagcctgaccaacatggagaaaccctgtctctactaaaaatacaaaattagccaggcgtggtggcacgtgagtgtaatcccagctactcaggaggctgaggcaggagaatcacttgaaccctggaggcagaggttgcagtgagccaagattgcgcgattgcactccagcctcggcaacaagagtaaaactccatctcaaaaaaaaaaaaaaaaaaaatctgtgtcagccagatgtagtggctctggcctgtaatcccaacacttttggaggccgaggagggaggattacttgaccccaggagttcgagaccaacctgtgcgatataatgagaaccccatctctactaaaaataaaaatgaggtgtagtggctcacatcttatgctctcagctacttgggaggctaaggaaggaggatcgctttagtcaaggaagtcaaagctgcagtgagccatgattgctccagcctgggggacagaacgagaccctgtctccaaaaaaaaaaaaaaatagtttttgtcattgtgtcacacacaatcatgtaactstaagaaatactcactgagctattttttaaaatcatactggttaagaataattttttttaaaattataccagctgaatacttcctcagttttacaatcaaaggaatggttgagtgacagcagggctttgagtttgctcgcctgtgttcgaatctcagctctggcttttcctcgctgtgtgcttgccaaggtgttacttacgctctcagtgccctcaccgcttccctgtaaaatggagtctatcttaagagtctatcttaagatattagtgtctatcttaagagattactgtgatgattcagcttcataattcattggaagcatgtaacgcagtgcctgaggcatactgaacacaagrtgtatatgtatgctctgactacattctttcccattagcccctttcctgtatcgccgttgttggtctctgcttaattgttgtttttttcttttttgtaaagttggggtgtcacaatgtcacctaggctggtcttgaactcctgggctcaagcgatccacctcagactcccaaaatgctaggattacaggcacaagccaccgagtccagcctgggctttcagctgtagggtagagccctctgagcgtcaagaacatcatgttgaaagaactagagacatttagtagcctcaggacagtccctgggttaggctcactggggcagattgctgaaggcagaaaacaaatgaaattctcatgaggcccagatattaatgtctgcgtgaagtgtctgactcatgcctttactgcaaagtcctggataaggattaactctgggctggaaaatcgagtcataagactgtcacattcagatccaaggggcccagatcatccaggttatgatgactcattttcaagtggtctggattattgtctataaaaaggagagcaagggtagggacactttttcctccttaaagacttgtcccctttctttccttcgtatgcttgtctggttgaaggctcaaagtgccaccattgtgggatgtttccaaaatgtttaggtttacaagtctcaggcccttgtctagggaggtcaagctgaagtcagcagtttacctaaagagagtacagcatgttttcccacctccaggcacaatctccttggtggatgttgtgacctctgtctgcctggctgtctgcctccacgtaggaataaaagtctctcccagtacctcttacagatacatagccatggcccaatcgctgatacgttccatatctacagtaatttgcagacatcattgtcatcttaacgatgtccctgaggcgtaagcgtttaaaaggattctgagttccttgaaagaaaaattaaacttgtgttcaaggtcatcgtagtgttatagatttcattatattctaattatttaaaaatttaaactgatttgtaggatttaactaatagaatattcatttgatgggaactcttattatattgattataaataaaagtataaatatagtaatatttaatagcatttgattttgaggttttacttaattcgatattgtcgtgtctggaagggacaagtacaggttgagcatctcaaatcctgaaatgctccaatgagcatttcctctgagcatcgtgttggtgctcaaaaagtttcaaattttggagcattttggatttcagcttttcagattaggggtactcaactataaagtataatgcaggccgggcacagtggctcatggctgttatcctagcactttgggagaccgaggtggctggatcatttgaggtcagtctggccaacatggtgaaaccccatctctactaaaaatacaaaaattagctgggcatggtggcaggagcctgtaatgccagctactcaggaggctgaggcaggagaattggttgagcccaggaggtggaggttgcaagtgagccgagatcatgccactgaactccagcctgggcgacagagcgagactccatctcaaaaaataaagtataatgccaatattccaaaatctgaaaaaatccaaaatccgaaacacttcccttcccaagcatttcggataagggatactcatcccatatttaaattagagccaaagattgatgctacggagaaacagaaccaagctcagaggtggcaaaggcagactggctatagctttatctgagtgcagctggagctataagggacatgacagaggaagtacaggcatcatgcaggtgattggattggttgggggtttttttggtttgttttttttttgttttttttcttgagatggagccttgctgtgtcacccaggctgaagggcagtgatgcgatcttggctcactgcaacctctgcctcccagattcaagcgatcctcctgcctcatcctcccacgtggctggactacaggtggcaccaccatgctcagctaattttttggtattttttttagtagagacgaagtttcaccatgttggccaggctggtctcgaactcctgacttcaattgatccgcctgcctcagcctcccgaagtgctgagattacaggagtgagccgttgcacccagcctgattgwttgttttttaatatgtatttcaatctctagattaaattagaggtcttctagttcaacctacttagtttacagatagagaactgaggaccagagaaatctagtgattagtcatgtaacttgcaaataaaagtgccaggacccacagtcaggcctgctgtcatctctgttgaaggtagaatgaggagctttcaccctgagccgtttctcactgtgctgtctgcgtattttaacacctgcttctgttgagcaagtgctgttggtacttttctgtcctaactcaggaacccttcttggctggaatcaggattaaattcagttactgcttcacaaccacctcagcagacatcttaagttgacccaaggttgggcacagtggctcacacctgtaatctcagcactctgggaggccaaggtgggaagattgcttgaggccaggattggagacgagcctgggaaatatagtgagaccccacctctacaaaaattttttttcaaaaattagctgggtgtggtggcatgtgcttccagtcccagctacacagagggctgaggtggaaggatcactcgagcttgggaggccaaggctccagtgagctgtgatcatgccactctactccagcctggacaacagagcaagaccctgtttcaaaaattaaaaataggtaaataaagttgacccatagctattgaaatacaggataattttgatggttaagatgtatttctgtttgctgaaattaattattcacagcctggtggcttctgtctaatcctacctcaaccagttaattccttttatatcacactaaatgatcccatctctttgtcagcaaggcaggataggattgttgccaaagaacaggcttggtagcccatgggcgtgggttcaagccttacttctctttcatgcaaattgtgtcatcttgagcaatactttgtttctttaaggcccagctttctcatctaaaaaacaggaataatattaaatagtagccacctcttcaggttgttgtgaggcgtaaatgagataatacatgtatctaatctgcactgcaaactcagtaaatgttatctgtcactattttagctggagaggactatggcaagtgacttataaacttaagttacacttgcctctctatgttttcttatgctgaggtgaaaaagaaggaatgctgttaaatacttaggacaaaagagtttgcaaagttattcttggaaattaaaagttgtaggctggrcacagtggctcacgcctgtaatcccagcactttgagaggctgaggcgggtggatcacctgaggtcaggagctcgagaccagcctgaccaacatggtgaaaccccatctctactawaattacaaaaattagttgggcctggtggcatacgcctgtagtcccagctactcgggaggyggaggcaggcgaatcgcttgaactcgggaggcagaggttgcaatgagcagagatcacgccactgcactccagcctgggcctcagagtgagactccatctcaaaaaaaaaaaaaaaaaaaaaaaaagtcgtaattaaatacaaaactaaaatctaaaaatgaagtttaaaaaattaagaatttggggattttaagaacaaaaaaaagctgtgctatattcaaccctgcagtccctctccggctccacctgatgtgttgcaaaaatcatcaaatttgttctcaagtgcagtctgcatcatcaaagaacataagaggcaatttactttttcatcatagggctttgctttgatcatgcaacctctgcagccctgtctgtcctcaatttcaagcatcgcaaagaatgctatttcctgcacatctaaacagagaacttaattcaccaatgaatatcttgctttgaatatactcaatagtttttctcaagggtttcagatttcccaaacccatgaaaacagaaaagtcctaattgagacagggttgtgtcttgcaagcaaatctcttctgctgactgtaatggttttctggctttggaggtcccttttggctttttttcttttagaggttttctctctttaggctgctttgcttggaagtggagttcgcatgtgtgccacatccttggacccacagggtgtgctcagctgtggggtgggaatgctgatgtgagctctactcctgtttcttcaaacaaagtttgagattctcagggtttaaaatacttcataagcaatttcagctttatgtggctttttctgcttgaatccagttctactttgagtacccagtgcacaggcattaatagaaggttttatatagaatattctagatttgcaaagaagtaagttggcagccacagataaagtgttcagactctgcaggtttttaaatggccatattgaggaagaaactgaatgaaatggaatatcaaaagtttataaattctcagatttttatgaatctcccattctttaactatgaattttcatcactttagcaaagtgattcttcattagttggattgccagaaaagagagtgtaggggatttgatgatttatccttacaaataattttgggggaaaaaaagttaatgagaacaatatatcttcaaaggcgctctatcagcataaaatgaacttagtttgttaactgacatgcttcactgtaccacctgaaaatcattttgtatgtgaagatttattgggatttttgttttttgttgttgttctattttattaactgtactgaaaatgcctagttgcttttgaagattgaatttcaaacccatttaggagtgataaaatcatcataaaagtcggcaaasctttcggaaagtttagtagacctgagttatgcttaacgagcaaattgtcatgaagattaattcctagctatgtatttctacaagagagttttacaagtctcctttgaaatttggtcttctttagagaaagttccatgattctgatactgttcttcctttctagaaacaagccaatgaccttgtgagcaccctgatgaaatgtacgccccactacattcgctgcatcaagccaaacgaaaccaagaagcccagagactgggaggaaagcaggtatcgggggaaaccggcttaggtggggccgggacctttttccctctgctcaagatgagccgtcctccatcacaggcaggagcagtgtcagttgtccgcacatgtctttgtcatgcccttgcatcttaactttttcaggacaaaagctgtatactgtttcccctccgtgtcatttgctaaaatgttagcagtgccattcatttcagcattagcagtttataatgttgatcttggctagtctgggggcagatggaaaaaaaacaaaacataacctcataccgcagagtcatgatggttttaaaatcagtttgaggttctgtgtagacattcttagtccacccagcccctgatcgggacccacaggatgtggcctagaatgcttagcttggggtggaaagtggagggcgtaagagctgatggaaatacaatccagcatttgctgtgcstcgtgaagacactggggacaagctggaggctctggcattccccctaagcaccgtattgatgagaagaacgactctgggaggaaagatgtcaaagggaaatgcagagcacaagaattcagcaaaccctttctgccctgacttccagtgaagcctgcatcactgttcctcccacagctaggatttagggaagtggcctgggcaggaagaaatggcggcattgaggaggagcctgttaaggtggtggctagagggtatgaattttgtggccckctgggagacccagacacacattgttcagaggcctgatcccactgtccatagaagcatgggaaggagggagagacttaaactacagagaggaccctagccatcgtcacctagtatcagtcccaggatgggagcctaccagaattgctacctcttgtcttctctcttggagaaaagaaggtaggctcttttaggtgtcgagtgaagaactccaggtttagcttccacaggaagacaaggactaaaattcctagctgccgattatctcctgcgagggacaggtgtgtccattttccttcctgccagtaagatcctaaaccatggcagatagatgatgcctgatcctttacaggaggaaacagatccatagtaagaaaaacacgtaggtcaaacatttactgtctgaaagttcgttctatttaatattgaatacttcggcatgcagtctaagtctgttctctcctctgaagaagccaggctgcttggatgtaagagctgccatcttttcaggccactatgttctgaataatctcatccatagatgcatattcttaaggattttttttttttttggagacaagagtctcgctctgtcacccaggctggagtgcagcggcatgatcttggttcactgcaacctctgcctccyggtttccagtgattctcctgcctcagcctcctgagtagttgagattacaggtgcccaccatcatgcctggctacttctatatttttagtagagatggggtttcaccatcttgaccaggctggttttgaactcctgacttcgtgatccaactgcctcggcctcccaaagtgctgggattacaggtgtgagccaccacccctgaccscttaaggcatcttttctattgaatctctgaaatttttcaatttaatgtagtcagattccttctacaatattgtccgttaatgatattcaggcccggatgaggagctcatacttgctaaggtgaccagctcttctttggtcaattcttactttaggaggctgtacagtccttctctaggtcacttttatcctaatcccaggttttcaatctgcgataagaatcattctcattactttgccactggacaccttttctgttagttcgaggtgaccgtcgtgtttctcttgaatcttctcttctacaggttaatccctctcagttccgtcaacagtttctctaggacatgaaatataagcattccccatcttagcccttctcttggaggtacttaatttggcctctgcttttctgaaatgtatagttccgcttctcctttcagactaagagggtagcagcattgtcatctcttctcctctaaagatgtaaaatgcttacacccaggagtttgaggctgcagagagccatgattgagccactgcactccagcccagctgttagagtgagaccccaagtcaatcartcaatcartcatacagaaaacatcttgttttgctctcttacattggttcccatacttgagcctgcctcaggatccccaggaggccttgttaaagctgagattgctgggctccatcccgagtttctgatgcagtgggtctcaggtggggcccatgaatgtgcatcttaaaaatcttgcaggtggtgctggtgatgatggcccaggcactgcactttgagaatcactgatctagagcaaagaactagactgtgtcccggtgctgacctatcactaagttgttagagcgagactcttcatctccttagccctcagttccttcctcttaagagggtccatctagaataggatctccttcagtctgacagaatgaaggcttccagacagtggctgtcagtctgcctctgtctctgtcacttttacactcacctctcacacatacccacacttgtacacccacccacacatacatccacatgtacacacacacaacagaacagtgatattaaatcaatatcccaatatgattactccaaccaaatctttagtcaaccttagaaataaaccatgagagtcttggaagcagaggtattgccaaagggggccttagcccaccttcccccatttcaaactctatccacctgctcttcccagcaaatactcttaaatgaaaacatctcacttgccctacaaatgcattttgacagtcttggaaaaagactccctctgcaagacggagttggcatagcctagggaacaactgggcattgtctgatcaatgccccctagcacaccctcctctaccccacgtagatagttctactgaaagcccctctaaaatagaaattttgcaatagctgcttggaagttcaccaaccctgatgctacttccttgtaaaaatccaacataattcattggaatatcagaaaatggagaaattaaatgagtggtacattttattcagtaaatcctcataggatgaggatggtattttctcttttcttttttttttttttaaatgattcccctttgaattgcagcaaagaattttatgacatgcattcaaataaactggttttaagaagttcaaggtattagttggtcgagcgttgatttataattccagtaagaccgctttctgggattccacccttaatcctggtttgggtttattgtgtaacaaatggtttcactccatccatgagtcaggagtgttagggtccgtgaaagggcagtgtgcttcactggctgggattacacacccagttgaagctcctggtaaagagggttactcattccacaagtttatgaggtgtagggtttttcttttcctgttgcaaatgcgtttttgtttggcttctggcaaggttgcttgccctgcattctgaattgctgccttgcagagttstctagccctgatcaatttgagtaaacggccagggacagtcttggaaaaagactccctctgcaagatggagttggcatagcctagggaacaactgggcattgtctgatcaacgactactgaggaggtgacagtgctccaggaatatgcaaaaatcaacttgtgtcgctttgatgacccccaaattttaaacattacaggacttgctagactcatttctaccagaaaatttcctgatggtggaagttataatgaatgaaacaatgttttaacatgaggaatattccttcctatgtgattcatgggagaggaacgtttctgcttgaattaatgggtgatgcattccctgcctcgaaagcttggcgtgaagccagtgtttatgaaaagtactttaaaatgagcagaacctttaaatgcatttttcatgcatttttytcactagagaaaaggccagtggcgagttttagatttggagggtgagagaaaggaaaattaattatttttcaatttaattacctttttaattgacatgacatttctttctctctctctctctctctctctctctctctctctctgtctctgtctgtctgacttatatgggcaaaggtggatatttagtacagacggggtttcactgtgttggccaggctggtctcgaactcctgacctcatgatttgcccgcctcggcctcccaaagtgctgggattacaagcgtgagccactatgcccggcttaactctttgcacacagaggctttctgaaagttaataatcttagaggaatcaacatttctggctcttggctctgtaagacccatcaaactggagactcttaaacaccactcccattgtgacatccttcccatcagccaaggttgcacccccacttcgagcttcatctgtccccctcctcctgtcccacagcaccctgccactggcctttcctattcttgtacctttgctttcacagccctctgccttgtcctgtatacctcatggattcaactcgcccctccaggcccaggcacatcacagtgctcctgagaatccctgtgctgtgaaaaatccacttccttctctattctcctatcctggtttacatattgtagctgggaatggatgacgataataacagctttacatgctcgtgctacgaactaagtgctttccatagaaagtactcgtctagaaataaagaatttatgccaccattcctgtttttacagaagaggaaactgagaggcacagagaagttgcatcgtggcagggccagtggcgcagcaggaatgcagcaccagaacctggctcctaaccactgtgctgcctgtgtgggctccagcaggaatcatagcattgtccttttttggtgaccctagcatgttgcaataggcactgtgtgtgactggcccacagtagacatccgcaagtatgagacttaattggaaatggtggtttttgtgagagccttactgggaagacagctgttgggaacctgcgtgacatcggaatgaggatgcttctgattgtcttttcagctcagcagctcctgaaaggcccattttgctgagcgcattagccccgttatcagcacagatatccccaaatgtaccaaacagggagtgtgaggagttacctccctactgcagcacaatcctgacattccatcttcgaaagagagagaccttactttttatgtctaatttgcctcaaataccatgtttccaagtgtctggttcagccagctcgcgcagcacgcagcccaggcccaatttatcttcccagagtggatgatctgaagcaagttttcaggatctgtcggcatccagagcactgtgttttccagcaagtggtgggttttcacaaggcacatgtccgtgctccaccttagacccagcaggtgtactaaaatagcctccccaaggtgcaggcctactaaatcagcatccccaaggtgtggggcatggggcatcttctggtatgaaaatcctcatgtgtgagaatattaacctaatagttctttacatccattttttcaaaagacattgctagatttttactgttaagaaaccaggatgggccaggcgtggtggatcacctgaggccaggagttcgagaccagcctggccaacatggcgaaaccccgtctctacgaaaaaagacaaaaaattacccaggcatggtggcacatgcctgtaattccagctattcgagatgctgaggcaggagaatctcttgaacccacaaggcggagtttgcagagagccgagattttgccactgcactccagcctagatgacaaagcaagactctgtctcaagaaagaaagaaaagaaagaaagtttgccactgcactccagcctggatgacaaagtgagactctgactcaagaaagaaagaaaraaaagaaaaagaaaggaaagaaagtttgccactccactccagcctggatgacaaagcgagactctgtctcgaaagaaagaaaggaaagggaaagggaaagaaagaaagaaaagggaagggaaagtgaagggaaaggaaaggaagaaacacgccgagtacagtggctcatgcctataatcccagaactttgggaggctaaagcaggcagataattgagttcaggagtttgagaccagcctgggcaaagtggcgaaaccctgtctctccaaaaaatacaaaaattagccaggtgtggtggtgcatgcttgtagtcccaactgcgcaggagcctgaaataggaggatcacctgagcctggggaggtcaaggctgcagtgagctatcacatcactacaatgtagcctggatgacaaagtgagaccctgtatcaaaaaaaaattcttgtaagaaagaagaaatcaactaaaactataatttagatatattttagaccatttttaatgtacacacttgaaattaatagttttaaatgcccttttgtaacttgtattagaaaagcctagaagtgtagttccattaagtcataatcaatattaaaatttaagttcaataacaaaaccagcattagcatcatttaattcaaaagttaaaagttctttcctttagccttctgattaaccaatatttttgttcatactctaggtgatagatgggtctttgtgttactgttattctttgaaatagatatgtaatgccctgttatttaattgctgtatttttatttatttatttatttatatttattttatttctgagacggagtctcactctgtcatgcaggctggagtgcagtggtgcaatctcagctcactgcagcctctgcctccctggttcaagcgattttcctgcctcagcctcccgagtagctgggactacaggtgcgtgccaccatgcctggctaatttttttatttttaatagagacagggtttcaccatgttggccaggctggtcttgaactcctgacctcaggtgatctacccgcctcaccctcccaaagtgctggaattacaggtgtgagccactgcgcccagcctaattgctgtatttcaatatttaaaaattagcattatgtcatctgagaggtcagctcagtgtttgaacactataaattgtagtcttctgaatatgtttccctacagcttggaactgggggcttgggggttggctggtaagaacacgagtgaaaggattatccagtaatgtccaggccccattttctcctttgcacagggtaaagcatcaagtcgaatatttgggtctgaaagagaacattcgagtgagaagagctggctatgcctatcggcgcatcttccaaaaattcctacagaggtaatgaactagtgactctggccttttttaaaacaggtttattgagctataattcaaatctatacaattcacccacttcaagcgtacgagtcaatggcttttaacgtattcacagagttgtgcaactatcaccaccgttaattttaggacattttcttaccctgaaaagaaatcatgcttccctttgttgtcaacctccaattctccccttgcctctgggcccagtcagtcacttatctaccttctgtctatagatttgcctatgcttttcatagcaatggaatcatatatgtgtcctctgtgactgacttctttcactgaacataagattcatccatgttgttgcatttccatgcttccttcctgttaattgcagaataatattccattgtgtggatataccacagtttacttatgcattcatcagttgataaacgtcagttgtttccacttcttggctattatgaataatgctgctatgaaaatctgtgtacaagtttttatgtggtcatatttcatttctttcgggyatatgcttcaaagtgcaattgcttggtcatatggtaactctgcatttaacctttgagaggaactgcctgattgttttctgaagtggctgcaccacttyacattttgtaccaccagcagtatttgaggcttccaatttatctaaatccttgccaacataagttattttctaaccatcctagtgagtgtggagtggtatttcatgatggttttgatttgcatttcccagatggcaaattatattgaggattttttcatgtgcctgttagccatttgtatttcctctttggagaaatgtctgtgaggccctttgccattttttaattgggtgttttgtctttttatcattgcattgtaataataattcttttactgttatttattgtagaataaatcagtagccataagtattcattaggctgtctgtttagtgtaacacataagtgcaagaattcttgataattgtgccacaggaagagcggaggtttaacttgactgaataaattaacagtatgaagacaawttcaggaaaatgtttaacccacttaagacaataagcttaaaatatttaacctcaaaaattttgtacaatccatgtataaatttaaacttatttttatatatcccttaacatgtatttggcaggacctatacttaaattgttcttattttgtgttgtttgtaaaaggataaaatgtggtacccttaaaatgttacatcactctaacttctctaatgattctgtggcgttccactgtatttctacatctatttaatttccttgaaggaatagggaaacaaaaaagaagtaagccaaatgtagtgttttatttatttatttagagacaaagtcttgctctattactcaggagtgcmgtggtgcaatcataactcactgcatctttgaactcctgggctcaagccattctctcccacctcagtctgcaagtagctagtactacaggcatgcatcaccatgcccagatgactttttacttttcgtagagacagggtctcgctatgttgccccagctactctcaagtgatcctcccacctcaacctcccaaagtgttgggattatcagcacgagcgaccacaccgcgtcaaactgagcattttaatcagaaacaattacatcttcctgatatattatgcaggggctggatataatgtttttttttttwaaattcagattgtatataactgaagaagaagttaattactgtctttggaatctagtatttctaataagacagttcttatttagggctgttgtttcttctgctatgagattaggacagcygactcaccatttagaggttttaaaaaagagctaatgattttgtataataaagcgtcagaaactcagtcccccacatttgagtttcctaataaccgtggaggtgagttagactaggaacaaggtttaccctctttgttctctgaattaaagacgtcagtacgcctatagtgtaagcaggactatgtgaaagaaatatttaggaagttgagaaaaggtatttgtagagcttttgcatcacatagcaccacccatttgctgacacacaactgagatgttagttatgagacttccttaaacagatcagtaacactagctcagaaaaggttttctcaacctcagaccactgacattttaggctggaagattctttgctgcgaagtctgtcctgtgtattgtgggatgtttagcagccttcttggcctccacccactagatgccagtagtgtaccttcctctgagttgtgacatccaaaagygtatccaggcattgactaatgttccccctacagggcacagtcagttgaggaactttggcttagataatcatttttaaattttatttatttatttattttagagataaggtctcccttggttgcccaggctggtcttgaactcttgggcttaagcagtcctcctgccttagcctcccaaactgctgggattacaggcatcagctaccatgcccgaccccaaaatacccttttttaattaagaggggccgggcacggtggctcacacctataatcccagcactttgggaggccgaggtgggcatatcacctgaggtcaggagtttgagaccagcctggccaacatggtgaaacctgtctctactaaaaatacaaaaattagccaggtgcagtggcatgcatctgtaatcccagctgcctgggaggctgaggcaggagaattgcttgaaccagggagatggaagttgcagtgagttggcatggcgccattgcactccagcctgggcgacagagtgagactccatctcaaaaaaaaaattccacacagcaaaggaaacaatccacaaaatgaagagacaacccacaaaatgggagaaaatctttgcaaaccatccgacaagggattaataaccagaatatagaaggagctcaaacaactttgtggggaaaaaatctaataatccaatcaaaaaaatgagcaaaagatctcaagagacatttctcaaaaaaaagacatgctgatggcagacaggcatatgaaaacgtgttcaatatcattgatcatcagagaaagccaaaataaaactacagtgcgatatctcacctcagttaaaatggcttttacccaaaagacaggcaataacaaatgctggcgagaatgtggagaaagggaaccatcgtatgctgttggtgggaatgtaaattagtataactactatggggaatagtttggaagttcctccaaaaactaaaaatagagctaccatatgatccagcaagcccactcctaggtatggagccaaaagaaaggaaatcaggatatcaaagagatatgttcacgcctgtgtttatggcagcactattcacaatagccaagatttggaagtaagctgcatccatcaacagacaaatggataaagaaaatgtgatacaggctgggtgcagtggctcacacctgtaatcctagcactttgggaggtcaaggtaggcagatcacttgagatcacaagttcgagatcagcctggccaacgtggtgaaaccctgtctctactaaaaatacaaaacttagccaagtgtggtgtcccatgcctgtaatgccagctacttgggaggctgaggcgggaaaattgcttgaactcgggaggcagaggctgcaatgagtgaagattttgccactgtactacatacaacctaggcaatggagcaagactgtgtctcaaaaaaaagaaaatgtgttacacatacacagtggagtactattcaggcataaaaaataatgagatccaggccaggcgcagtggctcccacctgttatcccagcactttgggaggccaaggtgtgtggatcacttgaggtcgggagtttgagaccagcctggccaacatggtgaaacctcatctctactaaaaatacaaaaattagccaggtgtggtggcgcacacctgtaattccagatactcgggaggctgaggtggaaggattgctggaacccaaggcagaggttgcagtgagccgagattacgccactgccctcaagcctgggtgacagaacgagattccgtctcagaaaaagaatgagatcctgtcatttgcaacaacacgatggaattggagatcattatgttaagtgaaacaaaccaggcacagaaagacaaacatcacatgttctcacttatttgtgggagctaaaaattaaaataattgagctcatcaagatagagaataaaatgatggttaccagaggctgggaagggtagtgggggaaggggaagggaggtgcagatggttaatgcatacaaaaaaatagaaagaatgagtaagacctagtgtttcctagcacaactgggtgactatagtcaaatataatttaactgtacattttaaaacaactaaaagagtatagttggatttcatataacacaaagaataaatgtttgaggagatggacaccccattttccatgatgtggttattccacattgcatgcctgtatcaaaacatctcatgcaaaaagtaaaaaagaaaaaaaatctcatgcaacccataaatatgtatacctactatgtatccaccccccmaaaaaaacttatcagtccaggtgcagtggctcatgcctgtaatcccagaacactgggaggctgaggcaggaggattactcgagcccaggaggtcaaggccacagtgagttagcctgggtgacagagcaagactgtgtctcaagaaaacaagaaaaaaaaaaaaacctgatcaaaccttttttaatctattctgggtttttttgtttgttttttgagaaaccagttctgaaagacctccttccttctaccttgttttaaaaaccaaccaaccaaccaaactgacttccataaacaatgctgagagtgctgccatctcaggagagcaggaagtctatgcactctttttcccgtctaaggcaggggtccccaactcgcagcaggggaccagtactggtctgtggcctgttaggaactgggccttacagtaggaggtgagcagcgggccagcgagcattaccgcctgagccccacctcctgtcagatcagcggtggcattagattctcataggagcacaaaccctattgtgaactgcacgtgcgagggatctagcttgtgcgctccttttgagaatctaatgcctgatgacctgaggtggaacagtttcatcccaaaaccatccccacaaccccgtccatagaaaaattatcttccatgaatcctggtgccaaaaagattggctggtgtaagggaccctgtgatacgtgcatgaggtgtgaactgactctgttgattatccggatctgtctcgagtgccatgccagcttcatgattccatgctgtactttacgctgtgccgcactctgagtaggcattttgtgaaatttgttattccttttatgttgaggaacttccactgaaatgcttgtatccttggatgcctcccttagctctcctgctgtaagcttttcctttcagaacagacaaatagccttgtctctattgtcaaaaagtaggctcttttattgttgtcatacttttcttggtttgagaatactggggctgggcaagatggctcaatgcctataatcgcagcactttgggaggccgcagtgggcagatcacctcagatcaggagttcaggaccagcctgaccaaaatggtgaaaccccgcctctactaaaaatacaaaaattagccaggcatggtgccgggtgcctgtagtcccagctactcagaaggctgaggcaggagaatcgcttgaacccgggaggcgcaggttgcagtgaaccaagactgcgccactgcactccagcctgggcgacaagagtggaactccatctcaaaaataaaaataaaaaaaaagaatactgggaggagaatcaaagtttggaaagaaattatttttctataaaaaggacattttcaatcccccacactatatttcaaaactgttattgaagcagtccactcaaaagtggcttgaagtcccactatatcagtgggcgggggtatttctctggagagaacacaattttccataagacgcatgagtctgggatcttggtcatgcagaattcatccagagtccaccgccaactgtctcatcctatgatgctctacaagtaattgaaccatctcataactttattttctctaaaggtgagaggaaaggctttgtttataaaattgctctctaggtgtccacagaaaggctgccaaatgagaaacacaaagtaaaagcctgaagggaaaggatatattaatacccagcacaactatccacatctgcatgtattatacaccctccctatataggaagttcacaggcctaaacagagccatggctcacagactacccagagcatagtgtttgcttaggaaatattctgtgtgtttagtgtgtgttcgtttcctctctggaaaatcctttatatttatcaaaaccatccctcttgactgaatattggagagcaaaaatcaaaagatgccttaattcccccatgggtgggccccatgctcttgaagtaagtgctgtgctacttgaagcagtagtaggaagaacccatttacaccatctccccactacaacttttatgccttcagaaagtgttaaaaaactgttacaaatagccatgttgtgtcttggaaaataagttctccagaaaacacctctctgagctaggcaatgtgtgtttctttctgtggttggcagaaataagcccaaatacagattctgatgcttaggaggaagaatgtggtagaaacataacagatttgcaaagtctatcttgtagcatgatttacacttcctcacaagcatgcttcctctgaccttagcctctcagaatgtggggatgataaagggatgcctcatcagcaaaggcgttccacttcacgggcaagagagaaggaggaataggaagcccaggaaagcacggagtggtggagagcgtyctcctggctgccaggatgtttgtgtcctccgaggtcagaaacatccttaatctcaagtgccagcagctgggagtccctggggtcccagctgcatttcctctgagaaggaaacatgggatcagtgatccaagagatmacaagagcagggaacagatttccaggcagaaagaggagctggcacaaaggccttgagaggaaatattagcatatttgagtcttaaactgaaaatatgtgatgaaaggaatgtaagctattattgccatctgtccaaaattatcacaggcaccagttaggcaggggcaccattgccctgtgcaacctgttcccaygagtatatcctagagaaagagagtggcctgggtacacttggtaggagaacatgtrttgttggtttatgccctggtctccagtgcgataccaaaggatggggtgaggatgtatcaggcttcatggaagcaaaggaagccccaggcaattcccatgtattgccaagaccctcaacactggaggccttgtcaggataagggagagaaagtctctgcaaggttcgttaccattaaaaaaaaaaaaagagaaacgcagcattaattttgtaggaaaaaatgtgaattgccataaagacccatttccagttgcacgataaatatactttagtttataattttaggttagatcaagccaagcaaaactgtactctcagaagcttgtcaccttgaaagtctatagtcttttccttctcacttctaccctccatgaactttctgcctcacccaattagattcctagcacctactcattttcactaactcccccaatcacatctagacaggttctgctattagtcatttatgtgtagcttaatttgttttaattaacatccttataacatatatgaatgttattcatgctaatgtgtgacttccactaggcattttcatttttaagctttttatctctaattagggaataggaggatttacctctctaggaagtttatgatattatcaggcaagatgcagacatttgagaggagcagagaaggctcctaaaatcacctgagtcgcaaccagctggcagggccactcaaggttcccttctcccttggctgtcataaatcagtctaatcgtgacagtagtttctgggaacaaaggagggccctggcttcgctcaaggcctgggggcctrttgcctgggccctggatgtgctctcacgtgggccacgccctccaacttcacacccacacatacccatgatgattctatccatatttgacaaactgtaatgtgtttgtctctccttgattatatcagcctctgacataatagtaatgtttctaacataggcatgtatagtagactggataatctttaaaagaaatatttaaatgtgaaccagtccatggcttttttacagtgccatcatgaaagagacagagagggattcaaatcccatctctgacgcttaatggctaagtagccttgggcaagtcataatttgcctctgtctcctactctgcaaaatggaaaaccaacctgatcaggttgctgtaggagtaagaggagatcgtacatcaaaagcttcaatcacagcacctcatgcagagagagcacccatccgcattagccaggaatgttcattatgactgctgtgtgccaggcacggtttaaggctctggatgtacagcaggagccacacagatgtggcatccggtctcctggagctctcaccttcatctgggaggcataaattaaccaaataaacaccaccgtgaatataactaccaattagagtacatgctctgaaggaaaaatagtacttgctatgagagaaactaacaagagagcagtttttgatttttggtccaagaaggcctgtctgggagtgtcactgaaggtgagacacccaagcgggagccagccgagtgatgagtttggggagcagcacaccagtagaggggagagcaggggcagaggcgccgaggaaggaaagggcatggtgggcatgaagaagaggccattctcgaagaaatgcagcaagccaaagtgagaatgaagaggcgaggctggagaacagccaacgaccagatcccaagggcctcgtgacccagatgcacagaatttcaaaggtgaaagttgatacacagttgtcataatagctgtttagcaggagctttataaaactctttgcattaagtgttaaatgccctgaagaagtcaggggagatgattattgagacaagaccgtttgatttttgcctaaagaccacccctggtggccttccacaatgctattttcagacagtggtagaaagagtacgcaggttttcaccagggtgttgacgtgggaatgctgggaaagggaaagaagcaggaggcagctcgggaacgagcatcccagactcgggatttttgcagtcatcgcagtccacgcctgagccttcgaacgctggtaaacagatgatcagtaactttgcagcactgggcaccttcagagcagagctcttgctgccttgcccgggtagaaaaccagtgcggtcccgcccaagtgtgattctcttctccccaatgtccccacaggtatgccattctgaccaaagccacctggccttcttggcagggagaggagaagcaaggcgtcctgcacctgctgcagtcggtcaacatggacagcgaccagttccagctggggaggagtaaagtgttcatcaaagcccccgagtctgtgagtgcttggctggctctccactctcttccctcccgcggggcccccgccagccctgctccacccctcagctggcttctttttctcattcttcgcttcatgccatcaatgttgtctcctcaaagaagccttccctcccttcctggtctaagtgggtccttccctaaacacctgctctccatagcccatcactgcccggttcatttcctgcagagcactaagcagrtagaaaaaggggcatcagagagtggctccttcctcrctgactgtctcgctcctctctagctgctacactcctggagggcagggactctttgttccatatgtgtttatatacccaaagcctcacacagaaaatgctcaatagttacttartctctaagagtgtctaagctaaagagggacttcagtgtcccacccatggttagttgacaccaagtcagttacgcatagtctcaggattcctcctggaaggtgcagcagagtgccgggtgggaattcccaggattgtacctagaaggctgtgggggagcctagaaaggactgtgagggggaaaataggtgggaggagaaatctctggtttatagaacacagtacttaccagtaaggcattcataatacacatttacaattcacaaacagtctgctacagcttcatttagagacacttctttctttcctgatgagagtgtggtcagtgagccccatgaatgtccacaggaagttctgttcagttcttctgcccagtttgctccagggctgcggaataaagacattcattcctttttaagctggagaaactgctggaaccgaggctcagcatcatcgtttctcaaggctcccttaaccatcacaagacctatttcaagagtcagtgatgaacttggcagaaatcagtcatcagaccaaggggaaatcatatgggaactcacagtaaaaagggaagcatttgacttcaggcagatcccagtcttgccattagttttcttctcctctaaggtgggccccatagccactgtttctgcctgcctcgtaggatcagcctgagactcaggaatgataatggctataactgaatggctttgtgagacatcaagattattaaataaataagcggcacacagagatggaacccatttatgacacgtttgtggtagcatttttctactttgagttatttgtagcttcacaagaattttcatttccaaatataaagtgaaaatgttgtgtcattcgccattaagcaacccacagaacagttcctgttctttctaaaatgggatggagtgatttatcggtacaatgcagaactccttgtttcatacccgctgttacttttcaacttgtgaggttttcatatataattaaaacagcctcaatatttgtaatacttttttttctgcttcagttgcgttggagggggttatattcaaaatcaagatttatttttggctgtccttttccttgccttacattcaattgtgttattaccattatttgactctcctttcccccatctttgacacatgcactcacacacgcacaccatcacctccgctctctcccctgccccaaacgcatacatccccatctagccctgacatgcaaatactttcacaaaagttgactcttaaaatctggctgggcacagtggctcatgcctctaatctcaatactttgggaggctgagttgggaagatgacttgaggccaggagttcaagactgggcaagtcagttagacctcttctctacaaaaaaakttaaaattagctgggtgtggtggtacacgcctgctgtcctagctactcaggaggctgaggttggaggatcacttgagcccaggagttcaaggttacagtgagctatgattgtaccactgcagtccascctgggcaacagatcaagaaagaccctttctctaaaaaaaagaaaaaaaaaaaaaaaggaaaaagaaaacctaccatgtggtttcaccttaatagtaaatgttctgaatatacaaaattacctatttgctttaagaacccacatcataaccgcgcgcagtggctcacgcctgtaatcccagcactttggggggctgaggccggcagatcacgaggtcaggagatcaagaccatcctggctaacacggcgaaaccccatctctactaaaaatacaaaaaaaattagccgggcatggtggcgggcgcctgtagtcccagctactcaggtggctgaggcaggagaatggcgtgaacccaggaggcagagcttgcagtgggccgagatcgcgccactgcactccagcctgggtgacagagcaagactctgcctcggaaaacaacaacaacaacaacaaaacccacatcagacaccatagggtttgtttttgttttgttaaatgtatccatgtcttttggcttttctcatttaaggttgttttgtgtgttttcctgttgttgttktttggtttggtttggtttttattctctccttatctgtgttatcaaggttttttcttgaacctccctaatttctaaccccctgggcttttaaaaagaaatctaaaatccagcgaatctttgagatagtctctaggaagttgggaatcgtttgcctgttcatcctttctctgagtcacaagtgtattttctgtgatacgcccaaaatagttctgggaaagaagaaggaaacaagacttactcagaaacccaatacacaagataagaaatatcaatggatattcttacaacaggcaactgcagggctcagattttaaacattctgtccagttgctaatctgtgcattccacttggggtttagaaatctgtccttatgcctattgtttacagcactgaagccaggggaattacgtggyccctcccctggtgtttggagtttgagttgttgtttctgcacagatggatctgtgaggagagaagttgagtggcaggagaggataggtctgtctcccaagcatgcacccggataaacagagacaacaaatcaagcccagctgccttcaaaccacattggcttgtttacttctggaacatttttgcaatgactgttcatcatctttactttggatttttattggttgattttatttttttcctagagagtcatgtaagccactctcaaggtaaatgagaaggtttcctactattttacaagtggatcaagtgcagatttacagagaaagctttgcgtgtctaaatgaggaggagcctggcagagcctgaaagacctaggttcactttctagccccacccagtcttagttccartgttctcatctgtaaaatagagatgacagagtatgcggctcatgtagctgtggaggcgttgaatgaaactgtgtggaaatcatctagggtgacttctgccccatagtgggcactcggctcactacagctgtttgctgtcacctttatcattccaaggcctggttgaggcgcagcygtcagcattcattggtaaaatggccggactctcaagacctgctagaggctgatgtggtccctaaacagccccagcctttctgggcaaatgcargtcctcattaacacacctcacgtccagctccagtcactgtggttattatcctctgctccgctgstccttggtgaatcctgagattggtgaatcctgagacaggaagtctatattttcttggaactgaaagtagggcagccctccttccacagcagcacaagcccagctcctgcagaaactggaaaattctgtttagaggctgcatgcagaagtgccgcgccaaacaacagcaacagcctccacccactcacttgatctgacttcctaataatayactctttggatcaaggtggggaataagtggagaagcattgaatcgctcattcgattctcacagagactgtagcaaggcaggacaaggtctaactgaatacactcagattctcctatttcccattgttttccattaaaagaaaaaaaggtataggtcattttatagtgagaataaacaacatgccacagtaagcgtttcacatattcgttcatgaatcagagaagctgcttcccgtgtgtgtcattgtctaaactgagggtccctggaataacaagaaaagtgttgttcagggattggggcttggggcttggctcacatttgtcttctctccattcacagctatttcttttagaagagatgagagagagaaagtatgatgggtatgctcgagtgatacagaaatcatggaggaaattcgtggcccggaagaaatacgttcaaatgagagaagaaggtattttagcaattttgtttcattgattttaataaatctgaagagtaaattggagcttaagtgaagttttaagttccattttattttgcatataatgtcacgctaaamatattgcatcatttagagtttctttgtatatttccacagtattttcctcccttttctgactgacttatccttcttccatcttgaccctcttgggaattgtagcctcagacctcttattgaacaagaaggagagaaggagaaacagtattaacaggaactttataggggattatattgggatggaagagcacccagaactccagcagttcgtgggcaagagggagaagattgatttcgcagacacagtcaccaagtatgacaggaggttcaaggtacgtgctaactgcctgcctctgagatcaccaaacagattccttatttttttaataacttgttattttgcttttgttgttaccaaatcagaatgtgttcgttgtagaaaaatttagagaaaatacagtaaaccaaaagataaacaggcacctatgcccagaaacattcactgttaacattctgtgtatatccatatctttcagaatgtttttatgaaaacatacatttgcgtatttagttttacaaaaaatgagatatacattacatgctgttttatgtcctgaagtggttttttgtttgtttgtcttttaaataatgcgagaattttcgatagtaatacagttagcaatataagttattttacatggctgcatagtattccatttgacagatgctttattatttttaaccagtttctcatgaatcaatttttagtgagtttttcttttttactatcgtaacttcagtgagcatcttttcacacatctttgtgtatctatctgtctcctaatatttttagaagaaattgataggagtgaaatcgytgaatcaaaggattcagagtatcaagtaatattgcagagtatcctcatccattttcccagagtggctgataagtaaggcttttccagccacaggaggaacagttgatttttcacctcctcctttagataccttttgataaagtcttggtcctaatagaaaaatctgaagcttcagaagctcatggacccgttaagagcttttggctttttgccaggggcggggaggtcaagaaaaaaatttaacgaaataaacaacggaagcatgttttgctaaaaccaaaccattccttgcaacctgtgcatggcaccagctgctgtgacggcagccctggatgcacacaggggtgcttagctctcgcagcggtactcattataaagtggttacccacaaattcccaagtagatttctattagattattgagaattatcattcaaatgacaatatatcagtattttagaatgaaaattttatgaactcccaagaaaatatatgcagacactgcccyctgtttagaaacatgctgtagtgcatccttgctaagttcaccacaggtgttggtgactttccctttacacctgctgtcctgatatgtgaagtgactccatatgagtttgccagtttttaagtcaaaaagagtcaaatgtcatcattttttacatgtcatcctaataatcatgaacaatgccctctttcactgtcatggggcccggtcatgtgatgaatggaatggcctctcaacagtagtgaagattgactgtccaaggcagcttccccctgtcctggtaacagcagtccactgtgtgaattgttgtcatcacattgaccatgtctgtccacctttttttgagacggagtcttgctctgtcacccaggctggagtgcaatggcgcaatctcggctcactgcaacctccacctcccaggttaaagcgattctcctgcctcagcctcccaagtagctgggattgcaggcgcccaccaccacacccagctaatttttgtattttcagtagagacggggtttcaccatgttggtcaggctggtctcgaactcctgacctcaggtgattcacccgcctcggcctccraaagtactgggattacaggtgtgagccaccatgcctggcctgtccagcttcttaaagctcctctccttacagggtgtaaagcgagacctgctccttaccccaaagtgcttgtacttaatcggacgagaaaaagtcaaacagggcccagacaagggcctggtgaaagaagtcctgaagcggaaaatcgagatagaacggatcttgtctgtgtccctcaggtgagtagtggaggtgcagaggcaggactgccccttctcgcctcagcatcacggtcygctgttccaaacagccaggaggaaggccgggctgggcttcccagctgtcaaaatcatgatcaagagaatggaatttcccttystcccaaagggaagactccctagtctcagcaagtcttgatatgtcaggaagaaggtaccaagaaaaggttgcctccggacagctcctctaatcaagggggacccagatctcttgtaaccgaaacrtgttagaaatgaacccggtatatggaacacctcagagaataatttctcttgttgcagtagagccaaggattcagagccctgtcccccagtccacctcacccaggttggaggcctcacccatttccctgagcagagggtcctgaaagggaagtttctttgggacttccttagggagtgcaagttggtctccattctctgtagccctggagtcatcgtgagatgctctcttcgctccagttctcaggcagtggggagtggtgtttgcttccacaaggcctcaggaagggcccttgctcctcccggcagcaccttggcttcctctcggcagaagggctcctctgccggccgtcagcatctcctccgtcagtgggacctaggctaggggttcttagcataggaggtcttcccatgctaagaagtcctcccatgccaagaactcccagactaggagtcctcccatgctaagtcctcccgaagtcctcccatggtaagaactcctagactaagttccgctgacacaggaaatcctcgcaatccatgaagactaagaatggaagaaaggcctccttgagccccatagcttcctccaagaatcgtgtccctgggcctctgaggctaacactactttaatcaggaaaagctttgggcctttgcattaaagatgttctgctctcacatgaacatggaattgggaygcctgtcaaactcttactccacacagaaggcaaaactggtgcgctcaggaaaaagcaggggttttatgtgctcaggcgtctgatgtaccaagctggaaatcctagttccagtctgataatccaaaacagatttctagttgcatccattcttgcctgtgtctctgtggtttctgattctatctgttcctaatttccctggataaagggccaggcagtgcagtgcagtgaagtatttaaaacgtgccaactcaggatgtggtaaagttgctaagcagatgagtccgcagtgtccattttgcagccccacctcaggtaggtttcaaggctattgttttttttkttttttttttaaagctctaggcgctgactgattttctgaaggccttcctaaacattcagctcactggctgggtcccaacctgagcggggcagtgcctgctggccacactcttcctggctagctgggccctgaggctgccgtggaaacccaacaggaagctcctgctttgtttgtcattgcatggggccctgccatgcctggactaagccaggttggccacagcgtgcttggcaggcacagcaggtgaaagtcagggaaccacagctctagggtgtgtgtagtcgctgtgccgagagtgacttgttctttctgttattgcccaggtatgtcttcagtccctcagacccctggtggagtgctcatgactgggaccataaattatcctaattgagctacattkgtgtggttgttttgttttgttttgttttgttttgtttkagacagagtctcgctctgtcacccaggctggagtgcagtggcgtgatctcagctcactgcaacttctgcctccctggtccaagtggttctcctgcctcaggctcccgagtagctgggattacaggcctgagccaccacccctggctaatgtttgtatttttagtgagagacaaggtttcaccacgttggccaggctcgtcttgaactcccgacttcaagtgatccactcatctcagcctcccaaagtgctgggattagaggcgtgagccaccgtgcctggccttgagctacacttgtatcaagcactttgacacttactatcttattgataagtccttgagggggttgtcaagcagggactgtagggactgttcacactcaaatttcttccttttattgttttttgtttgtttattgtcttcttttacagcctctggggatataatctgtcatgggagcaccagcttctttttcttcttcctgttcagtattcattatctggaaggttcctttcttgcggtctttcctttttaaaggctgtagtaaaatgaggtacttagcctaaaagtttttctgactctaaggaaaaaaaaagaaagtgtgagtcatttgaacttgtgatgtctgtgtattgcagtcactgaacctcacacttgccaagatgaataatagtgtcccctcatttctttatacttgagttaggccagtaatcagaaccaagttaggaaagcaaccagagggtgatgtgtgtgcagaatcgaacccagagtggaaattaattctggtaccagactactgaacatgcgtgtgtgttctcaaaatacttcagtactggcatagagaaagattttaacagttggcttgtacttcaggaaaaaagctgcaacrtctgtatgtgtttttaagaatttctgagattgaccagttgactattggctggaatgatatcaacatatggcctcctagttacgatttatcaaagtatcccataagcttgatcttagcccatctctagctcttacaattaatgtcagtgcacagtgggcctacagctccctattcaaaccaaccaaccattcagtaacagttacaagacaacatgtgagcatgactraatatttggtatgaagaatttattgtttatttctgtaggtatgataatgttttgtggttaattttaatataaagagactttatcttttaatgatatgtactgaaacatttgagcatgaaataaaggctgagcgcagtgacccacgcctgtaatcccagcactttgggagaccaaggcaggaggctcgcttgaccccaggaggtttgggacccacctgggcaacatagtaagaacccatctctacaaaaaatgtgaaaattagccaggagtggtggtacgtgcccgtggtcccagctactcaggaagctgaggtgggaggattgcttgagcccaataggtcaaggctgcaatgagtcatgatcataccactgcactccagcctggtagttattttaaagtggaagcagggagagtgaggttgtagataattgtgattatccgtgaattggtgcttgaaatctgacatgtggtggttcattctatactactttttatttttttgagacggggtctcactttgccacccaggctggagtgcagtggcgcaatctcggctcactgcagcctcgccctccaggttcaagcaatcctcccacctcagccccctaagtatctgagactacaggcatgtacccccacttctggctaatttttgtattttttgtagagacacggtttccccatgttacccaggctggtctccaattcctgggctcatgggatctacccacctcgcctcccaaagtgctaggattacaggcatgagccactgcacctggccctactatcctacttgtttacaatttagaattttccataataaaatgtttttctaatcctccagtagatgttaaatttttagaagtctttatcttttctaaacatacagatatatgtctagttgagttacggttaaaaatttttttgaagttttcatttacaagaaaaaataggatcccaacaggtagaaatagggccaatagctcagagagatattaagacaatagtttgtcaaagggactccaggataatttgatcaggaaaaatccttatttaaataaaaattaggctgggtgtggtggctcacacctgtaatcccagcactttgggaggccgaggcgagccgatygcttgaggtcaggcgttcaagaccagcctggccaacatgatgaaaccccctctctactaaaaatacaaaaaaattagttgagcatggtggtgtgtgcctgtaatcccagctacttaggaggctgcggcaggagaatcgcttgagcccaggaggcggagggtgcagtgagccaagatcacaccactgcactccagcctgggcaacagagcgagactccgtctcaaaataaataaataaataaaaattaaagtgaaacactgacgcttgcatttctggcttcattggagactcgggaagagtgtcaggaggtgacacaccaatacagagttgagacacgggatttctgagtgtatggtggctgctggcagaaggccatgcctgggtttttgaaggatcctcccagagttgcttcttgttcaagtactggcctggccccactcttatttgaaaaactcaattgcaggaagggtgaccacaggtgtaatgacccatgttcttggctttgctattgtaggtgttgagttcggtgccatggaagctcttatttgggggtctctgatgaggcttctcatttttcttctcattctggtggctgatcaccagaaggatgagaccaaaagttgtgtggctgtctgtctgggttaatagattttccagtacttatctccaattggaaaaacaacccgtaagacggtgcttttagacagaggctccagctccctggtcacaacattcttgcccagaatgtctccttgcctgaatcccctaaactttctggcaataaaaacagcccacttcactgcctgtcctgctgacctgaagcattactggcatcttgacttgctatggtctgtaagcattgggaacctggaagttgtcaacatcatgggattgagcacctacctggtgctgagccctggtattcgaaggtggatgaggcacagtcactgcctcaggaagctcctctcattctggaagggggaacagacagctgagtaaacatgtgccttactataagtgttcccagcgtgatttaaaggatattcctgggacacaagagaggagagtgggtctttgcatctgcgggtcaggtgaagcttctttgagctggacaygtcactgctgaggcctgcatctgcgtccgggctttctcagagaagttaagaaggttctgaaactggtgccactggtttctctgagtggtagaattctgggcaaggtttattttcttcttgattcgcctccgtatcttccagtttcctaaaagcagcatatatttcataatcaggaaagacttttataaaagcttaaataaaggcagggctatccttggaaattgccttttcagctttaaaaaaaaaaaacaaaactccttcaggactttccttggtgttttgtaactaacatttctgtgaaaagatatattggtgaagagagtaaaacagattttctagtgttttcagcaatacaacagtaagccgcaaagacagaggaataaaaaaacaagggcagatccaaaccagagactaggaagaggtctttcaacacagcttacagcgtcaaacatctgtaaggaattgcagcataggaataagtcaggggtgaagtccaaagataagtctgactttttagaataaataaacacgaaagctttgttttcaggttcaggagcatgggctaaggagagcagaatgagctgagaccctggcctgggtgaaggtggtctgcctagctccaatgcctggatcattgaagggaggggattttggagttgttggttaaagtcaaagtgtccaaacacatctcttctcatttctagattcatgctgataattgaccttgaagttttggccygcttgcttttttcgttataatagtaatgaaactcctaataaatctaagcmcattaaaccactcaaggtgacttgtgttgggctcatttagccctgttgaataatcaccatcctgccacagttcwgccaggccaccaggcatgaccagacatgccaaagaaagctttgagcaaacaaccaaaacaggaaggcgtttcattcctcaccccaaaggccaaaaagtggagcttcttgttttactctggtcttttgcatgcactctacctaatgcagccgggttcttacacctgggctagggtgccaggaggcttagactttattaattcaaaatgacttggaagagctcttttgagcagcttttcataagtgctttttggggttttagattgctggctgtacctttaaaggtaagtaggaggtgtttgttcccaggcactatggaactggcacgttggccctgaattgcctttgcatgagctgttgagtgacggagatgaaaaccgtctattgtttaaaccactgcttgtcagggtttatccttgatcccaactatcacaggagtgggcaagaagcatggctatgatgtgtggatgtctgaaaacaaacatctgaggtaatgataatgaccaagtgttccacccaaatggctattatttgtccaaaaaacactgtaaarggttctgactttacgtccaagggaaactctttggctgctcttcagtaagctggccatgaaaggaccaagctcctttcccctgacactggcctcttgcttccagtgaactccattcaccgccccgccccacccccatggtttgcgcgtactgccattctacgccttcctatccaattgtgctgtggttccttcgacctctttttctcctgtggattaccaagcccctttcctgtaggaggactgaaagtgggtaatatgtaaacagtaagaatttaatttttacagttctagagaccgggaagtccaaggtcaaggtgcaggcagatgtggtgtctggtgaaggcccagtcttttctttatagatggcgcctcttgttgtgtcctcacatgggagaatgacagaaagggcaaaccactctgtcatacctcttctgtaaggtcactaatccaattcatgaggacctcttccttgtaacttaatcacctccttaaggccacacttcttaatactagcacattggtgaatgagtttcaacatcagaccaaggtagaggctgtggctacagctactggctccatcagctctgggtcactagctccctgtctcagtctggagagaaggttcctgacaagcctgagatagtcccccaagatyctctgcccaagggagccctgtcattccaagaagggcccaacccctaccttgacctgtgaatggggctgaacagggataccacaggagtttccttctaaatggatcagattttacatggaagaaggatccagggtctcaaagattctccacagctcagtcctcttgtgatccccttgcctcatcatctggctttgtcacagccacagtaatcccactggtgcagtgacaccaggtgctctgagagcagagcagagctcctgagtgatgctgcagggctctggatatacaaagaaccgtgtctgtggcacttggagagaataaaatgttaccatggtcaattcactgaagcaggtttgcctaatytgtttctaatgcctgggaaaatgcttacaatccctaacgaaatctcattcttcaaagggttgtctttgrtatttggcagtggtacttggagatactcgtaaacttatatattatagtctttggggtggtggccccattcacctgagtgataaatctaacagggaatgcaaattctcaattacatacatgttgttgctttctaccaagcctagccaggcttgaagatggaactttgtctcatcaacctcccctgaccagcaagcgtttcctcggagctgggtctgcctcagygtctctctgccatcaccctatagcttgtaacacctgctcccctccaggcataaatttctccacaatcccaccctgtccaaacwtgcagttcccgcaaaggtgtgttctttccttgtctgacaaaattcattagcttgaaggtgatgatttttgcttgtttgctgtttgtccattctggccttcgcatctctgaacttggatgtgtctgtacgttctagtagctcctggcctacagtgtccacagagcactgtttgccagaaggttcytaataagtaccttgaagtccaggatattggyttccctcttgagaaccgagcttatgattcttcaagttcaaatttactacaatagctataaccatatcataaattatactaacttggaacttaaatgtagagtcatcccttttcaactgcattctattcataactttctggatttttatgatcttaaaaacacaagttggacttgaaaatggatttttttttaatatgggctaaattgtccttaagttcctgattgtaaaaatcatgtggaaaaagtactttgatcatgcttttgttggactataaaccttctttgaaagcagatttcagcaatttcattatgtaattcattgttgttggttttgtttgaaagattattacttatagaaagaaagactgtaaaatcttagcactatcttgcaggatttttaaaatggaagaaaaaaaaaacaatagagtaaacagaagcacagctttcaccaagtgtgtttgtccaatctctttacagtactatgcaggatgacatttttattctccatgagcaagagtatgacagtttgcttgaatctgtcttcaaaactgaattcctaagcctcttagcaaagcgttacgaggagaagacccagaagcaactacctctgaaattcagcaatacgtaagtccggatctgggacccagacttctgcgtgtagctaaaaaggggtcttgatcgcacccctgcgattcaggatggggctggaggaggcctgcgaggagaagagtggggtctggctggccccagtggaaccttagagcctgcagaagacagtctggatagtagtcacagactttgaaaaggttacttttgcatttctgtgaaataatgacttcatagactagtgtattttatcatttagacaaaaatcacctgaatgaggcagacaaaggcagatttttatgtatcacccaaaaaagggtttttttaatttaggagagcagacaggagtagaatcacactggaagcagataaaagtgacagaggtgggggtttaaattccccaaaccaatgcataataaaacctgtttattggtagagcctccgggggcttgaggactataggtggccaacgtattgtgtaggtggttcacctttctttctttttttttttttttcttttttttttcttgagatggcgtctcgttctgttgcccaggctggcgtacagtggtgcgaccttggctcactgcaacctctgcctcccaggttcaagcaattctcctgcctcagcctcctgagtagctaggattacaagtgctcaccaccacacccagctaatgttttcttatttttagtagatacggggtttcaccatgttggccaggctggtcttgaactcctaacctcaagtgatccacccgcctcggcgtcccaaagtgctgggatcacaggcttgagccaccatgcccagcctcaccttcatttcttttggcaacatgatctaatggaccaggtactggctggcatactgttgaccctctaatctcatatttgctgagtaagagttatttagctagtctgggcaatatagtaagaccacatctctacaaaaagtaaaaaataaaaaaaaaattagccgagtatggtggtgcatgcctgtagtcccagctactcgggaggctgaggtgggaggatacttgagcccaggaggcagaggttgcagtgagctgagaccgcaccactgcacgccagcctgggcaacagagcaagaccctgtctaaaacacagaaagaaagttatttagcttttctttttaaatttccccatctataaaatgggaatatcctccatcttttcctagctacaaaaataaggccaagacaaagcctttatatcatgatgagggaaacttataataggcagctacttaaaattatgatttttccttcttatgatatcagaaaatataacttaaaaacagaataaggattgcataatacaggcatatatgcaatatagaagcattaaaactggatggggagtttgggaattgcaggtaaatcctgccttctatttggattttggttgctagtgtgtgtctttttccatccctgggtgggctgtgatggtgcaagaatagtacaggactaaacaaagccaggttctatgctagagtcytcaagctggcctgtgtctggcatctctcagtcctccacaagcacagaatcagggacaacagctggaagcacaatgacagcacagcggtatgacctggaaattgtctctttcctctgtcccctcagcaggcgcctctgagaccacctgacagagtggcactggcacattagccaggtgtacctccctcaccacctggtgtctcacggtaccgggccccagatgctcctttttctggctcattgtcatgcagcgacagtgccaccccatggatgcggtgygcatcctcagggccctgctcctggtgtagattgtccgttctcgcctcatgtttatgcttttccagcagcagaactccgtggcgggatctctgagcaccgttttctcactgcgtccttcgacctgttaaccccactgtgctttttgcaggcttgaactgaagttgaaaaaggaaaactggggcccctggagtgcrgggggctcccggcaagtgcagttccaccaagggtttggggacctggctgtcctcaagcccagtaacaaagtgctgcaggtcagcatcggacctggactgcccaagaactcccgtaagtgctccacgggccctgcaggcagaactgccrccgctcccccgagtctcccgagcaaatgctgcaaacatgtgcacagatgtgggggctgagaatcagtacaccttctgcttgctggggctcacgctttcttcagaatggaacatttcaaactaaagcaacagcaaggaaaatgagcaggttaaaagtttctgagggacttagtacttatgtatcagtacacctggcattacaatattgtggttaaaacaaatcaaagtttgttagcttcaaatttcccctccctttccagtcagatcttgtccacaataccaacatcatcctctatgccacctttaaagaaattgactgggcccggcgtggtggctcacacctataatcccagcaccttgggaggccaaggccggacgatcgcttgaacccaagagttccagaccagcctgagtaacatggcaaaaccctgtctccacacacaaaaataaaaatgtaaaaattagccaggcatggtggtgcatgcctgtagtcccagccactccggaggctgaggtgggaggatggcttgagcctgggaggtcaaggctgcagtaaatcatgatctttactggggtgccactgcaccccagcctaggtgacagagcaagaccctgcctcattaaaaaaaagaagatgaaaaagaaataaaacaccatacacacacacacacacacacacacacacacacacacacacacamgcactacctcaaaccccagtctaactccttccctggcctttatttttgtatttataattgatatttataaacttatatctatagcacacagcatagaataatcatacatgctatgtatgcatatactgtgatattgttctaagatttagcctgtgtgtgatcacacacatgaagatgccttatataaaataactgtttctaggccaggcacggtggctcatgcctataatccctgcactttgggaggccgaggcaggcggactacctgaggtcaggagtttgagaccagcctgaccaacacccagtctctactaaatacaaaaaactagccaggtgttgtggcgtatgcctgtagtcccagctacttgggaggctgaggcaggagaattgcttgaacccaggaggtggaggttgcagtgagctgagatcgcgccattgcacaccagcctgggcaacaagagcgaaactccatctcaaaaattaattaattaattagccatttctcaaatctgtctgcaaaggtacaccttaacatgttctctaacatattaatacaataccagcaaatgccatcatatctttatatatgtagagccactcagaaaatgttgatgtatgtctgtgtatccgttagtacttgcagaaaacagacagcaacttttggagggatttctgaagcgatttttcagtgaaaagatgtggacggggtttagggaacaaagtagggacccagggaaagggagtggcaggaaatcattattatccgcaaacctgaagcagcagagggaggaacgaggtgaactgaaggctacagtcaggaaggaggcacatgaagtcccccacctccctcctgacactccagtctccttccagtgcctcctgttggcctggcctataggcctcaccccactggaaggcagaggcctggctgtccacaggactcagaccccagggcacagagccgggcaaagaaaggctgcaaataaccagcaggctatgtttgtgcggcgggcccccraggggaaattgcccaataggtgttggattctatcttatttggggtggcgagagtggcctaggtactgggagggaagcgtccagcaggccacactgggtttgccccgatcccacgtggtcggttctcccaggccctagagctgcagctcctttgctgtgtttgcactgtgcaccttgtcacctcctacccttctctattcttcagctcttctctttataagaaattccctctgcacccctcttccagctggtttaatcctaccttccttcctgttccattcaagaccctattgtttttcttccccacatagatgtctctgcagagatctcctctggctcctctggccctgctgtccagccctgactgtgacccacagtgtgttcctttggccccagcttgttcctcattccttcatgtctgtgtcaagggtacaagtctgcttctcctccttgtggtctgtgtttagttcaaggaccgtagaacacacactcttgcgtgcaaggcgcttgacgtaggcaggtgtgcagtcagtgccagaacgggcttcatgccaaccccgttgatccgcagcattagtgaacctgctcagccacttagcrtttagaacatgaatgcaaatgttwaaatgttccatctgtctcttttaaaagtctgtaaaaatagaaacacctttgtaagatgaccaatccttctttaagaaccactgtctctaacatttcaaaactgtacctctataaccctgtcctccagcccctcccacccaatagctaccattacatacttccctcaacggctccttctccactgcaactgttctcctgcagatccacctgagagctggaatccaagcttctcaaaaattttccatatgcaaagaaccatgaggatccataaaaccaaccagtagcactggttttaactttgtcttgtttatttcaggtcctaccagaaggaacactacccaaaatacaggttattccagtgggactcaaaatgccaactacccagtgagagctgcccctcctcccccaggtaagccagctacgtaccgtagtctgggaccactaaatctggacccataacttataaaatatgtttgggaagaaacccattagcaaatcaatgcacacatattaaccaggcatggaccatttcagtgccacatgtacaacacagcagccctacttgagacctcaaaattcagaaaaataggagtcagtgagactgaactgcggctgagtttgcaatctggatttcattacctcgaaatattactcccttaggaaaggcttctgacagagagaaaggagttccttgtccgtaacaaccagactgttgtcagcttttaagayacaggatgctgctttatggaaataggagtttacaggtctaaccccaccaccactacccagctccggccaaataccactacagcagcmcccccttatcctcgggggatgcattccaagacgcccagtgggggcttgaaaatgcagatattaccaaaacctatctatacttttccagtttgagttttccacaaaaccagcagaaatttttttctgtcttcacagtgttacagatagaagatayattgttactgaatttacttaaaggaagcgctttcacttaaaggaagcgcttaatggcttctctttggcatacccaaattgccagcttcctggggccattatgaataacaagatggctgcttagtgactgatgatggggtagcacacacagcatggataggctgggcaaagggacgattcgtgtcctggcgggacagggtgagatggcacacaacctaagccttaggaattgttcattcctggaactttaatttaatatttccaggccacagttgaccatgggtaactgaaacagtggaaagcaaaatcatggataaggaggggagggggctactattttgtaagttatagcagcttaatgactgaatagaagaaatctgttttctatttattttctgagattaggattcaggaggcctgttcaaaaaaacaaagtaatatctgagagtattacaaaattgttataaaatttatgctcatatttcatatttatctcttctttttttgggatggggtctcagttgcccaactggagtgcagtggtgccatcatagctcactgcagcctcagcctccctggatcaagtgatcctcccacctcagccccttgagtagctgggactacaggcacgcaccaccacacctggctctttttttttttactctttgtagacacggagtctcactgtgttgcccaggctggtcttgaactcctaggttcaagcagtcatcccaccttggcctcccaaagtgttgggattgaaagtgtgagccactgcacctggcctctcatttttaatagtaaaaatataactgacatatccagacactctaaacctgaatctaagattttctgtctctaaaaatctgtgtagtgtttgcagaatgcttgcaaaaatacataaaatcttttaatgtttttccatcactcacaaaattcagttcataaaaaattactcccagagtgtttggtattaagcagtttagaattctaagtctgatagggtcattttgagactgtatttgattccagtcttcccagccaagagaattctatttgtaccaatgtccaagataaggagtaaaaagcatttcttgaggctggtcatggtggcttacgcctgtaatcccaacactttgggagaccaaggcaggagacttgcttgagaccggaagttagagcccagcctgggcaacacagcaaaaccccatctctacaaaaatgttcttaaaaattagctgcagccaggcgcagtggctcatgcctataatcccagcactttgggagaccaagacgagcagatcacttgaggccaggagtttgagaccagcctagccaacatgacaaaaccctgtctctactaaaaatacaaaaattagccaggcatggtggtgcacacctgtaatcccagctactggggaggatgaggcacgagaattgcttgaacccgggaggtggagattgcagtgagctgagatcacaccactgcactctagcctgggtgacagagcaacactctggctcaaaaataaataaataataaaataaattaaaaaataaaaattagctggacatggtggcacatgcctggaatcccagctactcaggaggctgaagtgggaggctgaggtggctatgatcatgccactgcactccagcctgagtaacagagtgagaccctgtctcaagattagctgggcgtggtggcatgcaccagtgattccagctactcacaaggctgagacatgaagattatttgagccggggaggcagaggttgctgtgatctgagattgcactactgtactccagcctgggtaactgagtgagagtctgtctcccctccccatccacccccaccttccccccagaaaagggcatttctttagtctctggaatctcaccattgcatgctaaagtatggacactggggcccagcagtgagaaactaattctcatctcttttggagtccccatcctgccttgacccggctctgtctcctcctttcttctttgaagaaaatccaagcacaaaggaacttaagagaagcactgtagtatcatattactgcgtgtgcgctggttccagtggagaattctggccaagtccacctggaaagctcactggcctcagctaggttggccaaagtagcctcagatcaaatcaggccacaaagtttccgaccttgagcagggctccccaactctctaaatgacagttccttcatcaaaaaaatgagacaatgggaccagatccatttgaccagcacttctcaaactgtctgtggtgaaagaccaggagttttcagggggttttaaaaaatttccagtccgtcacaaaccatrtatttgtatgwtacaataaaaatgaattagtagaagaatggaattttcaaaacatataaaatataagccaaaatgtcttattataagatgcaacaggcatgaaatagatctgtcaaactgccatgaacgtttctaaatgcttactcttcatttctgaccttatcgtggacaaggggatctcgagcagcatgtggagcagcccctgtggggaccccacttttatcactggccatgtgacatcccgagggcatgtsacactcctaagatgcccctctccttttgttgggaccctaggcagcaagcagggtccttctaccctccccawccccagaccctgtgggagcccattcagctctcactcactgagggaatgaggtaagatgaagagcagctgtttgccccaaatgtctagttctgatctggtctgacggcctgtgggaggaaattgctagagacatggctggatgaggagccaccctcttgaaagctccaccctgataaaaccgtggttcaaagtaagaattccacctattattactgggcatgaaatatttctgcaataataaggatatagagaaaatgcttgtcggagctggaagccaccaagcagattctggacctatctcgtggttctttcatgaagaactgagactatgaaagatcaactctcttgctcatgatcagtatagctctcagaggcagagccagaactgaacccctaatcctttcctaagggtcatcccactggtaccaaagagttctcttaatttggttggaagaggtctttaggtagggttcaccaaagtgggccttgaagagtcttgttctctttctccactcagcccagatctgtcagtgggagaatgaataagggcctcttcatacgtagcatggaatgctaatgcccgagtctgccaagacgcatggtttggagcctgccactgtaacccattacttattggctaatgcgattttaactagacatcgctgtttggctgagagagcttgctccatccggactgatccaactgggtggccacttttcccttgcctgtgtagagcaccccctctgcctcacacagcaggctcctgccgtggatgcccaagattgacccctcgaaaatggatgtccagctgtttaagcagctgcctgtcagccctcttgagtcataatctcataatttttcttaggcccaagaaggtgtctcccagccggctgtaagcttaccttactgtgggctttgaaccccaggaaatctggggattctattgccaccaagcatgtgctgagtgtccgctgtgttccgggcacatcccgggaagttgaccatgcattgttgtacatgttaaatacatacaattttatttgtcagttatacctcagtaaagcccggtgatggggaaaacagggaatcagctctaattctcacaatgtgttagcagtgatgccttccatttttttcaaatgcggaaattgagactcagaagttaagtaagctgcccttgtagtacatggaagaaatgtggagagacttttggcaaaggatccaaaaatctgagccttatttccttctctgttcctctctctaggataccatcagaacggagtcatcagaaaccagtatgtgccatatccccatgctcctggaagccagaggtccaatcagaaaagcctgtacacctccatggcccgcccgcccttgcctcggcagcagtctaccagttcagaccgagtgtcacagacgccagagagcctggatttcctcaaggtcccggaccagggagctgcagggtaagattctcacatcctctggatgaagcyggcaagctccatctccatcattcaaaacaagggttcagagattcctgtgggctgtcaatacacaggattctaaggtttagttttcyacctcagtgctatatgccaggacccaaggctgtggggctgtggctggttatttgtaaaggtacagtcacattaatagcacacaattcatttcattctccagagagggcttatcttggaaacatcagaagacgggttccccttggccccagatatggttactctgtgacctctttgtgctttcttgcatggttgaggaataatggatcttttgatttgtgtctgtgcctgcagttgcataaatacaacagctttaagagtcttcagcaacattaagcataacatcccagcattctatatgatatttgttgaagaatatgggtctttgtggctttatagtgagagcctctctgcctttctagaatataaataaagagtggtgaagagaacccagcctttttagccggaggaagtgaagattcctgaaactctgtgtagatattaaaagagctatcagttttaaaagggggttaagacatgtcctgtggagtcgtagggatggaactagcgccaactgaaagccagttggtgaactctgccaggaggtagattttggctccagtaaaaggaagaacgtagcaacccaaatatgagttgccctcgtatgtaaacagcattttgttcctgggagcatccaggcaccaggtggatggggatcaccaggcaggagtgttcagagtagtgttgtcaaatggtagataaggggaaagagaggcctctctaacactggacctgctgtttgcyctctctgagcttcagtttccttgtctaagcactaatgtaatgccatcaaacttgcagcaaacttgttgggaggactagaaattatatacataaaatctctagcatggtacttggcatgcaggcgtctgctcacttaactctagcttgagggtggtaatgacggtgacagggtgatgatcataaggacccccgtcacttcatggaggttgaactagagacttgtaaggaatcttccagctctgcacgactctccatggtggagtggctctgtctgctaaagctagtaatggcctgctcccacccactctctcttctcttcccctctctcaagcccacttccattttccactgtctcctgtctccagcaccatggagaagtttcaaatgaggatcaggaggtatgaatgcaaaatagacctgtgcaggaagagaaacaacagctccttcctctgagggggcagccatccatctacctttttgtttgttggttggttgctttgttttttgagacagggtctcgctctgttgcccaggctgcaatgcagtggtgcagtctcggctcactgcagcctcctcccaggttcaagtgattctcctgcctcagcctcctgagtagctgggattacaggcacgcaccaccacacccagctaattttttttttttttagacggagtctcactcggttgccaggctggagtgcagtgccacaatctcggctcactgcaatctctgcctcccgggttcaagcgattcccctgcctcagcctcccgagtagccaggactacaggcgcctgccaccatgcccggctaatttgtgtgtgtgtgtgtgtgtgtgtgtgkatttttgtagagacaagagtttcactgtgttggccaggatggtcttgatctcctgacctcgtgatccaccygccttggcctcccaaagtgctggaattaagatgtgagccaccgcacccagcctaatttttttayttttagtagagacagggtttcgccatgttggccaggctggtctcaaactcctgacctcaagtaatccacccgccttggcctcccaaagtgctgggattacaggcgtgagccactgtgcctggcctcattcatctttatgccctattatttgatgtttttcctgccttggcagcttccttctmaagaccacagagctcttaagagctttaccatgttctctcctagcagcattccttttgccctggcaagtcttatctcacttcatttgggctacaaatatgaaagcaccttagttggtttttttggggggggttttttgtttgtttgagatggagtcttgttctgttgccaggctggagtgcagtggtgcaatctcagctcactgcaacctccatgtcctgggttcaagtgactgtcctgcgtcaacctcctgagtagctgggactacaggtgcgtgccaccacacccagctaatttttttggtttttttttgtagagatggggtttcaccatgttggccaggatggtctcgatctcttgacctcgtcatctgcctgccttgtcctcccatagtagctgggattacaggcgtgagccaccgcgcccagctgaaagcaccttagttttatcacacagacagccatcagtagagtggatgccgcccttatgtagacctctctctaagtgcacgtgcgcgcgcgygygtgtgtgtgtgtgtgtgtgtgtgtgtgtgtgtgtgtgtgtccctctcctcttcccttccactaccccccagtcttgggtaagtagctatatcccaccagctctcatgaccgtggttcacgtgattggcttggtctaaaccagtagttctcaaactctagtgtgcagtagaatccgctggaaagcttgctggcccactttccgcgtttctgattctgtaggtctggggtagggcctaagaatttgcatttgtaccacgttcccaggtgatgctctgatccagggaccacattttgaaaaccactggtctgaaggcacctgtagtctgattgataaagccagggaagcctccatgtgaaggtgaattgcaagggtgctgttaggtttatgggatttttgctctctaacccagacctacacctttcaggtgggtgagcatcactaagtcacaatcccacctaggcccagtttgatgcctcaaagtaggcagggtattaaaagcagtcaacagaatgcaccaaatctcttagctctgtgtgctagctgcctacttactttggttttggcaagcaaaaccatctttccagcctactttgcaagttgcaaacttgcacatcagccagctgggagcatctgtcagccaaaagtaggcaatttaggaayactgtgtcttaaccaaggctgctcccttccagccctctgccatgtggttccctatttaagtcttatggcaccctttgccaccctccagcctaaagactgggtacacgtggtgctgtcttggaggcaggccatgaggccggaaggagaggacaccttcacacctgtctgctaggcattaagatttccttgtatgtaaaacacaattagtaggcacactgtgtcttagccagcctcctctttgtaaccttaaatctgctgtgcaaacattccttacaaaatagtaccttgggcaaaaggctcagccttttcttagtatttattttctaaaacatgtaaaggtgaaaattaaaagtatctaatgtggccagagactttggatgtggcattttatggatccccatggttacctaaatttaacagcttctcctatttgccaagaaaacatgaattgcatttattccacaggaggctgttgaagcatgcagggaattttaggatcccaagtttgtactttttccataaacatgaaaattcctatacatcaaagttctaaacagtcaccttgactttaccaatctataaaagtaggattactatggtctttctttcctggctttcacattctgagtttatctttccttcctctctctcatccctcagtgcactttttctgtaatttattttggatcatgtaatatggataaaatcaaatgatgtaattagcacctcaagttaattcaggcaagtctttatcagtttattttaggttcaatcagttgttctgaagagagcatgaagatttcactaaattaattaccatcccaactggattctttaccctttcattgcagtattggtgcacatggtagctatcattatcattctccaggaaacactgagagatctgcgtgggaatcaggatcttgccatcgattagcatagcttttgagaagtcttaattcaggtcaaagatctttcctgtttctcaaggaaagggaagaggttaggcaagaatcctattaacagttcatccaggccgggcgcggtggctcacgcctgtaatcccagcactttgggaggccgaggtgggtggatcacgaggtcaggagatcaagaccatcctgattaacacggtgaaaccccgtctccactaaaaacacaaacaattagctgggtatggtggtgggtgcctgtagtcccagctaatcaggaggctgaggcgggagaatggcgtgaacccaggaggcagagcttgcagtgagctgagattgggccactgcactccagcctgggcgacagagcaagactctgtctcaaaaaaaaaaamaaaaaaaaaacaaaaaaaaaaaaacagttcatccacccacctttgctctgatctcactatccagtgtgctttgtaattttccctcctataactgaaatgtacctaatctacctgcagttcattcttggaagcattaaaacccagactggaaatgtctgttgacctttttaatcctgtggtccattttgtgggaggataacttcaggaaatttcaagatactccagagattaatccaactagaagttggaaaaacagaaaagtcttggaagtgctcagtggtagggcttctgggcatgccacaaaggaggggtcaatagaaatatttaaatgctgcctgtgtgtctcttgtcaagatcctcccaatggagtcatatttttatggggcttaaaatttccatcaagtgtccaatagcaatatttctcaacccataatctatgggagcagcagccatatcctggcccaggcagacatggtgctgaggaattcctggcatccatttccacatttccagtaatgtttatagattcaaccttttggaacacagcatatttttaagagccagtgaaataaaatgccattattttccttcttggaatttcaagacataaatttcccatctgcagaacaaagaggtgatattcgaaagcttaatcctagctcccccgacatagactaggcacacccacccaggaggtgtgggagctacagagaaattcacaaaaggtggcatttagagtgcagagagcacaggatttgcatctgtaagagtagggtgagtcctggttcattcattctttcctttttcttttattcatcaatatttactgagccatgtgccttctatgtgctaccccaggcttgtcacttaatctttctactcttggtgtcttcacctgtataatagggatactaatataataattttgaaaacccactcctcagggttttcttgaaggttaaataagggctttgtgtgctataaagcacaatgctatttgaaagttattttgtatttgattcattaccattattcattggctggtcttgcaaggaaattttaatgctctaccagggttgaaaggtgatgtttcctggcccagtggctttattctcaagaaytcaaatctctggcctgcctagagctgtggactccatgaaggtctacgcttcaggcattgttggctgtaatgcggggaatgggcagcctagggaagccaagacaaggagaccagacagggagacgcccgcccccaacacacacacacccttggcagctgtgcctgttctccgtgggcacagagcatcagtggcacacagagttctgcagtaatggtaataatcactagacatgagagcctcatttggacaatttgaagatgaaaagtcacaaactccttctggctctgcaccgttccacagtctcttcctrtcttttttttgtattgtttttttttttttttttttgagacagagtctcactctgtcacccaggctggagtgcaatggcgcgatcctggctcactgcagctcaacctctgcctcccacgttcaagcgattctcatgcctcaacctcgcaagcagctgagattacacgcatgagccaccacacctggctaatttttagtagggacggggtttcgccatgttggccaggctggtctcgaactcctggcctcaagtgatccgcccacctcagcctcccaaactgctgggattacaggcatgagtcactgcacctggcctccacggtctctttctaactaaacatctgagctgcagtcatcataacaatgaacagcccatggaaaggatggacattgctagggcagagggaattagccctcagtttagagagttttcatgtcatttggggttttgttttcttgtgggcttttggcaccttgtgagattcggcagccatccatgaggactcaaatgtcagctgacatccaaatgtctcggggcaagtatatcacttggtcttctctggtcactaatataggacttctcttgcagagcaagttttcacaaagcaaactggatgtagtgtacttaattcatcaggaaatgttatttgtttctgggttataatgtgattgccctactcagaaaaaagaacctggtgcaaaaagaagttgctgtgggtcagctttttcgtgcatttatgttaattggtaatagacacataaagtgatgtgtacaaattaccctaaaataagaaaactaaattggattgtacagaaattacatataatgaaacactggatttgctcagtgatgtatagttttataaccatatattaacatatgtatattacatatataaataatatatacaatataagtaatatatattatatatataatgagcctttattattgaaatgtcaaaagaaaaaataagttattgtgagtctgaaatcttgctgcaactccccatcatctagccaagcacagtggctcatgccgttaatcccagcagttctggaggccgaggcaggaggatcacttgagatcaggagttcgagaccaggctgaccaacatgtgaaaccctgtctctactaaaaatacaaaaattagtcgggcgtggtggcaggtgcctataatcccagctacttgggagactcaggcatgagaatcacttgaatctgggaggcggaggctgcagcgagccaagatcattccactgcactccggccaagtgacagagcaaggatctgtctcaaacaaaacaaaacaaaacaaaaaacaaccattatctcaatgaaataattatttttataacacgattttcaattctgtgatgtttattagaaatacaaatactgtatcacagagtaccagacctaccaaaattatctaagttgtacaattataaaacaaatggtggcacatggctgtagtcccagcactcagatagctaaagcaggaggatggcccaagtccaggggttcaagactgcagtgaggtatgatcatatcattgtaccccagcctgggcatcatagcaagaccttgtctctaaaaataataacaataaggaaataatgaaacaaaagttggcaaggcatttttagacatgagtgagcctgtgctgtcgtgagggcagcttgaggatggtaggatggtaggatggtagtgtgctggtaaacagtgggcactccagggaggaaaaggcctgaactgtaacatttaccagtttccatggtaaaattctctcttcatggccaatttcaagctaccagtgtgactactactgagtgcggagttgggaaaacatgggcagtctcaccattgtatagtatttctaccatacatcagcaatagactttaataacttcaaatgcatagatagaggaaaataagtaggctgggcacagtggctcacgactgtaatcccagcactttgggaggccaaggcgggtggatcacttgaggccaggagttcgagaccagcctgggcaacagggtgaaaccccatctctactaaaaatacaaaagaaaaattagccgggcttgttggcacatgcttgtaatcccagctactcgggaggctgaggcaggagaaacgcttgaacccgggaggcggaggttgcagtgagaagtaggaagagataaatgatgagcatttattgcttttgttttaatgtaatttctttgttgtcaatgatttggtttttaataatggccatgtttgacaactggctcacaaaattcctgaaagttctatcagctctcgcaagctggactaagcctgttctggcacagtgggcatgcgggtctcatgtgccctgtaagggggtgtgtaatcccttcctcctggactagccaattgcctcggctgggagtagggggctccacctgcctagaagacctcattaatcaaatttctggcagtttctttgaaagtcattcctggccggatgcggtggctcacgcctgtaatcccagcactttgggaagctgaggcaggtggatcagttgaggtcaggagttcaagaccagcctgaccaacatggagaaaccccatctctactaaaaatacaagattagcygggcatggtggtgcatgcctgtagtcccaactacttaggaggctgaggcaggagaatcgcttgaacccaggaggtggaggttgcggtgagccgagatcgtaccattgcactccagcctgggcaacaagagtgaaactccgtctcaaaacaaaacaaaaagtcattctttcttctcattaatgacacaggattgccacctagtgacgcagaggagattgcctgggttttcgaggctgttggagtctgggaaaatggctgttcccaccaactgtgttccaaggtggcttccaggtctccagtctggtgaatcgtagagattgtgacggcttcgttgacacagatttcctgtgttcctcagtgctgttgagagctctctgtaaaactttcctagaatcagaaaaaagacctggaacccggtgcggtggcttacacctgtaatcccagcactttgggaggccaaggtgggaggatcgcttaagcccaggagttcaagaccagcctgggcaacatggcaaaacttcatctctaaaaataaagaggccgggcgcattggctcacaactgtaatcccagcactttgggaggctgaggcgggcggatcacttgaggtcaggagttcaacaccagcctagccaacatagtgaaaccccgtgtctactaaaaatacaaaaattagctgggtgtggtggtgggcgcctgtaatcccagctacttgggaggctgaggcacgagaattgcttgaacctgggaggtggaggttgcagtgagccgagatcatgccactgcactccagcctgcgtcatagagtgagactcagtctcaaaaaaataaaaataaattaataaataaataaaaggaaaaagaaaaaggacctaggccattgcctgaatctgctcaggttttacagatgcagagcttggccccaaacccagcacacagactcaagcccacgtccccctcctgctacacactgtcaacatagagcttgaggccccatctcagggggagttagccaaatagccacacaagtcactgtcatgctacaattgacccatgttctggagaagccgtgggctaggagagggtatggccgggggtttgccagagtatgaggaagcagtgatggaaatgagatccgaaggccgagcaggagttagcagtgctgcctgggaagtgggcagaggccaggggagcatagccagaccaaggatccagaaagattccatgtggctgcagtgccaggagccttaggcgtgtgccaccatgttggccagggatgaaaccagcaggaaatcccaggagcctgcatcagtcatctcacaggagtgtcgtgagggtgaaatgaagcagcatctgtgaaaatgcctaggacaaggcctggctgagttgaggggagtttatccagacttcacacagctaccggcagtttcccagaagacatcctgtctgctagccctcacaagaagggtgtagacatgtgcaggctggccagggagaatggctctcactgtggctcgctttgggaatatgccgccccagcaaagcagctgtgcctctttgtggtcacaagacagagccaatggtggcagcatcagtgttgcccttcctaatgcaaagtgcaaactgcagaggtcctccctcctccacccacctgcccactcctcccggctgccatcagacagtccccactatccacacccatctcaaagctgccctggcctcccccacctctcacctgtggagttactaggaaccccattcagcctagtgataaagggccaaatggcttacactgccagcatggtagcagttgtccacaacctggacaattatggaccccaaattccccgggtaatttcggaggttttactttggccaggagtcacttatcctgaggaagtagcctctgatgccttgatatcaaagaccacgcagtggccacatacacacagctttttgcgtcctgcatccccttaggtcttatttataatttggtatcttatcaccagaaagaatccgttccatgagacttacgatctctagtttaaaacaatctagacgccttttttttttttttttttttttgcacctaattaccctggctagagtttccaggataatattggacagaagtggtgagtgctgacatccctgttttgttcctgatcttatggggaaatcattgtgagtttcaccagtaaatatgatgtaagcttgaagtatgtggacaagggtcctctccccaaccagggctcatgaagaaaggtaggaaggcaccaatgtggcctgcagcagggagtaaggctggggtgtgagcaggggccgcccctggcagagtctgtaggcgccatgaagggttttggtcctttttccaagagcagagagaagctgttagaaagattttcaggttgaggatggggcgaactaataacagctgagctagcatgagggccaagtgtcctagaaaggaaacaactggcaaggaagacacgaaggacagaaacaggtcttagtcaaagctggaggcaggtggggcagaacaagtgggtgatgcccagggcagggagggtcttacctctcaggagccatccgtcttgtcttcccactaagaggtcttaccccgaccctggcgaggggagtccttcagcaggaggaccctgtatctaagcccccatacttgggctccagagaccttgtcagtctacactaaggacactagggtttttccctgaacaagacaggacaaattagcatctgtgggttcaactggcccgctgtgcccatgggttccacatctgtggattcaaccaaacttggaatgaaaatattcagaaaaaatatggatagatgcctctgtagtgaacatgtacagacttwaaaaaaaaatttttttttttttgggatggagtctcactccgtttcccaggctggagtgcagtggcacgctctcggctcactgcaagctccgcctccctggttcacgccattctcctgcctcagcctcccgaatagctgggactacaagcgcccgccaccacgcccggctaattttttgtatttttagtagagacggggtttcaccgtgttagccaggatggtctctatctcctgacctcatgatccacccacctcggcctccccaagtgctgggattacagattacaggcgtgagccactgcacccagcctttttttttttttttttttttgagacaaagtcttactctgtggcccaggctggagtgcagtggctcaatctcgactcactgtaacctccatctcccgggttcaagcgattctcctgcctcagcctcccaagtagctgggactataggcatgcaccgtcacgcccagctaccgtctgtattttcagtagagacgggtttcgccatgttggccaggctggtctcgaactcctgacttcaggtgatccacccgccttggcctcccaaggtgctgggattataggcgtgagccaccatgcctagccagtcctatattttttaaaaagcctttttcttgtcattattccctaaacaatatagtataacaactatttacatagcatttacattatattaagtattataagtaatctagaggtgatttaacgtatacaggaggatgtgcataggttatatgcaattgttacactttcatatgagggacgtgtctgtggagtttagtatctgtgaggagtcctggaaccagtcccccagggagatagggatgagtttttggtgtgtgtgcgtgcacatgtgtgcatctgtgtccttccatgtgcacttgtagcccagttctgtggactgccaggctggaggcttcctccctcccagggtgttgtaatgcccgccgccatcccctttcattccttgttgctgagaagtcacatgacgtctggtatccaggctaatggctcttattaaccaaatgctgacacatcccaatatatagggtgcttaattaaaaacctgctcgcctggccaactttcagagaagcaagcacttcttgaacagggaatggggatttccagtaggcactaggtagaaaacgaatgatgtcacactaagaacctacaaaatgcctttcctctgcactaagagaaaagtgcaggggggtggtggtggtgggaggagtggagcctgagtagccttgaggattgctccctcccacgtggggtggtgtaaaagccgagtctcaggggcgcccagcccctcctggggacagtccaccaccctgctggcagtcagtgttccccccagccacccctttgtgatccaggttgttcatcagcaccccatgaacatctgtcatcacaggacctgggcaaggccagcaggctgtggctcctgagagcacagctcaaaactgggtgtggttgttctttccagaactcaggccccaggaaggccctcccttttcctccttgctcctgtaggtgtgaatgatgtgcacagacctaacagccagccccaccctgttgaggtccagcccaacttcttgagggagaaatcttaagtttgttttgtagggaaatgaatgtagcctttactttggtttgtccttaagcgaagtggaaaaaaagaaatgttctccatgtttccgttttcctttttgtttttgctaaatgctttttatgaacatatttaataaatgtttcaggtataagtgtaaagatctcactaaataggaacaagttgaacttacacacctttgaaagaatgtatgaatggtgacttaaggcagcatagtatataggaagaataactttaaagctagaagatctggattagggttagagcactggagttatttttaataattatgacagtggggtgaagggagtgtcactggtatccagtgggtagaggccagggatcctacagggcataggacagcctcccgcacccacccccatacacacacacacacacacacaacagagaattcccagccgcaaatgtcagtagtgcagatgttgagaaactgctctggataaactcttgtataagaatatttacagcaacatttttggaggggcaaaggggagctctgaggggtaataatgaaagaatgggaaggagacctgaggagtaatactgattgataaaatgagagggaagtctgtggattaataatgagggggtgggagggaagattgtggagtaatgatgagggtatgagggaagtctgcagagtaataatgagcaggtcggagggaagtgtgaggagtaataatgagggacgggagggaagtctgaggagtaataatgaggaggtaggagggaagtctgcagagtaataatgaggggtaggagggacatctgtggagtaataatgagagggcagaaaagcctgtagagtaataaggaaggggtaggagggccgtctgcagagtaataatgagggatgggagggaagtttgacaagaaataatgagarggtgagacggaagtctgaggagtaataatgagggggtaggagggatgtctgcagagtaataagggggtgggaaagaagtctgcagagtaatgagcgggtgaaaggaaagtgaggagtaataatgaaggggtgggagggaagtgtgaggagtaataatgagggatgggagggaagtgtgatgagtaacaatgagcggtgggaggtaagtgtgaggagtaataatgaggggttgggagggaagtctgaggaggaatgaggggggtgggagggaagcctgaggagtaataatgagggggtgggagggaagtgtgaggagtaataatgagggatgggagggaagtctaaggagtaataatgaactggtgggagggaagtctctggagtaatgagggtgggtggatagatgggatgggagtagacaggagtgaggtctgaggcataataaggttgtgaatggggagcaaatctcatggcagcattttttataatagtgaaaactggaaccatcccaagtgaccatccacagtgccctggagaagtaaactgtgacacactcactcgcgcagtggtgtagtatcaggcagcaagggtgaaggaacgatagctgcaggcatcagcagggcacgtcatccagttgttgagcatgtgaccgtggaatatgattcctttcatacagttgacagtcggaccacaaatattggctaggggtatttacatgtgtggcaaactgtagagatgagccagagaatggttaatacaaactgtaaggtggtggtaatctggggggaatgcagtgaaggagaaatgcctacaggcttctgtggcacctgcaaaagttccatttcgaaacttgaggaaggagggacagatacctgaatgttcctgatttaaatgtatgggtatacttttgacacttttttatggatatgtgtctcccacatttccttctatgctggggacacagtgacaacagcagctaaggtttttaagagctatgtgcatttgcaacaaccttgtcagaaaagttacttttattcctcaagtttaaagactgcaccctgggccacatgtcttctaaggatggagctggatttgaacttgaacaggccagtgccggccgccatgctccaaaccaccgttcggtgctgctgccccctgttggggcccagtctcatctgctccactctctccacagggtcaggagacaaacaaccagtcggcctcccccagcwgggggcagacccaagccccagcccaagcccaagcctcaggtkccacagtgcaaggctttgtatgcctatgacgctcaggacacagacgaactcagctttaatgccaatgacattattgatattatcaaagaaggtaagtgtgtggctggttggctgggacagcctcccaaagagcatgcagtcacattgctgtaagatctagtgtgaaaatgaaaagaatttatgggctcctcaaactgcaatttgtagaggcaggtcaggcctcaggctcagtctgatcaagacaccagcttttttaatgcttctttcagctctgcccccttatttatattccctcccttgtcaagctgtttttcttcatggtagcaaaacggcagcagcaattccaggccaacatatcaaaccatgtctgaaatgtgcatcatctctgaaacttctgttcttagtcattggacaaaagtcctgacttttattctgatcagaccaaattagccatgtgtccatccctgaaccaacttcagtagcaagacaaaggctgtaccctgagaggatgagacctggtaggggctgtccccagaaacggggaggtstgtcccacccacacttcctggcttcttcataatgaaagtggatggagtggaagccaggaagacaaccttgaatatccattattaaagcagtccatgggcttggctgagtgctttattaatttggtagatatcttacttttttcaacaaactttttgatttaaagaacaaagggaaaacaacatggatggagccaaatcacttgagcccatgggagcggagtgtgtgtggctggggcagaacagactttctcatcttcacttccaccacctctctctccctgcagatccttctggctggtggacgggtcgactacgaggcaagcagggcctgttccccaacaactatgtgaccaagatctgaggtgcccgtgactstgacacatggggcagaggagctccaggcacagaccaggkgaggggatatttaggkgctccccttacaatccacaatgagcaattgcttctccaaggcctggagctattctggtaccttccccatggaggacactgaaaaggctgggttggggacagggagtatcactccataagtgatcctaaaaggtagcctcttcataggaacccaggaggacaaaaccaccatgcattaagatttatttattgtatttaaacctggtgagaggacaagtgaggtctgctcagaccttgtaggcttctatcaaaacagcaccctgcttgctcaccaggcctagagaatggctgtaggtggccgctgacaagtgcctttagttgaagagcacatttctttcatctctcttgtcyatacctgatagacacattcctctctgccaccttccttcagggaggaccygccctctgcagactgggcttagcgtgagcaggcacttcccatgtacgtgccaagggtaagctggcctgctgagcccagggcracagaggggcactggtttacactttgccgggaccatcagggccgccaagcaggtcaggggctgggggctgggggctgggctgctggctttgctttctctgggtcttcaattagaatgtggctggcccatattggtttgtgtttaaatgctgtacttactacaagaaggatcttttttcaagctgtacatttataaaaacagatcatatactgtayatataaaaatcttgagatggtagaaacatgtatgaatgtactaagtagtattccactgtactcattcataaggtaggttttcttacaaaactcacaccaggtacttaaagatgtgctctgcttttttccaactacggagtgtcactgctttctagstcagtccctgcagactcttctcaactctttccctataggaaacttactccgcgtcctgcccccacctcctaaataaataaaggaatcggcgaacaccttcttcttttatgacatttgttatgggttgaattgtgtgcctccaaagaagatgttggagtcccagccaccagtacctcacaatatgaccttatttggaaatagagtctttatggagcaaacaaacaaaactaattaaaatgaagtcattagagtgggtcttaatccaatataatggtgtcctgatgaaaaggggaaatttggacacagagaccaacatgccagaggaaagaccatgtgaaaaggcagggagaagacagccattcacaagccctggacagaggcctggaacagattctccctcacaccctcacaaggaaccagccctgcccaccttggtcttggacttccaacctccagaactgtgaggcaatacatttcgctgtttaagccactcggtttgtggtagtttgttacggcagccctaacaaactaaaacaatgttttcttgccataatagtgaaaagctggaatcagtgtaatgcccatcaataatggaatggttgtaagtagagactgccatttctctacctttcctcctctgggtgccatagccattcttaagctactggtaacttagagtttgagcagcatacacctttgaggctttcaggatcctcaagtccatgggaaaaaattatcagggcttacgtataagggaaaaaaattgatctagatttgaaacgaagatacatttaattctgctgtgttttacttcaagaacagggagcaaactccattctgtaacagtaacgaataatgttaaaaggctacttcagttccatgttgcgaccagagaggaaagtagagccatgatgcggtgagttgaggaaaggtaatcctgttgacactagtggtctctaaagtactttcacattcatggactccccgcagtgggaggaagataccaccagaactgggacagaggagcatgctggagtccccacagccaccagcactcaggctgcgttctcagggcaggaacaccaggaccatcttcccttgttatcataagcccctggctggctgggacaagcctttgtttttcctcctgattgattgattggcattttacacttgtgtgtaactgggaaccatcgggctctaggtcacaaaacagggactgagttaaacccccacgagtaacaccctcatccatggaaatcacagaccaagcccttagcacctgcatcgtgtgcccagccagtgccaggctcaaggagatgcccaacaaatggtgctgaaataggtaagtgacccacaggggaaggagacttagatctgcgtagagatgctgaaatgctgacactattaagaaaagtttggagaaatagtggtttatcttaaacttatttgtatatatttagaaattcaacatggggactaccagaaaaatctgggataaataacatttccctttttttcctaattaaaaagtcttcagaaaaatgtcttttttccctttaagacactaacctgggtttcctctagtctgtggatctagcctggcctgccattttgttcactgtgcagttaagcaaatatgaccactttaggagtcacttaccaggaaagaacatacagaagatcaaggggccacccccaccttctggaacttgccatcctgtttgaaataaggggtgttcatgtgcacacacagcaacgtgtatagcagtatcaaacacagtataaaaatgtgacatcccttcaaccaaaggttttaagtaaccaggaactaaatgagaaggcctgactgtgtaccctagggtagaggtgttcaagctttagttgtagaagagagagagacagaggtctgtataagggtggtatccactctactgatggccgtctgtgagacagagagaggctgatctgaaactcctgggatcaaacgatcctcctgcctcagcctctcaaagtgctgggattatgggcaagagccaccgtacctggccaactggcttaaagacatgcaaaagggccgtctcttccacagtgttttgtgaaacaatacagagacatgtggagaggacaaagggtgaagccttcttgaataagcttgctccccaaccatgaaggatgccaacccactgacctcccaacgtgtggtcccagcccatcgtaatcaaacctgactccccactactaccaagtccagcccaatgaaggtagaaaagcatcgtgcagtttcctccttaaaggacctgccctgtgtgcacaccatgtccaccaatattctgctggccagagcttagtcatgtggcctcaactcaagggggctggaggtctctgcacagagctgtctcagcagcttacccagagcaccagagtgacagcgggctcctgccaggtggaagtgttcacaaaaatgagtaagagaaaatatggatgtgcctttatgaattacaaactccatgggcttccatagagcatggcttttacataatctaaattccttctctttgcgactccctcctgaactcatccccagaccctccctgagtggagctggtcacaccaagtcagcctgtgcctctagttgctaccatttcttttataggtgttgtcccagttaagatttcactggcagtagggctggattctggtttccagggcaatcaagagcagagcatgaacggtgcgtctttggtagacaatttaactctgtgtttctggcacccctcacttttgtgatcaaaagaaagaccagaggagcctttctgcaattctgccctctttccctgttttgcttttctcccaaggcctagctgattgattgcagttctttctggatttagtaacttggttttattcctacccactaatcttgatgtctttttccctactagatcatacctttccactctgagcaccctttctaacaagaagactggctcagtatggttcactaggtcgcccaaggtcacacagttcttccctgggggagccatcacaggaactctgagtcaaaggcctgtgcgtttttattttcagacagcacctcactttgtcacccagactagagaacagtggtgcgatcatgccttactgcagtctcaaactccagggctcaggtgatcctcccacctcagcctcccaagtagctgggaccacaagcatgtgccaccacattcggctaattatttgtacagatggggtctccctgtgttgcccagctggtctcaaagctctgggctcaagcagtcttcccgccttggcctcccaaaattctgggattacaagcatgagccactgtgcccaaaaggcctgtgcttttaatcattttctccaattcaacagatatttagtaatgtgatggtctactgtgtcagcctttcaacttccaatatcttcctctcagaacataaaagtctatttaaaaagagagagagaagaaaactcacgcataaaactcaacagctagaaacttgtaagctcctttaatgggcaggagctccatctaacaaatctgaatcctctgattcatctctttccaagaccattaaccttctctttaaaataattaacagctatgttcaagtatcttcttcacactagaagctatactaagtgcttggcatactttacttagcaccaccctatgagggagacactcttatccccacttcacaggtacagaaactaaagtatagagatcaccactacttaaaatcaaacccaaagcacccacgttcagagttagtgctcttctatactatggatacatcatctcatttttaatttccgtgtttttatgatatggtttctacttctgccactcatttcccatttatgacattttagtttggggtgcctgctgtgccatctaagaaagtatcttaaaggtctttttttatgacatcctggaagaatttcctaagtcaggacatttaatatttaactaagtaaaatatgtaataaggaagctataaaatgtctttggaatatgcttacaaaactcaggcgttcttggagagaagttgagctcaagcatctctgggaagtaactgcttgtcagagccaggaaagctccctttcatggtctcacttcgttaccattcacacttgtgatcagagttgtccaaggctgccatgggaacaagcttcactaacccaataagggatattcataaaactctatactaggatttcagcatataaagatacccaaaacttacagttaaagacatactagtcaggcagtcctgcctgcccaggaagagagtaaaaagccagccctaactggagccagtttctcctccccaggggcagttgtcctcaagctgcacctgaatcaaaagagcagacgctgaatttctctgtcagcaagaggcaaccacactctaggttggggaaaataactgagataaatgagtttactgcaaagcacagaacctttatgaatcttccaatcatttgcaatgtttcacaagtgtatttgactaactaactcctttctcttacaacaccaattaacatcttgttaaaccaacgtcttgggaagttgtttttatacgagactcactatgtttatggtttttgtttttaagtcaatggttggaggctgaggatgcactccccccgtagaaaacaatgttcgagcgtcccagatcgacctcagactgctgagctagcagtgagaatttcaagccaatgggtgttagcttgctgggctccgtgggggttggacctgacgagccaggcgccacagggaatctgctggtctgccgccggttgtgaagactgggaaaagtgcagtgtctgggccggagtgtacctttcctccaggtacagtctctcacggcttcccttggctaggaaagggaaatcctccgaccccttgcgcttcccgggaaaggcaacactccaccctacttctgctcgccctccatgggctgcacccactgtccaaccagtcccaatgagatgaaccaggtacctcagttggaaacgcagaaattacctgcttggttgggggaggggtgcctgccattgctgaggcttgagtaggtggttttaccctcacagtgtaaacaaagctgcccggaagttcaaactgggcagagcccactgcagctcagccaggctgctgcagccatactgcctctgtagatttcctctttcctgggcagggcatctctgaagatacggcagcagccccagtcagggacatatacataaaacccccatctccctgggacagagcacctgggggaaggggcggctgtgggcacagcttcagcagacttaaaagtccctacctgagagctctgaagagtgcagcagatttcccagcacagcattcgagctctgataagggacaggctgcctcctcaagtgggtccctgacccccgtgtatcctgtctgggtgacacctcccagtaggggccgacagacacctcatagaggagagctctggctggcatctgacgggtgcccctctgggaggaagcttccagaggaaggaacaggcagcaatctttgctgttctgcagcctccgctggtgatacccaggcaaacagggtctagagtggacctccagcaaactccagcagacctgcagaaaaggggcctgttgcaaggaaaattaacaaacagaaaggaatagtagcaacatcaacaaaaaggacgtctactcagagaccccatccgaaggtcaccaacatcaaataccaaaggtagataaatccacgaagatggggagaaaccagcacaaaaaggctggaaactccaaaaaccaaaaaatgcctcttctcctccaaaggatcacaactcctcaccagcacgggaacaaacctggacagagaacaagtttgacaaactgacagaagcaggtttaagaaggtgggtgataaactcctccgagctaaaggaacctgtgctaacccaatgcaaggaagctaaaaaccttgaaaaaagattagacgaatcgccaactagaataaccagttcagagaagaacataaatgatctaatggagctgaaaaacacagcaca

SEQ ID NO: 98086 - DNA, 88417 bp, Homo sapiens
tgagtgtcagctggtctacctgggttgtgctatggaccaacccagctttgtgatgagtaactccttcaccaaccatgtgatggtgcagattgagctgtggacccactcagataagtaccccattgaggttcacttcctgcccaggaagctggatgaggcagtggctgaagcccatctgggcaaggtgaacatgaaactgaccaagcagactgagaagcaggcccagtacctgggcatgtcctgtgatagtctcttcaagctggatcactaccactactgagagccaggcctgtccttcaccttccagctgtcgtccttgcccaggccccgcctctcctccctaagagcaaatggcaccaactttgtgattggcttgccagtattccccatcgactccctggggctggtcactcatccctcatgcttttccaagtgtggcaaagggaattgagaggaccctcctcaagccctgatcatgatggaggtacaagggaggcaaccacagggaaccataagctcagtggtcttggaactgctcactaagtcagtccttccttagcctggaagttggtagtggagtcacaaaacccatgtattaatactttaccatctaggccttcacctggtctgtggacttatacccctgtgcttggtttacaggctcagtggttcctcagcccatgacagatgagaaggagctatattgaagggcaaggaggaactgtttgaattttcctgagagcctggcttagtgatgggccttctcttaaacctcataacaatgaggttggtacttttagtccttgttttacaggggttagaatagactgttaaggcacaactgagaaaagacagagaagtaacagccagaggttgagaggggccattaaaacgtaaaagcatagatctgccaccactttgtaacaagatggtttctatcacaaccccagaaaataatttggcttatgtttatataatgtttaaagaaagcaacaaggtgggtacataaaaatcttagtgccaaaacacacacacacacacacacacacacacacacacaatcactgttggccaggcacagtggctcacacctgtaatcccagcactttgggaggcctaggcaggagaatcacttcagccaggagttcaagaccagcctgaatgacaaggtgaaaccccatctctacaaaaaatacaaaaattagttggggatagtggtgcatgtgtatagtcccagctactagagaggctgaggtgggatggtcacttgagcctgggagattgaagctgcaatgagccatgaacatgccactgtactccagcttgggcaacagagcaagaccctgtctcaaaaacaacaataacaacaacaacaacaaaacccacaaacaaacaaaaaccactgtccttgctagtcctttatcctgttttatttttcttctaacacttctagcacttaacaacacttgacatagtctacgtgtatttgcttattgtatgtctcctcgactagaatgtaagtcagctccgtgttgagcaggaattttatattgtgaatctaaaacaatgcctggcatagaacatgcattcagtaagtacttgttaaatgaatggaagatgaaccagattttggactactgcttatgctggatggcatgtaaattgaagctgtgatcaaatacaggccatgcctctaaacagctgatgaccgcttagattctaggtgccatagatactgctgcctggtttgttacaatacttttttttttttttttttttgcttttactctttactattattcattaccggatggtgggtgaggggaaaaatacagaatacatgccctagtccagtgctgtccattagagctttctttaataatggaagtagcctgtatctgctggtcaataaggtaaccaatagttaccaggggctgttgagcacttgaaatatggatattttgactgaactgaatttttaattttacaactagctgtggttactagttactgtatttagcagccatactcaacaatcctataggtctatcttaattacttttataggaatgaagagtattataattatttctcaattatatatatttggttttaatttctacagaggaagaggacaacaaagttttgtgaactattattcatataagtttgtagttgtttaaggaaaagacttcacagagaacagggcagagagtaacacaatatctgatttccaaaaaattcaatcaaactttgatatggatttggtcaaatcattgtttaatggcctccttaacattattattaaactgatttatataatttgctttttactaatcaaatacattgttttaaatcttaattattttttattataaaagtaatacacattcagtgtaacaagttcaaataatctctcaggtggataaaatacggacatccaccacactgtacctaccaagatgcccataccccaaagatgattgctgttaaacatttagagtgcctttcctgacttttttgtctaagcacctttaaaaaccaatacttttggttttcagtgatagctctgaatcccctttaggcatagagtgtgggaaattatatttctgcagcaaactcaggctctgcaacatcaagtgtggattcactggaaattatttgaagtaacacttagagatcatagtagccaaaaaatgttgggaaattaaaaaggggtttttaaaaattaattatcgttattattatttttttcaaagagacagggtcttcactccatcacccaggatggagttcagtggcggaattacagctcactgaagcctcaaactcctgggtgcaaccaatcctcctgcctcagcctcccaagtagcttggactacaggcatgcaccaactgtgccaggctaattttttaatattttgtagggatagggtcttgctatgttgcccaggctgatctcaaactcctgacctcaagcaatccacgcacctcagcctcccatagtgctgggattacaggagtgagctcccacacccagctgaaaaaggtttttgtggagggagtatgatcaggagaaaaatcatggaatgtgctcgaaagagatctaaagggccatggaagtcaaaaggttgaactccatagaacaaaacatgaagtatggaaagattctttaaaaaacacttgactttggaacaaaatccaaattgttcccatgatttcattctttgacattatgttcattttggttatcttagtcttttctcagaattcctctttaacagagaattatctaaaagcccctggctaagttaatgcttatgactatggtcacaaatggatggcttggattttatttgttttgcagtgtttgtaaatttttttatgtatactgttgttgtcaactaacataatccgtatgtatatgggttatatatatatatatatattccccaaatttaaaaaccagtttggagatttttcccacacacagaaaatcagaaaattggcaatactctgccccattaccacatggcaacaatgtagacaggccatgagttctccacatggccctaatccccaccactcttaaacaaatctaatcagttttatgtatattatatatgtatattgctgtgcttctccttcctgcctgaccctgcaagacccctgtctcagtctctctcaacatgtctgaaggactcgagggcaggtgtcaaaggtgaaggccctcatctggatttaatgtcctggaccttgaaacagcagctagtgttttgagctctaagctaacactttggactttcttttttttttcgagatggagtcttgctctgtcgcccaggctggagtgcagtggcaccatctcggctcactgcaagctccacctctcgggttcacgccattctcctgcctcagcctcctgagtagctgggactacaggcgccctccaccacgcctggctaattttttgtatttttagcagagatggggtttcaccgtgttagccaggatggtctcgatctcctgacctcgtgatccgtccgccttggcctcccaaagtgctgggattacaggcatgaaccaccgcgcctggccacattttggactttcagtcatgttttctttccccaatgaaatagaaaagttttatttcaaagaggaaaagggtgcaacagctgcaacatacataaaacctatttagttttacttgggagtgggaatcaggaaacctgggttctgtttttgacttagtttggataaagaagggtagttaagctgtccttatgtctcttaccaaatggagaaaatactgctgtagttcacagcaatttggggagttttagattctatggaaaatggaaatcctatttgtaacttagattttttctttggagaaggagtctcgctctgttgcccaggctggagtgcagtggcacgatctcggctcactgcaacctccaccttccaggttcaagcgattcactgactcagcctcctcagtagctgggattacaggcacgcgccaccatgcccagctaatgtttgtatttttagtagagaccaggttttgccattttggccaggctggtctcaaactcctgacctcaagtgatctgcccaccttggcctcccaaagtgctgggattacaggcgtgagctaccgctcccggtctaatttttaaatttttgttttgtagagatgagggtctccctttgttgctcaagctggtctctgtctcttgggatcaagggatcctcctgcctcagcctcccaaagtgctgggattacaggcctgggccactgcaacctggccttcatcacaaattcattgaacacactttctttattttatccttttttatttttaaaaatttttatttcagtagttttggaggaacaggttgcatggaaaagttctttagtggtcatttctgagattttggtgcacccatcacccgagcagtgtacactgtaccatgtggcacacactttcacttaaagcatttactagacctcgctagccagatttcccatccctgagacacctggaatgttcctgaggacttagtgactactgcctaaagctccacccaagtcaattttatgtttacaggcaaccggagcatccaatcacctttctctaagagagtacaaagatcagctcgcgagaaagttcagacgtctcatttcgtttctattacacggggccttcgcccaaccagacggagtcttgctctgctgcccaggctggagtgcagtagcgcgatctcggctcattgcaaccttcgctccccgggtttaagcaattctcctgcctcagccactggagtagctaggattacaggcgcacgccaccacgccaagctaattttttgtattcttaatagagacgggggtttcaccatgttggccaggctggtctcgaactcctgacctcatcatttgcccgcctcggcctcccaaagcgctgggattacaggcgtgagccaccgtgcccagcctcgccggggccttttaagtgacgttaaaaattgtacataaaatatgttttaggataatacttgtttttctttgaccaaaggcttggcttcagagaatgtttagccagaaatagaggggcgttaaatccccttttttctaatttccaatctgaggaggaaaataacgtagtaaagggacgcaagagcaaccttgcttcttccacaacaaggcccaggcgccgccttgcaacccggaaatgcagggtgcagtgcggggggtaagggaccggccaactatgttgacccgactcagagaaaccccgcccttgccgccaccgcccacccataacgtcctcctcgaccctccctcgaccatccctcgccccgcggccctcaccgaaaaggggagggcggtggaagagagaggagtcaagggagcgcacgcgaagccccgcccctgccgtgacgtctggagacgcgacgcgtcgcctcgcaatgcaaatcgggaaaagggggtgagctgggctggcttccgtcctggtagccaasgctaattctccctcgagttcttgggagatgggcatttggcgagaaggctggcgttagtgaagcgcgcccggcgtcacggtgagtgcgggtcttgggccctagcacctgttctctgggaagtcgtccgctgtgaacgatgaacgcctttccttccaccagctgctggttaccccggagacaagctctgtccgcggagaggagtgggacaactcctaaaggtagaatcagcttgtggagaggaaaggcccaaccttgagtcttttacgccatctacctaggattgccaagcgagtttcgtgtgtttttttggttttaaaaggtggctttgaccaatcttccgttctcttggacacttatacccgactttgacctctttcctcttgcttccggtttttttttttttctgcaatctgcctacaatcccaggccttactatagctcctaaaactgtttcccagtttctcttcttccccagtcacacttgattttagtgaagtttgagtttaaagaccctataagcttgtcagagttaaaactatgacttcctcaaatagaagattttttttttttcccctaaaaagtgccttccatcctagagttgtgggacaagttaatttcaccgccactccaccttggaaattatcagaatccttactagcagtgatgtgcattataaagctgcagaccaccctcctgggtttatttcttgcctccagttcattctgtgaccttgaacaagtcacttaatcactaacaaaaaatttacctgacacggaggtgttgcagagcctaaggaatttagtatttgttaagagacctgagggtttcagatgaaagggatttatatctaaaggatgttaccttttctgaatctgcaaagcatcgttagttttgtaaatatcttgctgcagccattaaaaatgccaagtggtatttgttaaggaagtattcctgttttaggcttgctctgctgcggctttgctatgtaagcagatttttgcatttcagccgattctgtttaagattcgttggtgaatgtcattcatgatggatttgggtagtttctccttacagcatatccctggactattaagcatatctggaaggtgatatcggttgtgttatgtctttatcatgttgatatggctgctttgaaatatgtattccttttcttgtgacacattggatgcatctttaatattagtgaagaccctgtagtagtttaaaaaaaaaatacacctctcattaatgaaattttgcacatagacatctgtttttttaagaaaacaatgtataagaaaaactaacaaaaatgttttaaaggtgccttttttagcatttcgttttttaatatatttacttggactttaatctttatgggcatttgtttattaatgtggacgtggctgggcgcagtggctcacatctgtaatcctagcactttgggaggcggaggtgggcggatcactgaggtcaggagttcgagatcagcctggccaacatggcgaaacccggtctctactaaaaatacaaaattagctgggcgtggtggtgcacgcctgtagtcccagctactctggaggctgaggcaggagaatcgcttgaacctggaaagcgaaggttgcagtgagccgagattgcgycattgcactccagcctgggtgacaagagcaaaactccgtctcaaaaaataaaaaataaaaagcgtggacataatggaaaataatcaaaatgacttttgggtaagacagttggaaaataaagccagtacattaaatttttttcataagtctagcactatattacgaacttttctccatgaaaatgcactcatatttatggaagtgaaaggaaaaaaatgtcttcaggtatgtgttgctaataaaattagatataattaaggaaacatttaaaaaataccttgttgytgtcccagttacctattgctgcataacaaatcactccaaaacatagtgacttaaaactgtaatttagtatctctcctgtttctctggcctgcctggacttagctaagtggttttcacctagagtttaatgcgtttgtattcagataagcagctgagtttggagtcaaccgagagctcagctggtctggacatccaaaatggctaattcacgtgaaggcgtttgatgttggctaggagttcagctggaaatgtcaactggaatgcccacacatagcctcttcacgtgacttgaacagtatggcggctaggttccgagaatacatgtttgaggagtcaggaagtagaagctgccagtctcccaaaaagcctgagcccagaaattcgcacaacattacttccaacatactstgttggttagagcaaagaccagcgtacaaccctcacctttgaaaggaaaaatgtcaaagaatttgtggccgtgctttgcctactataattttgatgacaaagttgtattggactcttgtttgcatttatatagcagatgaagaatcaggtacacttccaatttccagtttctttctttcttcttcttctttttttttttttgagatggagtcttgctctgttgycagcctggagtgcagtgtacgatctcagctcactgcaacctctgcctcctgggttcacgccattctcctgcctcagcctcccgagtagcatgtcaccaagcccagctaatttttgtatttttagtagagatggggtttcaccatgttggccaggatgatcttgatctcttgacctgtgatccacctgcctcaacctccgaaagtgctggaattacaggcgtgagccaccgcgcctgacccatttccaatttctttaaccgtaatactttatgttgtaatggcatattacagttttcaaagcatgtttttgtatattttttcacttgatacctatggtcaccctatagaagcagacaaatagttcctatttcattttgcagatgaaagtaaactgaagagtggtggtggtattgggagtgatttacggaatttgttcaaagtcatatgattaataaatggaaagtaaggcctgcaacagttccataatattaaatttattagtactgaatgatgaaatattatattaaacttatttggaattctacatttatagccgtactmatttttttttttttttttttttgagacggagtcttgctctgtcttctaggctggagtgcagtggtgagttctcggctcactgaaatgtccgcctcctgggtttaagcaattctgcttcagcctcccgagtagctgggactataggcacctgccaccatgcccggctaatttttgtattttagtagagatggggttttgccatgttggccaggctggtcttgaactcctgacctcaggtgatctgcccgcctcagcctcccaaagtgctgggattatagccgtgagccaccatacctggccctttttttttttaaactgagacaaggtcttgctctgtcacccaggctggagtgcagtggcatgaccttggctcactgtaacctctgcttcctgggctcaagtgatcctcctgcctcagcctcccaagtagctaggactgcaggcacacgccagcacacctgactaataccatactaattcaagtaaaacagttctcatgtatagtgaataagggttaactaagccttgtctcttttgactaacacattacaatttagttttttgtttgtttgtttttgagagggagtcttgctctgtcacctaggctggatgcagtggcatgatctcggctcactgcaccctccgtctgatgggttcaagcaattctcctgcctcagcctcccaagtagctgggatcacaggcatatgccgccacgcccagctaattttttgtgttttagtagagatggggtttcactgtgttgcccaggctggtcacgaactcctgagctcaggcaatccacctgcctcggcctcccaaagtgctgggattacaggcgttagctaccacgccgggcctacaatttagtttttaataatgcagcagtcttcctcttatctgcaggggatatgtttcaagacctccaatgaatgcctgaaaccacagatagtactgaaccctatatatactatgttttccctatatatacatttttatgataaagtttaacttataaattagtaacaagagattaacaacaataactaataataaaatagaataattacaacaatatagtgtaataaaagttatgccctgtggccataacttgtgcaacttgaggtgtgacagcaaaactagcacaaatttctttttccttcataattttgcagataaaagatcttaccatagatcttagcaacctcagcatgaggtttttggttttttttcttattaggttgagaactttcacctttttgcttaaaggaagcagtttacaacttctttttgacatacgtgaatctctgcttttacactttgaagccatgattaagtaaaatgagggttacttgaacacaagcactgtaatactgctatagtcagtctggtaactgagacggccacttagtgattaacaggcaggtagcatctacagtgtggatacactggacaaagggatgattcatgtcacagactgggcgaagtgaggtggtgcacaatttaaaacttatgaattgtttatttctggaattttttatttaatattcttggactgtggttgactgcaagtagctgaaaccatggaaagcgaaaccatggataaggggggactactacactaaattctgaaacataccaataatggtgtaaacccacatgtctttttaatagagtaaaatgaaataattacacattataataccaatttcagaacaagagttatgggcataagcatcctggaggtgtttttttttttttttttggaggtgttattttaatttctcaattacagagttttaaaaatgaaaatgattttttaaaattttggtaggttgaatgatttaagatgctgatttcagctggaaacaaattgttgccttcatattattttgttgctcctagcagcatgtttatattcattcttatattgatggttcccagtcttgactggtgttagaattcatttgggaagctttttaaaaatacctatgtgggcaaggcgaggttggctyatgcctgtaatcccagcactttgggagacctaggcaggaggatcacttgagcccaagagtttgagactatcctggacaacatagtgagactctgtatttttttaaatatataaataagaaaataaatacctgtgtgtatgtctcatccatagagattctgatttaattgtttaggagtgggatctgagcatcaatatttttttaaagttctctaggtaactgattctaacatacagctgggattgagaactatgtttttggtgcatgttaagtacgatctggctccctacttaatgattttgcatctgttaaaaaattaatgaggtagaagacaaaagaaatggattaaagttataaatgtagatagacatctattctggaaaacagttacccttttgttagtttctgggaatggtccttaataaaacaaacagacattggcctggtttgctaagtgcctatatcacagcattaagccacactttactttgttaccgttatgtacttaactttcattttaagaggcagaaactttattaagagttgtatttttttagtatcccctgtatcacaacactgcaccttgtgtatagtaggtatctattgtttacctaattgaagccagtttagacagtcactctttagaactagggctagttcagctccttgggaggctgaggcaagagaatcgcttgaacckgggaggtggaggttttggtgagccgagattgcgccactgctctccagcctggacagcagagtgagacgtcatctcaaaaaaataaagaactagggctagtttattcttttcttttctttttttctcatggcattctaagactcycccaattagacagggtctccctctattgctcaggctggagtgcaatggtgtaatcatggttcattgcaagctcaacctcccaggctcaaggaaggcctcagccttccgagaagctgggaccacaggcgcatgccaccatgccctgctaattttttatttttttattttttttttgtagtgataaggtctcactgtgttgcccagcagttcaccaaatcctagataacataattttggtgtcaatacttaattatcttccaaaacaatagggattatcaaagtcaacattgatgccttattagttgataaacagatttaatatctgtctgctctcacatataactgatttctagttaatatttacatcttaagatgttcctttggcatacactcaacattttccacatcgaattacctactttgctgtaaaccagtggttcttgttgggggtaattttgccttccaggacacattcggyaatgactgtagacagttttggttgttacaactggaagggaaggatgatagtaaactggcgtctagtagaggttagggatgctgctaaacatcctgcagtgcacattgcacagagcagcctctcacaacaaatgtttatctggtccaaaatgtgagtgatggcaaggttgagaaacgctgctgtaaactgatcagttttaaactgcagtattactttttttgttaatagcactactgctcttcatattttgcagggtacagtgtgtgtgcctctgtgtgtgtgtgtgtgtgtgtgtgtgtgtgtgtgtgtgtgtgtaagcaagagaaaatactgtttcgatcaaccagttaccaaagcatgtttctaccattttgtgttcttttctgcagtgaccttgtagttactcttttccatagtatcattcccttgttctcatctcctttcaatcttacttacatatccctaatttgaccatcttgagataatatttttcccatcaggaactggcttttattgcctgctgaatcaaatataaagaattctggatggcttccaaagtcttccataatgtgactccatctcctacataatataatttagttattcttgttagtcaacatttttttttccttttagttaaattcagctgacagggagaaacatttattaaagtggtgactatgtgaggactattgagataggtgccagggatccaaagacatgtcaacattttccctctatccgattgattatttcccaataacttctgtaatattccttattattactattttttccgagatggagtttcactcttgttgcccaggctggagtgcagtggtgcgatcttggctcactgcaacctctgccccctgggttcaagagattctcctgcctcagcctcctgagtaggtggaattacaggcgtccaccaccatgcccagctaatttggtatttttagtagagacggggtttctccatattggtcaggctggtcttgaacttctgacctcaggtgatctgcctgcctcagcctcccaaagtgctgggattacaggtgtcagccaccatgcccagccagatgtcctcctttcttaccctgttcttagctaaattctgtcctcaaggccaggttctctctctcatcacatcatcatgagcactgcgtgtgtatgaggattttaaagccttatagtaattgtctgttgatcccattactgtatttaaggaatgatatagatcacaagcattgtaggattcacatgaagaaacaaattccaagaactgggaccataaaggatggaagagatggaacttaagtttgtttcttcttgtagctgagacctcagatgtgcaccactacgcccagctaatttttaaattttttgtaaaattttttgtctttactttgttgcccastttgttggctacctaccatttctccctatctctgccctttaggcaacaacaatactcaacataaatatctgttcttgaactcctgggctcaagcagtcctcccacctcagtctcccagagtgttgggattacagctgtgaggcaccacgcccagtcagtgcactgctttttgcatggagaaagtcttgctgctactttaaaaaggtcagtgtgcttaattgatctacattctgtcacaaacttcttattttatcacaaactgataacaaacagttccccartcagcactggtcattggaccatacttggagttacattgctgtagtgtgagactttcatactttttttaaaattgtcayctgtattaagaaatacattttacattttcatccagtgttatatcatatacacatgtacataactgaaacaattttacgaagcagtacctaaccttactatgtgtgacatagtctgatgtttgctatttttttaatgctgatcatgaccttctaatggattttaaaaacactgccctcaagcatttagcacagtgctagagacatagtagttgctcagaaaataccatacattttagcagtgattaaatcttgagagggttgagccttcttaatacttgaggattactttaaaatgttatttcattggccgggcacgatggctcacgcctgtaatcccaccactttgggaggccgaggcgggcggatcacctgaggtcaggagttcgagaccagcctggccaacatggagaaaccctgtctctactaaaatacaaaaattagtggggcatggtggcggggcgcctgtaatctcagttacttgggaggctgaggctgcttgaatctgggaagtggaggttgcagtgagccaagttcatgccactgcactccagcttgggcgacagagtgagactccgtctccaaaaaaaaaaaaagttatttaatcaatacttagttgtttgtggcaccttatacagaacgagtgtagagtggattatgagatttaagacagcgagaagatacttatgttgagtattgttgctgcctaagggcagaaatagagagagatggtgggtgaccaacaaagacaacttttgctttcctttcaatattgccaaagaccttaggagtggctggtgtgaatccctgcttaaaatcaggaccagtttgaatgactgcaaacctcatttttcastttttaccttttagtcttcactttgtggttccagtcatcaaatccctactctttgtcttagaaaggagcagaaggatgtcagagaaagaacattttctctttatttatttatttttttttgagatggagtctctgttgcccaggctgcagtgcagtggcgcgatctcagctcactgcaagctccacctcccaggttcgtgccattctcctgcctcagcctcctgagtagctgggactacaggtgcccgccaccgtgcccggctaattttttgtctttttagtagagacggggtttcaccgtgttagccrggatggtcttgatctcctgacctcgtgatccgcccgccttggcctcccaaagtgytgggattacaggcgtgagccactgtgcacggctgcattttctctttgttaactcattttcaacacttttgggtttcacttttggagcactgctgtttgactaaggctgaagttctttgtcaggtttacacatcttaagaatttttattttttgttgttagaagcatgttaatttttcttgcatatacttagttatttttttttcacttgcaatccttcttgaagcataaggttttttgttttgttttgttttgttttgttttgttttaaaagacagagtcttgctctgtcgcccagactccgctcactgcaatctycacctcctgggttcaagcgatttttctgcctcagcctcctgaatagctgggattacaggtgtgcgccaccacgtccggctaatttttgtatttttagtagagatgaggtttcaccatgttggccaggctggtctcaaactcccgacctcaagcagtccacctgcctcagcctcccgaagtgctaggattacaggcctgagccaccacgcccggctgcattttctctttgttaactcattttcaacacttttggatttcacttttggagcactgctgtttgactaaggctgaagttctttatctttgtcaggtttacacgtcttaagaatttttattttttgttgttagaagcacgttaatttttcttacatatacttagttattttttttttccacttgcaatcctttttgaagcataagttttgctttgttttgttttgttttaaaagacagggtcttgctgtgtcgcccaggttgaagttgtagtgctgcaatctccactcactgcaacctccacctcctgggttcaagtgatttttctgcctcagcctcctgaatagctggaattacaggcatgtgccaccaccacgcctggctaatttttgtatttttaatagagatgaggtttcaccatgttggccaggctggtctcaaactcccaacctcaaggaatccacctgcctcggcctcccaaagtgctaggattrcaggtgtgagccactgcacccggccacataagataatttcaatgtgttgtatcttatggtttgtcctagatctaaacaaataaattctgcaaattatttgacttctgtagttaatgaacacttctgtataagtatcaatgggtttgttgttgctgctgctgttttattttttttaaacgattgtagccaaaataaggcaattgagttcattcagtcattctagtcaatatattttatgtcagtctattttcagatttctttaatggcaaaatgcagcagaatgacttatcaaaaatgtaacatgttaaattcacatagattgaggttggatacacagtcagccttctgtatctgtgaattcaaccaatggccgattggraatattttaaaaaaataattggatctgtactgaaccatgtacagagttttttcttgtctttattccctaaccaatacaatgtaacaactgtttatataacatttacattgtattaggtattataagtaatcttgagatgatttaaagtaaggttatatgcaaatcttacaccattttatatcagggatttgaacatctgcagatttttggtacttgtgggaaaagtcctggaaccactctcctacagatactgaggaattactatatatgttttgctttctcacttgatgagcggaaaataccctttaccttctgtttgacttctgcagaaacgtgtgtgattgtagaggctcaaatagcaattaaaacaatactgaaagtatttttaacactaggcatccttaagtgacggtataacttacatgattttgttaataaaaatagaaacaactatggtttttaatggactttagacattatcagagaagattgttacttatttgaactgtttccaaaaatcaaatggggacagaaaaggaagcttttaaaaagtacagtctttctcctagaaacccttcctaaaatctttggtgacatcgtaatcttatccctgtactttccctccttgtgtctaatcatttgccaagtcctgtcattctacctttgcagcatctcttattatatctgcttcctctattccatctctactgccctagttctgacctttgtcatctttccctaggatcattataatagataactagtgttttccctatctagtttgtcacttaccgcctaactttatactcttcttagttttaatcacttacctccctacttcagaaccctgctacctttagaaaacaaagtaaatgctttagtaacattcaaggccttccccgttccctgttccaagtctgtttttttttccactgccatgtagatctttgttcattctatgtagtggctaattcctaaagatgttctttactttcttttcttcatcctgcttttcatctctttgaaaaaccttcccccaccaagactcaaatcaaatgttgtctctttgatgatgacttccaagatccttctagtcatacttaatcttctctcttaatttttcttatactgtaatatttgtaactctatagtttgatatcatactatgctgtattactactgcttaaaactttctcttccacattagttttttaaactttgttggtttttttgttttgtttttgagacggaatctcactttgttgcccaggctggagtgcagtggtgcgatctcggctcactgcaacctcacctcccgggttcaagtgagtctcctacttcagcctcctgagtagctgggattacaggtgcctgacatcatgcccagctaattttttttgtttgttttttgttttttgagacagtcttgttctgtcacccaggctggagtgcagggtgtgatctcagctcactgcaacctccaccctctgggttcaagcaattctcctgccttagcctcccaagtagctgggattataggcatgcactaccatgcctggctaatttttgtatttttagtagagatagggtttcaccatgttgaccaggctggacttgaactcatgacctcaagtgatctgtccactttggcctcccaaagtgctgggattacaggtgtgagccaccatgcccagccccaatgttccaagtcttttttttttaaatcaatatgtttttttaaatgtgtattttttgttacttgcttgtttaacccataacttcctaacttttacatctctctggrtactctcttcatatttatgtatgttgcattgctttactcacgtttgcgttgttatgctcatattatttctttccttccttaaaactttaagtacatttcatatattcttttatatgttataaagcatgatactaaaatgatcacctgtgcacatactacccaatttgagaactagaaccttgctgtacccctgaagctccttatatgtatctccctgattacaactctccctctcccaagaaatataatgttgcgtttaacattttctgctttctttatagttttacctcatttatatctttaagcaatatattgttcaattcaatttgatttttaaactttatatagartatcrtattacacatatycttggtttttcattcaacattgcgggggatgggcagaagatgatgaggtgagaaggcgggcagggtatgttttctggttaaactatttattcttggagaatcagagaccatatcttatatacccctttaataacctctgtttaacacgaggcctactgttgcaagctaagtctcctgatgatttgcactgacattgaaacattgctgttgtctctataagtatgaggaaacccaggggaaccctgtcatactctttcctcaatggatgcttttagcaagtttgatgaattgttgatgaattagatacctcgctagaaggacatatttgatatcagttgatccatttgggagtgatagtgtggtctagagaccttttctcccctatcactacagctttagacacaggacccagggtggatggtaaagtgtagaaaatgtttgtatattagatcgttgtttctaaatgcatagatctgaaagtacaaattaaagtgtttggttcaacatgtgtttatagatacctggagcaagtatagatagaaaaaaagtgaaaatgataaaaatgaaatactcagaacaaaatggtttggtgactaagacagtggactaatgtgcacagggttagaagggatgagtaccaataaatcacaaagtattaatatttaatataaaatgttactagaattaaagcaaattggggtgcttttggaattttcataggtgagcagcagccttcccatcccctgctccaagttgtactttacttagctttttaggattagatgttcattgatgtccatttgtttaatgatagtgaactggtagaatgaagattattaagagattggaaagaagtagccagacgtggtggcttacgcctgtaatcccagcactttgggaggccaaggcaggtggatcacttaaggccaggagtttgagaccagcctggccaatatgacgaaaccccgtatctactgaaaacacaaaaactagctgggggcatggtggcgaacgcctggaattccagctacttggaggcttaggtaggaggattgcttgagctcgggaggtgaaggttacagtaagccgagattgtgccattgcactacagccagggtgacagggtgagaccctatctcaaataaataaataaataagaggaagaagtcacttaaaaaataaatggatatcaatgagaaaagagaaatatttctagataaaaattccatctacttatgatctaaacattaatgctattttaacaaaagaaacatgtaaacgctttgattattcttactgctagttcctttgacaggtaagattcccaactcttaaggcaaaatgatacaaaaagtaattcatttggttaatgaaaatttgaaaaaaattattacattcttcactcatattctgcatatcttaaactcctgaaatagatattctaaacaatttaaaattaaccctgttagcaaaggatatggtttaggaatttttttttttaaactgctcacktgttttattgtgaatgaggaaaattagtataattatttgtatttgtttcaggaaagaascacttgtaaggaaatatagcatccattgtgaaagtggaaaagtaaagataattcatcatgcctgctgtggcttcagttcctaaagaactctacctcagttcttcactaaaagaccttaataagaagacagaagttaaaccagagaaaataagcactaagaggtatgatgtatccttygctagtttgattgaatcaaatattaatttttagttcgtttccatattaaagttagatgaatgttaaagtttatttgaaaaataacaccatcacacgaataaagtaggacctccttagagaaagttgtaatgtaatcgtagcacaatacatatatattctgctcatatgcatattatctactctccagacagatcatacagatatgatctctaggtcataaagtttaagaggcaaagattatgaggcttctaaaaaaaaattcagccrgaagtcattgtcttttcataaaacgatacaaaaataattcctttttggccgggtgcggtggctcacgcttgtaatcccagcactttgggaggccaaggtgggcggatcacctaaggtcaggagtttgagacaagcctggctaacatggtgaaaccccatttctactaaaaatacaaaaaattagccgggcgtggtggcgcacatctgtaatcccagctactcgggaggctgaggcaagagaattgcttgaacccgggaggcggaggtttcggtgagccgagattgtgcgattgcactgcagcttgggcaataagagcgaaactctgtctcaataataataataataataataataataataataattttttttttccactttgggaggccaaggtgggcggatcacctgaggtcaggagttcgataccagcctcggcaacatggtgaaaccccgtctctactaaaaatacaaaaattaacttggcatggtggcataggcctataatcccagctagtkgggggctgagggatccctgagtccaggaagtggaggttgcagtgagtcaagattgcaccgttgcactccagcctgggtgacagagtgagactctgcctcaaaataaaattaaaaagatcttttgaagggcagaaagtaagagagggattgggctatttatcttgcgaagttgggaagttgatgaggtgacagaaaacaactctaactcctgttgaatgattttcagatgggaaacaatgggaaagataaagccacctttagataagacaaggtcaggcctaagaccgtttattcctttctagtaatgtctggtttacctctagcactacccttatcccagaggaagtggtatatgtaagttggttgtatccaaacttgcatctaactttgtatcagttctgaagtagtggaacctaaataatgaaatttgctttatcaagatcagtggtccccagcctttttggcaccagggactggttttgtggaagacagtttttcaatggaccagggttagggaggatagttttgggatgagtcaagtgcactacatttattgtgcactttatttctattattattactctgtaatgtataatgaaattattatataactcaccataatgtagaaccagtggtatccctgagcttgttttcctgcaactggaccatcacatctgggggtgatggtcgacagtgacagatcatcaggccttagattctcataaagaatgcgcaaccttggctaggcgcggtggctcatgcctgtaatccgagcactttgggaggctgagatgggaggatcacttgaggtcaggagttcaagaccagcctgactaacatggtgaaacctcgtctctactaaaactaaaaaattagccaggcatggtggtacactcctgtaatcccagctacttgggaggctgaggcaggagaatcacttgaatccgggaggcagaggttgcagtgagccaagatagcccattgcactccagcctgggcaagaagagctagaccccatctcaaaaaaaaaaaaaaggagtgcacaacctagatccctcacatgtgcagttcacaatagggttcgtgctcctatgggaatctaatgccaccatgatctgacaggaggtggagctcaggtggtaatgcgagcaatggggagtgactgtaaatacagatgacactttgctggctaacccaccactcatcgtctgctgtgcgtcctggttcataacaggccgtgaaccagtaccaatctgtggccctggggttggggatccctgataaagattatctgtggactttgtatatgacctgtattttttcccagatgtcaattgctttaattattattttttctctaattttaagttatgtgcacagtgccctgaagatctttaagacagcagaagaatgcagattagatcgtgatgaggaaagggcctatgtactatatatgaaatacgtgactgtttataatcttatcaaaaaaagacctgatttcaagcaacagcaggtaccttttatttttgcattgttatttcctaagttattttgcataatggagctattgatttttttctaaaaattttaagtaataatgaaatgtagctcaaattatatgcagcatgatctcatgtagatagaaaaagggaactaaagatacagtgttatwatttacaaatgtgtataatgtgtgaactcgtacacattcttggatttgccatggattagtacaagtttatagcaacatacagattcataatttttttctgaggtaattaataattgccaggtcaagtagaaggattgagtttgctcattaagtaagaaaacatgactgtgtttttttttatagtacttttattgcgctttcttaagagtcaaggtttagtctcttgtttttatgtgacagctttttatatatgactgacattgtacccatattacaaatgtcagtttgcaaaattgatactgatcactccctaaatcttttttttttttttttttttttttgagacggagtttcactcttgttgtccaggctggagtgcagtggcgtgatatcggctcactgcaacctgtctcctgggttcaagcaattctcctgcctcagcctccygagtaactgggattacaggcatgtgccaccaagcctggctaattttgtatttttggtagagatggggtttctccatgttggtcaggctggtctcaaactcccagcctcagttgatctgcctgcctcggcctcccaaagtgctgggattagaggcataagcctctgcatccagcccactcaccaaatctttaaacttctttttgcttttaatcctttgaacaggtgcttgtcttccatttgattgaagccatggatagggagggcaggggcaatataaatgaatagaaaaaattgatgactaggataagtgttgatagagaaaatagatgtatttcaattgtattagaaactagcaaaagaatgctgggcacggtggttcacacctgtaatcccagcacttttaggaggccaaggtgggtggatcacctgaggtcaggagttcgagaccagcctggccaacatggtgaaaccccatctgtactaaaagtaaaaaaaactagctgggcgtagtggcgggcgcctgtaatccaagctgcttgggaggctgagacaggagaaccacttgaatctgggaggcagaggttgcagtgagccgagattgcaccactgcactccagctccagcccaggtgggcgatagactccatctcaaaaaacaaacaaaaacaaactagcaaaaaaagaatatgaagaatgtagaggttcattaaacaaaagtgaagaatgttgtgttgctgggtttacctttacttagaaacaatcttattacctgtcagtagtaacaaaatactgcctatagaattttcacctggtagagaagccaccctcaattaataatgagattttattttgttctctggtggtagaattggcttctattgtttaaattgacttactgaaataacaaaatttcgtttgttctttgatgatctttttaaatttttttaatttatttactttgagagagtctcgccctgtcacccaggctggagtgcggtggcacattctcagctcactgcaacctccacctttcgggttcaagcgattctcctgcctcagcctcctgagtaggtgggattacaggctcttgccaccatgcctagctaatttttttgtatctttagtagagacggagtttcaccatgttggcccagctggtatcgaactcctgaccttgtgatccgcccctctcgttctcccaaagtgctgggattacaggcgtgatcctgtgagccactgtgcctggccacttatttttatttttagaggagtgtgacttttggttgttaaggaatgactttaatattttacttaatggtgataaatcattgctggtatttcttctcattagcaaagttattctaataatagttactaggttttttttgttttttgtttttttaaagacggagtctcactctgtcgcccagactggagtgcggtagctcaatctcggctcactgcaacctctgcctcccaggttcaagcggttctcctgcctcagcctcccgagtagctgggactacaggtgtgcaccaccacgtccagctaatttttgtgtttttagtagagatgggctttcaccatattggccaggctggtcttgaactcctgacctcatgatccgcctgcctctgccttccaaagtkctgggattccaggcttgagccatcatgcctggccaattactaggttttaaatctgtctttgaagagggggccccttgcatttggaggttcattcatctgtccacaatggatgaattagtcctgccctgggaaaaatactgtttaatatttttggccatacttatctgcaggtaagagacagaggccttcctaaattcaaacaagtttttgcacgctctgtraaatatgttaaagtggaattgcttaaaacgcagtgtaagtggtgctcactaaagtaaatatttttgaaagtcttaaaatttggataactttggtagttttgttgtttgctgttttgtttgtgtggtaggtttttttttttttttttttttttaaggtgacagtcttgttctgtcacccaggctggagcgcgatggcatgattttggctcactgcaacctccacctcccaagttcaagtgattctcctgcttcagcctcccgagtagctgggattacaggcacccgccaccacgcctggcctaatttttgtatttttagtagagacagggtttcaccgtgttggtcaggctgatctcgaactcctgaccctcggtgatccacctaccttggcctcccaaagtgctgggattacaggcatgagccaccatgcccaaccagttttttttttttaatggtcttgtttactttttgctttattttggaagttaatagttattttttttctatgacaaaattgggaatatttttgtagccgcctttttttttctcttcttgagaaggtagtgagtacatttaaacagatgagatttttccatttccagagtctctattgcatttccaaagggagtatgtaggcagagaagtccaggctgagacgctccctgcaaaggctcaggtaacttaggccattatttcatatgattcagtagttcatttcctgtttttcagtaaaaggatcattttcatttgctctgtccagaggatctcatctgcttctgtcttagaactgttttttgtttgttctgagacagaatctcacttccgtcacccaggttggagtgcggtgggcacagtcatggttcactgcagcctcgacttcctgggctcagctgattctctcacctcagcctccagagtagctgggagtacagacacgcaccaccacacctggctaattttttaatttttagtggaaacgaggtcttaccctgttgcccaggttagtcttgaactcctgggctcaggtggtctgcctgcctcggcctcccaaagtgctgggattacaggtgtgagccaccttgcccagttgcagaactgttttctgttttttgttatatttttctgtagcccagcctctctagtgtacttcagctatgtgaggtgctaaatttactaacaagatattttctattttttaccctttagatgaggtagggactgaatgtatgtcattgaacttccttagaaacttgtattttcactcttattttatactagaaaatgttagagatttaggctgggcgcaatggctcacccctgtaatcccagcactttgggaggctgaggcaggtggatcacttgcggtcaggagtttgagaccagcctggccaacatggtgaaaccccatctctactaaaaatacaaaaattagcagggtgtggtggtatgcatctgtagttccagctactcgggaggctgaggcaggggaatcgcttgaacctgggaggcggaggttgcagtgagccgagatcgcaccactgcactccagcctgggcgacagagcaagagtctgtctcaaaaaaaaaaaaaaaaaaaaaaaagcctgggcacagtggctcacgcctgtagtcccagcactttgggaggcagaggcaggtggatcacaaggtcaggagttcaagaccagcctggccaacatggtgaaaccccatctctactaaaaatacgtaaaaaaaaaattagctaggtgtggtggcaggcgcctgtaatcccagctacttggaaggccgaggcaggcgaattgcttgaacctgagaggtggaggttgcagtgagctgagattgcaccactgcactccagcctgggcaacagagcaagactccgtctcaaaaaaaaaaaaaaaaattgagatttagataaaacattaatttagcaagctctctcaatagtagagaaggacactacattttattacttatcaaaaagtcatcttatgaataattctttcagggttatctgaaaaagtggggaaagaaaatgtattgaaaatattagtgtagcgaattctagataaaattagaattgtattttaaaatttttatggtattcttgataattcttcattggtaaacctatttttgtttaggaaatcatgaaagttgtttgaattcatatattcaggaatcaggaaagttctggtaaacctcagaagcaaacatttttagttatgtaataattggatgttatctttttcttctgtcaattatcatactattgaaattttggaagtatttatatttactttaactgtgctcctttaagagcacagagataaataattgacaggaaatctcactaatattaggggaatgtctgatagtgtgtaacagacatgcccaaccataaacaattttttgtgtttaaataggtttaagctgggcttacaggctggctttttggtgagttcatgtgtaaaaatgaataaaacaagttatagcatttttggttttactttgtattttgtatttattcagaatgattacattatgatttctgttaaatggttctgttaatgtaatgattacattgtattttctgttgagagaattgcatcagtagtcaggacatggtgtgctaactgaaattattgtaatgttcaattgatacgatattgaacaaactgtacacttttattggaattacatagtraarggtccttctagtatatttaggctttagaagaatcagccaaacaaagcatgatctacttttaggctagatagacatatgataactcttatcaacagactttttttgagacagggtctcactctgttgctcaggctgaagtacagtggcactatcatggctccctaaagccttgacctcctgggtacaagctatccacctgctttggcctcccaaagtgctgggattacaagcgtgagccacctggcctggccatcaacagatttttcttcttaaaaataagtcttatgttaactgggacacaaaaattaaatcttttgctatatcactcatattctgttcttgtgttaccacatacttttttgaaattaaaaagtgtttagaatgatagattattgagcactggtatattgaattagagctcaggtccagtttttctaagttatttataataatatttgtaaatgtctggcagttttctttagaaaaatttaattcttcatatgctccaggttgtattgtgctactggacgctggtcttatgggaatgaattatttactgttagtttttgttgttgttttcaaacggagtcttgctctgttgcccagactggagttcagtggcactgtctctgctcactgcaacctccacttcttgggttcaagcaattctcttgcctcagccttccaagttgctgggactacaggcacgtgcctccacgcctggctaattttcatatttttagtagaaacgggggtttgccatgttggccaggctggtcttgaactcctgacctcaggtgatccacccacctcagcctcccaatgtgctgggattacatgtgtgagcccctgcacccagcctactgttagttttttttttcttttctttttttcccctccgagacagagtttgactcttgttgcccggggtagagtacaatggcgtgatctcagctcactgcaacctctgcctcccgggttcaggtgattctcctgcctcagcctcccgagtagctgggattacaggcgcacgccaccatgcctggctaatttttgcatttttacgcttattttttttttgtcttttttttttcttcctttttgtggggaacggggtctcactatatgcccaggcaggtctcaaactcctgggctcaagctatcctcctgcctctgcctccctgagagctgggattacaggcgtgagctaccgtgcccagcctaatttttgcatttttagtggagacagggtttcaccatgttgctcaggctggtgtcaaactcctgacatcagatagatgatccagccrccccagcctcccaaagtgctgggattacagatgtgagccaccgcacatggcctactgttagttttgatctgcctagttacagaagttatgtttgtttatttgtatcatcagtaatctagaagttatatatatttatatgggctgttagatatgtttatatggctccaccattgcagctcttcatgactgagagccaaagataggtacttctgacctacaacccttctttttacaaattatgattattataatttgtaatgaactgtgctagtaggctctatttgcaaagtcatattgacatgttgtggcaaattggatccagtaatcatttaactgacttaactaactactgcaatgtcataccaaccttgatttgaaaatatctgattgtagtatctaatgattgacctcttgtatctaatgattgacctcttggagtagtgatttaaaaaacaacaacaacaacttcattgtacttgttagtaaattatatgccaaatcttttaccttttgcattttttaaaggtggaattttttttttttttttaagacagagtttcgttctgtcgcccaggctggagtgcagtggcgcaatctcggctcactgcaacctccgcctcctgggttcaagtgattctcctgcgtcagcttcctgagtagctgggattacaggcacataccaccacacccagctggtttttctatttttagtagacatggggtttcaccatgttggccgggctggtcttgamctcctgtcctcaagtgatgtgcccgcctcggcctcccaaagttctgggattacaggtttgagccactgcacccggcctagattatactattaattatttattttctatcatttggtttttagttgcttmgagtttcctaatgtgtaaaacttgttttatgtatcaaaagtgttttgactccagttgggatgtgagtagctattctaaagtacaggtggaagcaaaaatatctgtttagaacaagtaaacaaaacacattccatgttgtgtctgtacacaatttgctttattgtgagactggagaaaaaactaggtacatatttttaataagaaaatatactttattcttgaaagctttgctctttggcgcttactcaaaaataacaatgttatttatactttttaacagagacttacaaataagtcaaatttatgaactagtggatctttttaacttactaatggtatgaagacatacttttgagacatttggagaataaattatacatttacataggttaaaagtttttaaaaatcttccattgtaataaaacaaacttccctttatataagcaccatgattttaatgattttaacactagtgtcacatgcaatgccgagaactaacaatatgggatggttttcctataattttaggattatttccattcaatacttggacctggaaacatcaaaaaagctgtcgaagaagctgaaagactctctgaaagccttaaattaaggtacagatattatgaaatatttaaaataatgtaaatttagaagataaaaataatatttaagatttaccgatttatatctgacgattcatataatattccaatttttttttgagacagagtctcgcgctgtctgtcgcccatgctggagtgcagtggcgcgatctcggctccctgcaagctccacttcctgggttcacgccattctcctgcctcaacctcccaagtagctgggactataggcacccaccaccacgcccggctaattttttgtatttttagtagagacagggtttcaccatgttagccaggatggtctcgatctcctgaccttctgatcctcctgcctcggcctcccaaagtgctgggattacaggtgtgggccaccatgcctggccccaatatttctttttttttttttttttttttctgagacggagtctcactgttgcccaggctggagtgcagtggcgcgatctcagctcactgcagactccgcccctggggttcacgccattctcctgcctcagcctcccgagtagctgggactacaggcgcccgccacctcrcccggctaattttttgtatttttagtagagacggggtttcactgtgttagccaggatggtctcgagctcctgacctcaagtgatccgcccgcctcagcctcccaaagtgctgagattacaggcgtgagccacccggccccaatatttctaatttataatatttgtaagtttctggcattattctttagaaaaattcaattcttcatatgttctttggtggattctgctcctggatactgtgcgtataggaatgaagtatttactgttacttttgatctgcttagttacagaagttatttaaatttggaaaaaaaaactgattctggtatttgccatgacttgcttaccaggtttacaaaaataattacaaaacaaaaacagtatgtttcagtttttagtcgttagtcattcttttttttttttttttttttttttggagacggagttttgcctcttgtttcccaggctggagtacaatggcctgatctcagctcactgcaacatttgcctctcaggttcaagtcattctcctgcctcagcctcctgagtagctggtattacaggcatgtgccaccatgcctggctaattttgtatttttagtcgagacggggtttctccatgttggtcaggctggtcttgaactcctgacctccgatgatctgcctgcctcggcctcccaaagtgctgggattatagccatgagccactgtacccggccattagtcatkctttaaaatttaaattgtttcccttatcaacaacataatgctgttatgtagatcctagtagataaatttctgcctgtatctgtagcataaaaaatgttaatagataaaaccaaaagcattctcagcaatatgatacagaaggagagaacaatggaactggttttaagtgatacaaggtgccaaagcctggttagtgaaaaacagcaaactgagagctgtttgatgcaaataataaatagaaggaggaaactgaaagatttaaccagggtgacatatttctttactggcttgaatttttttttttcactaagaatgtatcatgttacttgtatttaaaaatattctgaccaggagcaatggctcagtcctgtaatgcctgcactttggtaggcccaggcgggcggattacttgaggccaggagtttgtgaccagcctggccaacatggtaaagccccgtctctactgaaaatgcaaaaaaagttagccgggtggggtggcaggcagctgtagtcccagctactcaggaggctgaggcaggagaatcgcttcagcctgggaggcagaggttgcagtgaactgagatcttgccactgcactctagcctgggcgacagagtgagactctgtctcaaaaaaagaaaataactctcaacttataaaggaagtcattaagaaaatgattcattatttagatatttacttcttatggcctgatagaatggcccatctttcagtgtaataaagtccctgttgctaaataacctctgggtcctttccaattctaaggctttttaaatgtactttgaattttcctctgtataggttattttgcagctagatgtggagaaccttttcactgtttttctccctgtctgtcctctcccagcctcctgccccatgttggtgtctttcatggacatttagagcaaccctgtgtgaacatatcttcatatctgtcctgtcctaattctgtaataagtcaaccacaaagctcttttcctcctttaagtctctgaaatctgcatgactagaatttctcttgtcaggccggcagtctgagaatgggcatgagggagggtatatgctctctaggtttggagaatagattataactttaaagtgaaagcccttaacatcttggggtagattttctgctaaattctgcctaatcatctgatgtcatggtctatgaccacggaggcrtgtgtgccgagtggggtccgtggcctgctggcccctgtcctaggggtggccgcatggtcccaggtgcggccgctatagacatagccccagattctgaaaaaaatgctttagcaaaaagacctagtgagtggctagaaaatagatttcagtatcacctgccattaaggaatacttgttaagcatttatttgcctgtcccgtttcttattattatcttttttcatggacacctctcataacatagacttaatccatttctgttacattcatgttaggggaggtcttagaggtaattttgaccaaatctggaagtatcagaatcctagtaaaagggattaagtgggtaaaaggatcagaagttagtttcagagagcatgcctcgctctcacttcagcttaccaactgaaattggaaagtaggagagacatcagctctatttaattagatttatggagactgtagaacaaatccaaggtagggggtaaggtgtggataagagaagaaaataggaaaaaagagaatcttaaagttttttcatttctgccctcaaattggatttaggctgactgtgcttacttcttagggcagacagttcacatactgttccagcatagagcactactagagaagaaatatagagcagtaggtaagtgtacggagccagactccctggktatggatcccagtttttttcttattaattgtgtgagcttgggcaaattacttagcctccctctgcctcagtttcctcatctgtaactaggataatcataaaacctacctcatagtgcattaagaaaattaacatttacaaacacttagatggtgtctggcacataccaaataataagtttttgtgctattattttcgttgttattaacagtggaagcattcttgttctgtaacacctttcgtcctggcactctagtgatttgcattgaggaggcaaggtaaaacagttgcataattttgctcttgttccaaatctttcacttctgtttctaacagtgaaatgatgctagcatatgagataggcaggaaagtggtgttgatrtttccatagagataataggaatacatgcttgctattctgtgaccaagttcttaacacagtgcagtagagaagtgggggaagtgagcataccagtaagcaaggtcctgctggagatttgagaatccattatccctggttattgcctaagcagatggaatatgatgaaacatctgtttttgtaaaattctrtctgaagttactctgtttttcttttctcctctcacatctattgatgggttcatcattcacttttgttccatttrttttattttaacacactgattttcataaatctattgttttcccagtagaactttataatttattttgaartattttctaatttccctttcttccttgacccatgggtcatttagaaatgtgttgtttaatttccacatatgtgggattcttcttatatcttattgatttctaatttaatttcattgtggctaaagatgttgcgtccttttaaatgtattcttgttttatggctcagcatatggtctcttggtgaacgtaccatgtgcacttgcaaagaaaatgtggttgttgaatrtactgttctctatatgtcatttaggtcagaatggctgataatgttcagatcttctttatctttactgactgtgggatgggggttcaagttgtaacaattactgagagagtcatgttaaaatatttaactgtatctatttatgcctttagttctctcagcttttgtttcatgtattttgaaattctatttttaggcacatagttacagtttcttgatgaattgacctttttatcattatgtccctctttacctctgggaatattctttttttttttttttttttttttgagacagggtctcactgtcctgaaggctggagtgcagtggcatgatcttggctcactgcaactcccgcccccaggttcaagcgatcctcccacctcagcctccccaagtagctgggactacaggcgcacaccaccatgcctggctaatttttgtattttttggtagagatggggttttaccatgttggccaggctggtcttgaattcctgacttcaggtgatccgcctgccttggcctcccaaagtgctgcgatcacaggcgtgagctaccacacccygccctcatcttcattcttaagggattttaactagatacaggattctaggttggcaggttttaattttcccttttgtcacttcagagctgctattccactgtcttctggcctccattgtttctgatattaagcatttttctgcctcatttttattttcttgctggaactccagctctacatacgatagactttttgattttgtccaatgaatccctaaggatttgttctttttattttgttttgttttgttttaatcattttctctttgtttttcagattggataattttcttttcttttttttttttttcagatggagtctcactctgtctcacccaggctggagtgcagtggcacacgatcttggcttgctgcagcctccacctcctgggttcaagcaattctcctatcttagcctcccaagtagctggtactacaggtgtgtgccaccacacctggctaattttgtatttttactagagataggggtttaccatgttggccaggctggtctcaaactcctgacctcaggtgatccacccacctcggcctcccagagtgctgggattacagatgtgagccaccacgcccagcctggattgaataatatttatcactctttcatcctttttttcttttgagacaatgtctcactctgttgcccaggccgaagtgcagtggcatgatcccagctcactgcatcctcaaactcctgggctcaagcaatcccacctcagcctcctgagtaggtgggactaaaggcacacacctctgctcctggctaattttattttttatagagatggggtctttctgtgttgcccaggatggttctcccttcaaatactgactctttactttgtcatctccaattttgtgttgagtgaatttttttcagttatatgtttcaattctagaatttcttcctttttttgagacagagtctcactctgttgtcgaggttggagtacagtggcgtgatcacatctcactgcaacctcagcctcctggcctcaagtgattctcccgccttcacctcctgaacaactggaactacagatgcacaccaccaggcccagttagtttttttgtgtttttttgtagagacagggtttcaccatgttgcccaaactggtctcaagctctgggctcaagcagtcctcctaccagggcctcccaaagagttaggattataggcatgagccactgcgcccagcccaattctagaatttctgtgtggttcttttttatagcgtctattatttttttacagagatttcctatttgttcatttattacaagcacattttcatttacgcccttgagcatagttataacagctgctctaaaatctttgtatgctaaatgcatcatcttagagtcagtgtgcagcaccttttctcttttattgttgtcctatttttctttttttggtactagtaactttggacattgtgaacaataaaattataggctctgcattcttctttagtcctctgaatagttttgttgttgttgttgttgttgttttgtcccactaggcagttaacttggctatactcaaacgttaagttttctgtcttgcctatggtaggtggcaactgacattcttttcaattcttctaaacttagctgggctccttagtatctgctgcaggtgtgcttaattcaggtgtcaggtggcaatttgggcaagtctatacaaagaatttggaactctggttctctgagattggggtctttattggaattttagctgttttcagcagtaaggcctgccttaggtgtgaaaccataaaaaatgggaatcttactaatgcccttcctttctttcaagtgtcaacccccatctactttcttcctgattatggcagttttccaatgccttcaggtagttataggttacccagagtttatagttgtctgtgagaggttcagaacaatggaaactactaagtcattaccagaattagaattctctttcctacctttattttttaaggcgaaaggatagcatttttaaagtagagtgtcgtgatcaccatgttcctgtcaatattagtgatcatttctgtcaatggaatacataattcagaaggaattgctaagcgtaaagatagaaactgcttaggccaggcggggtggctcatgcctgtaatcccagcactttgggaggccgaggcaggtggatcacaaggtcaggagttcaagaccggcctagccaacatagtgaaaccccatctctactaaaaatacaaaaataagtagctggccgtggtggtgggagcttgtcatcccagccactcgagaggcggaggcaaggagaaacgcttgaacctgagatgcagaggtttcagtgagccgagatcccaccactgctctccagcccaggtgacagtgtgagactccgtctcaaaaaaaaaaaaaaaaattaactgcttaatggccgggtgtggtggctcgcccctgtaatcccagcactttgggaggccgacgagggtggatcactttagaccaggagttcgagaccagcctggccaacatggtgagaccccttttctactaaaaatgcaaaaattagctgggcacaatggcatgcgcctgtaatcccagctactcgggaggctgaggcaggagaattgcttgaacctggaaggtggaggttgcagtgagctgagatcatgcctctgcactcctgcctgggcagcagagcgagactctgtgaaaaaaagaaaaagaaaaaaaagaaaagaaattaactgcttaaatatttagaggagaagcactgttttccttatatttcttccacttgaggaatagcacagctttgtgtgacatgctaatttcttctccaagagctaaagatgtaattcttgctaagtgcatgaatgatcttattgatagatggcacgtttttggtcactattaacatgatgttgaaaatgtgtggtacaaaataattttgagttcagaagtcatttttaaagtaaacttaaaattttaaatatgtgaagctggcacagttatttgaatagtcaccatttctattgtatagttttatctgtttatttagaaatttttcattttggaatattcactcaaaagagcatataagaccaggtgcggtggctyacacacctgtaatctcagccttttgggaggccgaggcaggtggatcacctgaggtcaggagttcgagaccagcctkgccaacatagtgaaaccccacctctactaaaaatacaaaaattaggtgggtatggtggcacacaccggtagtcccagctacttgggaggttgaggcaggagaatcgcttgaacccaggaggcagaggttgcagtgagctgagatcatgggactgtaccccagcctgggtgacagagtgagactctgtctcaaaaaagaaaaaaaaaaaaaaacagccagccacggtggctcacacctataatcccagcactttggaaggctgaggcaggtgggtcacctgaggttaggagtttgagacaagcctggycacatggtgaaccctgtctctactaaaaatacacaaattagccaggcatggtggtgtgtgcctctagtcccagctactcaggaggctgagtcaggagaattacttgaacctgggagatggaggttgcagtgaaccgagatcatgccagtgcactccagcctgggtgacagagcaagactctgtctcaaaaaaaaaaagaaaagaaaagaaaaaaaaaagaaaaaaagagcatataaaatgtaaagatacaataaagagaataataaaatggaaactattgattcgtcttttactaattattgaccctagtcaattatttatttttttcctttacatctgttttatcttctctctctctgtctttaaatttgaagctcacagacattgccaagcattgataattagggcaaacaagattgcaggtctatgataacgtacagtctgtcctggcaataatagcaaacattgccattcgttcatttatttatttatttagagatggagtctcactctgttacctaggctggagtgcagtcacgtgatctcggctcactgcatcctccgccttcccagttcaagtgattctcctgcctcagcytcccaagtagctgggattacagacatgcaccaccacgcccagctaattttgtatatttagtagagatgggatttcaccatgttggtcaggctggtctcgaactcctgacctcacatgatccgcctgccttggcctcccaaagtcctggattacagatgtgagccaccgcacccagccacctataatttagtagggaatagttctaaattcctcagatatctgctaactgtagttcagatagctgtttaactgccaacaagttggaaatttcagtgaagtcatcctttaaaaaaatgtaacttgggaccttggtaagactttccacagctttttgaatgtttgttttcacatttttattctaaattatcaacataagtgtgatatttgggctgtttcttttgcagaaaaaattaggatttttcctttgaaaagcaaattgcagcagatttgaatcaatataaaaggttgaaattagtaggagagaaagrgcaaaaagcactaaataatttcaacttgagaacatacagtttctttttaatagttctgggcaatttgaagtaaatctacagatggcctcaggyggcagatgtgtgaattgtggtggagggagaaagcatatagccatgaaatacctcaaggcaggatactaattttacagaactgaaactcctttaatttccacgattaacgccaataaaagrcaatcttgacttattttttcaactagatatgaagaagctgaagtccggaaaaaacttgaggaaaaagacaggcaggaggaagcacagcggctacaacaaaaaaggcaggaaacaggaagagaggatggtggcacattggctaaaggctctttggagaatgttttggattccaaagacaaaacccaaaaggtatttcaaatttaatgtgtgagttaaaagactgtttctgcttgttagatgatttgcttaaaaagagttgagataccactataaagttcttttaggcaacaaggatgaaatttaatgttttaattagaaatttatttaaggctgggcacggtggctcacgcctgtaatcccagcactttgggaggccgaggcgggcagatcacttgaggccaggagctcaaaaccagcccggccaacatagcgaaaccccgactctactaaaaatacaaaagttagctggatgtggtggtgcatgcctgtagtcccagctactcgagaggctaaagtaggagaattgcttgaacccaggaggcagaggctgcagtgagctgagatcgtaccactccactccagcctgggcaacagagcaacactcttgtctcaaaaaaaaagaaaagaatttgaattaaatattctagcctcagttgacttcagatttttctgtgaatttctatggcaatattttctctgcattaattcgttttttagcagacattataaacttaattagagcaatagaaaaatcatttgagctgagctgtgatttattatatctgcattctggtcctatgtcaaaacttttttaaccactctgggactcagttttcttgtttcccaaattatagtcttraaatagacaatttttaagtttcttctttctaatcatgtaatttacattaaaagatttagtatactactttgtttggtaccaagccttttatctgtttctgaggtctcattctttttcctttgctttctccttctttttctcccccagttcccccacccccccccytttttttttttttttttgagacagagtctcattcttgtcgcccaggctggaatgcaatggcgtgatctcggctcactgcaacctctgcctcccaggttcaagcgattctcctgcctcagcttcccaagtagctgggattacaggcgcccgccaccacacccggctaatttttgtatttttagtagagatggggtttcaccatgttggccaggctggtctcgaactcctgacctccagtgatctgcctgcctcagccttccaaagtgctgggattacaggcatgagccaccacacctggctcttctttttttttttttttttttttttgagacagagttttactctgtcgctcaggctggagtgcagtggtgcgatttcagctcgctgcaacctctgcttcccgggttcaactaattctcctaggcttcagccttttgagtagctgggattacaggcacccaccaccatgcccagctaattttcgtatttttagtagagatggggtttcaccatattggccaggctgttcttgaactcctgacctcaagcgatctacccaccttggcctcccaaagtgttgggattataggagtgagccaccactcctggcttctcccattttttcacatctatttagtgactacttgtggtcttttcagctacatcatctctttgctaaaagccatcagtgacttagtctgtagctgccagctatcaccgtacctcccttcctttacctcctcagaaactactcttcctaaaatataagttgaaatccatgggaaaatttctgctttgatttttttcttagacattttgtagctttcagttatcattctgtgtggatcatcattcctttcattaaaaagtcgttgttggctgggtgtggtggctcacacctgtaatcccagctctttgggaggccaaggtgggcaggtcatttgagtccaggaatttgagaccagcctgggcaacatggaaaaaccctgtctctacaaacttttttttttttgagatgcagtttcgcttttgttgcccaggctggagtgcagtggcgcgatctcagctcactgcaacctccacctcccaggttgaagcaattctcctccctcagccttccaagtaactggaattataggaatgcaccaccacgcccggctaattttatatttttagtagagacaaggtttctccatgttggtcaggctggtcttgaactcccaacctcaggtgacccgcccactttggcctcccacagtgctgggattacaggcgtcagccaccgtgcctggcctctacaaacattttttaaaaaattagccagtcatgatagtgcacacctgtagtcccagctactcaggaggccaaggtgggaggatcacttgagcccaggaggtccaggctgcagtgatcatgcaactgcactccagcttgagcattagagtgagaccctatctccaaaaaaaaaaaaaaaaaaaaggtctaagtgggtcctttgtttccccatggataaaatgagttagtaccatacaggattatcccatgttgtcttggttaaaaaatgtaaactacataggccgggcacagcggctcatgcctataatcccagcactttgggaggctgaggcaggcatatcacaaggtcaagagatcaagaccagcctggccaacatagcaaaaccccatctctactaaaaatacaaaaattagctgggcgtggtagcacacgcctgtaatcccagctactcaggaggctgaggcaggagaattgcttgaacctgagaggcagaggttgcagtgtgccaagatggcaccattgcaatccagcctggccacggagcaagactccgtctcaaaaaaaaaaaaaaaatgtaaactacataagcaatactttgtattagttcattttgctttaattatgtggtggaggacactgaatgggatagccagaatttttgtttgattgtaagaagtactttctaatcaaattaaatattaaatttctgtagcagtttgtgctgttaaattatatttggtctttaattgaagtaaattttgaggaaatgttctatgattctgaaagattgctagttattttagctgttgtctactgccaaagaaaccttttaatatcattattattcatctgcgtttttataaaaggccagtactctgcacagttcgtttcttagagtttccatttaagagaagtaaatgaagtattaaagttgaattttttgtgtctatgaaagttgaaactttttttttttcctatgcaatagagcaatggtgaaaagaatgaaaaatgtgagaccaaagagaaaggtaagtgtgtacagaaggaggaagttgttttaggttctgactgagatcttttaatcagaataagcatcaggttttatacaatgagattcttagcattgttgtctaatctctatgtaagctttatcatttttcctagtctgtacaattatattgaaaatgtctgaggttatttttatgtatttatcatggggggatattttatgaataattttaaccttacatgttaaactggtcatatgcagttgaaaaatgtcaaaacsaaagcttgtacttgttttcttttcaacatgcagtttagcaataatggttaagagcatggactctcagaagtcaaactgcyggagtttgaatactggttcctcctctccctttccgcctggttttcagaatgttgcttaaacattctacctttgtttccttgtctgtaaagtggagataataatagtacttatttcatagggttgttgtcagggttgaatgagctaatatatgtaaattcttagaatacatggtaaactttaagtaggacttattatcatttatgactaggttgtagatttaattttttctccccccatccatcctgtggtcaaagactaaattatttaacagtcatttacatcccccataaaaaaaaaatcgaggccaggcacagtggctcactcctgtaatcccagcactttgggaggctcaggaaggaggattgcttgagcccaggagttcaagaccagcctaggtaacatggtgaaacccctgtctctacaaaaaatacaaaaattagctgggtgtggtggtggatgcccktagtcccatctgctcaggaggttgaggtgggagaattgttcgagcccgggaggttgaggctgcagtgagccaygatcacaccactgtactgcagcctatgacagtgagaccctgtctcaaatccaaaccagtaatatggaaattatccataggtggcgttgatgctctagtgacaaatatgtgacctaaacaagactttggaattcctcttcatctgctagagacgttttcctctctcagaaaaggtttaccttgtctacagccataccacctaacgcgcccgatctcgggagcgaagcasggtcaggcctggttagtacttggatcagagaaaaggttgaacttaaacataattataggtaacagtaaaataaattctctacttaaaatattgccatacaacaattacaaaagtaaactgagtgtgctataaggtacttccctaaaagctgttactgattcattccaagattagtttttatgcatttgttcctttgtatgtcatcctgcttaaatgttgtccttctcagtggtttgttaacaacttttttagtctgttttgttagcatacacttgatggctagagatggaaggaggacgattgttagcagctataggtcttttagcataggagctactgagactacttttcttctcacagctcactgctgaaacagcttattatataatctcaactctcttgtagtgccttttaatctttcacttcagtagagctaaggaaaaatagtaacatagggaatatttattttgacagattgctgccctcccccaaaagtaaataaattaaatattgcattagctttacttagtttcctttttgttagccttcttagaaaacaaaataatcttttttccttctggctgggagctaacaaatgaacatcaagtagaatgasaattggcaaatttttcttaaagggatagatggtaaacattttaggcttggggaaccttatgggcttggagagtcctgtggtctctgacacaactattgatctctgctgttgcagtatgaaaaaatgtgtaaacaaactagtgtggcagtgatccagtaaaaacagatggccatagtttttcaacctctgatgtagaatagcaagcttttgacttgttattctaagaatacttggatatctaagtttttcaaaaagctaccgtaagactgccatcagagaccttttgaatttagaacttttccagaattttagaaccatagatatttctttcttccagttagcatttttctaatgtcttaatttttgaaaacatactattttcmtgagacacatatattaatgttctttattttatgttggtaacagagtcaataccaggtgtagctgtaaactcaacagaaagttttgatttttaagtctttgtaaacagagcatcgaactggtttcttgataaatgttaaaaacacaaggtcaggtatgtggtggctcacgcctgtaatcccaacactttgggacgccaaggtgggcagatcgcttgaggtcaggagttccagaccarcctagtcaacatggtgaaaccccatctctactaaaaatacaaaaattagccaggcrtggtaacagcctgtgttcccagctactcaggaggctgaggcaggagaatcacttgaacctgggaggtggaggttgcagtgagctgagatcatgccactgcactccagcctgggttacagaacgagaccctgtctcaagaaaaaaaacaagttgtatttaatgttagtttacaagataataaatggtatgatggagtagtaaatatgtggcatccatatatattcagtatactttgctcttctagaaaaagcggtttgtcctgtgttttgtgatgtcagcacatcttgtgctgtttcttgtcacttacactgtctctctcaattccaaggagcaatcacagcaaaggaactatacacaatgatgacggataaaaacatcagcttgattataatggatgctcgaagaatgcaggattatcaggattcctgtattttacattctctcagtgttcctgaagaagccatcagtccagggtgggttattgtgtagtaaagtagtaaactgtgtagtaagtagtaaactgtggaccttagtaaatgttactacttagcatccaagctaaatgtgataaagtagtcttttcctggtaactttttaaatctttgcctctttttatgtgtgtgggtggtgggggaggggagggggaggtacattttaggagcagaggtttaataggcaaaagaaagagaaagaagaactgctctctcacttttgagagtgaggggtgcccaagtgggatttccctaaatctttgcttcttaaagacacactccaccctttttgaaggttgaagttacggatttgccaacttttgatttggctgttttctcctattggtggtatttagaatcttatcaaaagagaaatgaagttgccttttccctctctccccagatgtttgttaactgatttttcctattattttctgtttataagcatgtgaatcgtatgtaccaaattgattaaaataatgaactaattgaattgttttacatactgaaattccctatatttwctgtgatacacgctacacaaatactttgtgtgtgcttaagttaaaagagtatagtctctgatgccagactctattcaaataactgtcacttactagttgcattattactaggtagtgacctaacatttctaagctcaggtttccatctgtaaaatggggataatagtagaacatatcttacagaggtttcaggagatttaaatgagaaacattatatacacatacacactttagcacaggtcctggcacgagtaaggacttaatttaaatttttttctttcttttttggtaagaaggcctttaacctatgaaataatttaaagtgacttgcatgggtatattgtatattggaaatcatggcatagtggcagagctaaacctccagataaagggctattttcactatttcgagcattcttatgcagatcctattacctctcttggtcttggtttaaaattatatatttttaaaattaggtaataaaatctgtatagttcttggcatattgcagatgcttgataaatgtttgamctgaagcgtagagtgctttgtaaataagctatttaaaaattagagctcttaggccgggcacactggctcacacctgtaatcccagcacttggggaagccaaggcaggcggatcacttgaggtcaggagttccagaccagcctggccaacatggtgaaaccccatctttactaaaaatacttcagccaggtgaggtggcgyatgcctataatcccagctactcgggaggctgaggcaggagagtggcatgaacccgggaggcggaggttgcagtgagccgagatcacggcactgcactccagcctgggctacagagggagactctgtctcaaaaaaaaaaaaaaaaaaattagagctctttgaggaagacgctgttgaaggtagtgctgagctgtggtcagcccgctcctgctcctgctgtactgctgttgctctcgcagaggaaccggtcggtcaggaagccgcacagcagccgtggcttttaaagatgctggaaaaacacccatggagccggagatagcaattcactgaattygaatcactctctatgagccacagcataaaatccctggagaaggtgtgtgctgacttgatcagaggagcaaagaaaaagaatctcaaagtgaaaggaccagttcaaatgcctactaagactttgagaatcgctacaagaaaaactccttttggtgacggttctragacatgggatcatttccatatgagaatccacaaacaactcattgacttgcacatcctttctgagattgttaagcagattacttccatcagtactgagccaggagttgaggtggaagtcaccattggagatgcttaagtcaactattttaataaattgattactggttgttaaaaatatatatattagagtactcagtctaattaaacatgtgaatatattcccaggatttgaacagacgaagttataattagtctttgggtagtctartctgtattaatagagagctggtggtcgttattactgagtttacatggaagtttcccaaaatgtgagatttggactactatgaaactcaagatgattttaggttgaagattaaagaacaatgaaatgcatactgagaaaattattctcttttaatttatgttacagtccttttgagttagtttaaaggagtttcagtttggtgctagtatatcttttaaatacttgcttatctctcttaactgaagggaacaggtctcagagctttctgtaggttacagtacctacaactagctgatagtgattactgtattttttcattatctatttttatttatttatttttgagacagggtctcactctgtgcctgggttggagtgcagtggcatgattacagctcacygcagccttgacctcctgggtttagatgatcctctcacctcagcctcctgggtagctgggaatacaggcacatgccaccatgcccagctgatttttgtatttttttgtagagacggggttttgccacattgcccagacagctctcaaactcctgggctcaaacagtcctcccaccgtagcctcccagagtgctgggattatagatgtgagccattgcacccggcctatctgttcttaaaattttaagctttttattttattgtatttattttaattttttaaattttaatttaatttatttatttttatttatttatttttgagacagagtcttgctctgtcgcccaggctggagtgcaatggtgtgatctcggccaactgcagcctccacctcccgggttcaagagatttcttctgcctcagccccctgagtagctgggattacaggcacgtgtcaccttgcccagctaattttttaatttttactagacactgggtttcaccatgttggccaggctggtctcgaactcctgacctcaaatgatccacctgccttggcctcccaaagtgctgggattacaggtgtgagccactgtacctggcctttttttttttttttttttgagacagggtcttgctgtgttgctcaggctggagtgcagttgtacaatcttggctcactgcaacctctgccttctgggttcaattgatcctcatgtctcatgtctcagcctcccaagtggctgggattataggtgtgcgccaccacacccggctaatttttgtatttttagtagacacagggtttcactatgttggccaggctggtcttgaactcctggcctcaagtgatccaccggcatcggcttcccaaagtgctgggattacaggtgtgagccacggtgcccagcctatttcttttttaaacttttattttaggtttggtggtacatgtgaaggtttgttacataggtaaacgttttcacgggggtttgttgtacatrcatattttatcaccgaggtattaagctcagtacccaatagttatcttttctgctcctctccctcctcttacactccccsctcaagtagaccccagtgtctgttgtttccttctttgtgttcataagttcttaccgtttagctcccatattcttaacttttaatacattatagtatatataccgaagtactcctgtcttaagtgtctagcccaatgaattttcattaactgaatgcacccacttaattggcatccagaccaagaaacaatgttatcatcccccctgaacccgatataccccctgtaagttactacccgtatcccactgcccaaggaaaccaccagtttctgacagaatatattctttttgtctgcttttgtactttatataaatggaatttataatatgtagtcttttatatctgtcttctatacccaacctgtgtttgtgacagtcatctttgttattgtgtgtagttgtagtttgttcattctcattgccatatgatgttctgttgtgtgaatatagcgcaatttacttaaatattttatttatcttcagacataccttttacttacyggatatgatttcgttttttcatgtatttagggctatacaatttcctattaaatttatttaagtaaaaaattatttttaattaaattaattaaatttrataaaagacaagtagagcagagttggagcagattgtgaagatggtacataaaagacagaagtttgagaaatgttggctgatactgttgtttcccaaagtgttttctgtagaatactaatcctgaaaacagtatttaggtaaatatacccctagggttggaaatagtctttaagaatatcacattttattttttttccttctttgttgaccaagcatccttctgatctgtgtacatcaggagaggatattagtagacaatattttatatttcttctacttctttacttcctggaagatacagtaaccaacattattatataggaactggatttcaaaattaaaatgatcttatttggttttacttgtggataaaagttgtaccagtccggcccagcttgccagtatcatcagttaaatattgaaatgccacgatatactaagtgctttgctaagaataatatggagctccttacccagaggtgtaaatctgtattattcactcattcaattattaaatccaatttttttttttttttttttgagacagagtctcgctcttcacccaggctggagtgcagtggcgtgatctcggctcactgcaacccccacctcccaggttcaagctattctyctgcctcagcctcctgagtagctgagactccagtcatgcaccaccacttccagctaatttttgtatttttaattagagacasggtttcgccatgttggccaggctggtctcgaactcctgacctcaagggatcagccagccttggcctcccaaagggctgggattacaggtgtgagccaccgcgtccagctgattaaaccaatattcactgaacactttctgtgggctgggttactgtgttctaagtgctgggctaagccattgaacaaacaaaaaattgtctttggagcttttaacagagaggtgagataggtaagacgtacaataaaagcttgaaatgtttagtttgtcttatgttgagtgccttggaaatgggaatatcatgtgtgcgtgtgcatgtgtgtgtgtttagaaaggcctcacagagaagttattagcaaatcttgaagaaataagggaaatgagtgatgcagctatctgagggaagcagattccagacagggaaaaagccagagcagaggcccttagggaagagcatgcctggatgaaccaggaataacaagccagtggctggagcgagtgaagggggccagtagttagagatgaggacattgaggcttgagggtgtatgtctgtggcaggccattgtgaggactttagcttttttttttttttttttgagacagagtcttgctttgtcgcccaggctggagtgcagtggcatgatcttggctcactgcagcctccgcctcccaggttcaagcaattctgcytcagcctcctcagtagctgggattacaggcgcctgccaccatgcccggctaatttttgtatttagtagagatggggttttaccatgttggccaggctggtcttgaactcctgacctcaggtgatccacccgcctcagcctcccaaagtgctgggattacaggcatgagccaccatgcccagccggactttagtttttatgtgagcaaacgatgatgtgaacattgtgctttaatggagagttggtgttattcacagttgacggttttaagaggcagcatagcaaagaacatgtacatgagccagattgcctgaattttaattctggctccacttaccttgagcgagtcacttaatctgttcgtgcctcagtttccccaaaatagaaataataatgttcgtcttacaggattgttgtgaagactcaatgagttcaatgagaataaagcatttagaacagtatctggcacatggtaaatgctatmtgtgtttgttgaataaacatcctggtatatggtggactattaattatataggtataagagaactgaaatatgaataatactacccaggtgattccccagtttatatttggctgaaagaggagctcagataattttctctgttttcagttttgctccccccttgactttttttaaaaggtcagaatgaaaagaattcagtcttcttttatagtctctaataactactaaaactatgttccaatattatacagtagtgaaggggttaaacatgttaggctgtttaatatcttaatatataacctcaccttagaaaggaatctacttaaaatttgctatggtgtggtaaagactgtggaacaaaactgagtgtcttctgttagtatattaggacctcttgttgacttttgccccaatttaaatattaatacatttcagagtcactgctagttggattgaagcacacctgccagatgattctaaagacacatggaagaagagggggaatgtggagtatgtggtacttcttgactggtttagttctgccaaagatttacagattggaacaactctccggagtctgaaagatgcacttttcaaggtttgcaagtttcattgttagtttattgtaattgcagggcatctctggttgttagaaaggcatgttaactagttgtttatcttaaatactaaaagattcatcatgccttttttttttttttttgagactgagtctcactctgttgcccaagctagagtacagtggcgtgatctcagctcactgcaacctccgcgtcccaggttcaagcgattctcctgcctcagcctcctgagtagctgggactgcaggcgtgagccaccacaccaggctaatttttgtatttttagaagagagggggtttcaccatgttggccaggctggtctcgaactcctgacctcagttgatccacctgccttggcatcccaaagtgctgggattacaggcttgagcagctgcgcccagcccatcatgctttgattgtagaattttttataaattcaggtttaaaagatttgttttggctgggtgtggtaaaattaaaacttaggtggaaaaagatcttataagattacaagatggccaggcgcggtggctcaagcctgtaaccccagcactttgggaggctgaggtgggtggatcacgaggtcaggagatcgagaccatcctggctaacacagtgaaaccccatctctactaaaaattacaaaaaaattagccgggcgcagtggcgggggcctgtagtcccagctactcgggaggctgaggcaggagaatggcaggaacccgggaggcagagtttgcagtgagcagagatcgcaccactgcactccagcctgggagacagagcgagactctgtctggaaaaaaaaaaaaaaaaaatattgcaaggcagggccaggcgtggtggctcatgcctgtaatcccaacactttgggaagctgaggcgggcagatcacctgaggtcaggagttcaagaccagcttgaccaacatgcagaaacctcgtctctgctaaaaacaaaaaattagtcgggcatggtggtgtgcacctgtaatcccagctactcagaaggctgaggtaggagaatcgattgaacycgggaggtggaggttgcggtcagccaagatcacaccattgcactccagcctgggcarcaagagcagaactgtgtcttacacacacacaaaaaaagattacaaggcagaagacaggcagaaatatttacaacacatatggcagtggtttaaaatacctaaaatccaaagagcttctacaaataagaaaaatacttaagataaaatagtaaaataagtcgtgggcacagatagccatgaacagaaagtgaaatgcaagtggacgtaaccataaaaatggcaactttactagtatcagataaatgcatattaaaacgagtgccattttcactgatcaagttaacaaaggtttaaaaaataatacggttgtcctcagtatttgtgggggattgatgctaggaccccccacaaataacaaaatccatggatattcaagtttcttacataaaatggtatagtatttgcatataaactacacatattctctcatgtaatttaaatcttctgtagattccttataataactaataaaaagtaagtgctttgtaaatagttgttataccatattgtttggagaatagtgacaagaaaaaagtctgtacatgctcagtacagacataaccatcataggcctaactatatattttttaaatttatttgttttaattttaatttttatttttttaagagacaaggtttttctcagtcacctagacttgagtgcagtggcacaatcatagctcactgcagccttgaactcctrgctcaagtgatcctactgcctcagcctcctgagtagctgggactacaggtacgcaccatgcctggctaattttttaaaattttctagtagagacaaggtattgctatgttgcccaggctagtctcaaactcctggcctcaagcattcctcccaccttggccacccaaagtgttgggattacaggcgtgcaccactgtgttgggcatctaagtatatatatatatatwtttttttaatttaatttaattttatttatttcgagatggagtctcactctgtcacccaggctggagtgcagtggtgcaatcttggcccactgcaacctctgcctcccaggttcaagcaattctcctgcctcgtcctttccaagtagctgggattacaggcgcccaccatcatgcacagctaattttttacttactgttttttgaagacatatcttactctgttgcccaggccaaagtgcagtggtgccttctcagctcactgcagccttgacatcctgtgctcaggtagtcctcccaactcagcctcctgagtagctgaggcgtgcgtcaccatcctagctaattttattttattttatttttgtagagatgagatttcactatgttgcccaggctggtctcaaaactcctgggctcaaacaatctcctgcctcagcctcccacagtgctggtattacaggtgtgagccaccacacccagtcaatttgttaaattattaacaatgatagcactgaatgctggtgagcatgtggtgagaagaaaactcattctgctggtaggagggtcagctgattgccgttgagaaagtcggtcttaaaagccttagaacaattcatgctatgacatagggaacccagaaatatacctaagtatgggacaattatatgaaactgccagtattcaactggcattgacctacaaatggcagtttggcagtttcataaagttcaaactaagatatgtgaatgattagtgtatgataaaggtgacataaatcaatgaagaaaagatggattgaaatgaatggtttggggacaactgcccagccagtaaataaaagagaatggatccctaccttatttcttagaccaagctacatctcaaatgaatagmcgatataaatgtatagattgaaacagcgaactattaggagaaagcattggtattttttagtaccttgatgtcaaatcaagatgtcataaaggaaaatgaagactgtgtttatggctggccgcggtggctcacacctgtgatcccagcactttgggaggctgaggcaggtggatcacttgaggtcagaagttggagaccagcctggccaacatggcgaaaccccatctctactaaaattacaaaaatttgccgggcatgatggcgggcgcctgtgatcccaggtactgaggaggctgaggcaggagaattgctggaacccagtgggcagaggttgcaatgagccgagatcgcaccacttcactccagcctgggcaaaagaacaaaagtccatctcaaaaagaaaagacatttaactatgtttaaaaaacaaaaacataaagtaaaaatcaggaaaaatgtttgcaatatatatgacaaagacctgttttccctaatattcagagtacattcactgtttactaaaaaaattgcaaataactatagaaaaaggggcaaaggatacaattattaaatagttaagtcatagaacaatataaatccatagtaaataaatgaaaaaatgtccaacttcaccaataaagaaatgcttattaaaacaagataccattttatgttcatcagttttgtaaaaattataaagatgtataatgggcattctcatatcctgttggttaagtgtataaattggtatagcctttctgaagggcaactgggcatcatattaaaccagcaattctactcctaggtaattatcctaaagaaatacatatatatacatgtatatatacacacacatatatgtacacacacacatatatatatatttatttacttatttatttttcgagatgaagtctcactcttatcccccaggctggagtgcagtggcgctatcttggctcactgcaacctccgcctctcgggttcaagcgattctcttgcctcagcctcccaagtagctgggattataggcgcctgccaccacgcctggctaatttttgtatgtttagtagagacggggtttcaccatgttggtcaggctggtctcgaactcctgacctcaggtgatcctcccgcctcggccttccaaagtgctgggattacaggcatgagccaccgtgcccgaccaatatatttatatatatttttaagtgatcatttctaagattagcaatatattgaaaaccttaaaatgttcgtgtaccttagcttaagcaactccctttctgggagttttccttaaggaggtgactaggtatgtgcatgtataaggatcttttgtgtttatttcagcattgcttataattaaatggggaaaaaacccaaatgttcaaacrattgactcagttttggggtctgtgtataaagtagaataggccatgtgcagcggctcacgcctataaatcccagcactttgggctgagccaggtcgatcacttaagcccaggagttcgagaccagcctgggcaacatggcgaaaccccagctcacgaaaagtacaaaaattagctggccgtgttggcgcgtgcttgtaagtcccagctactgggaaggctgaggtgggaggatcaatagagcccaagaggtcaaggctgcagtgagtcgtgattatgccgttgcattccaacttgggtgatagagtgagaccttgtcaatcagtcaaccagtagtcgaatattacctagcattgcaaatgatgatatagctctatagtgatgaaagatgttcatagaaaagcaacatcataarggttttattgaaaactctctataagagtaaactccagaatgtaaagtggtattggggtggtgaggttatgggtcatttttgttttatatttagtaatttattttctaatttttcttctaagatcattgattatttgtatggtttttaaaacctcacctatataaccatttcatttaatgttgaattttgaattcagttctcattttgtcattatttagaagataaattttgtccttaagggaacaactttaaaatttagatttgttgtgtttttagctgttgaaagattgctgccctatttaaaatatgatttccttatttatagtgggaaagtaaaactgtcctgcgcaatgagcctttggttttagagggaggctatgaaaactggctcctttgttatccccagtatacaacaaatgctaaggtcactccacccccacgacgccagaatgaagaggtgtctatctcatgtatgtatgtgaaaatttttgtttaaaattgctttggtaaaatatggtttaaaattgttttcccggtaacattcttggttgtgtgtgtatttgtcctattagagagcagtttgttttcaggcataaaaatataagcctggaagttcacattttctttaagactgttgtaattgttttttcacttagtttacatttaattactgcattaacacgcatgagaaatgtaagtactgtgtatggggtttgctattctaaaaaacatttttatttttggaattttagtggattttacttatccctcattggaagaatcaattccttctaaacctrctgcccagacgccacctgcatctatagaagtagatgaaaatatagaattgataagtggtcaaaatgagagaatgggaccactgaatatatcaactccagttgaaccagttgctgcttctaaatctgatgtttcacccataattcagccagtgcctagtataaagaatgttccacaggtatgttcttgattttaacattattctcgcttttgttttaatattaaatatatagtatagctgggcacagtgcctcacgcctgtaatcccagcactttgggaggctgagaggggcagatcacctgaggtcaggagtttgagaccaacctggccaacatggtgaaacccccctctctactaataatacaaaaattagctgggcatggtggtgggtgcctataaatccagctgtttgggaggctgaggcatgagaattgtctgaacccaggaagcggaggttgcagtgagtcgagattgcaccactgcaccccagcctgggtgacagcaagactctgtctcaaaaaaaaaaaaaagaattaaatacatagtatagaaacgaagtttaatatataacctttaacatcttagaaaaaagtatcgatgagaacagtctgtatgttttgataaattttttgtttaaaaatttttcatcataattcagcattaccgccacgcctatattagagtagataattaaggggtttccaagccagttggcgatccatttgctacaaacartgccaatgaaagattgcattatcacagtgaattagaatagcccttttgggattttttgtattataatttgacccataktattttcataaatagcttggcttacatatgataggtatgtgatgtcagtattttggttttaaaacagtgctttagtttcatttccttagaatttgacacgcaaataacaggcatgtttaacaataatcatgtaaaagtttttaaataaccaagacattacaaataaaaaaattttagtttttatatccttcatttggctttatttaaagaaaggttaactaatgttccccctccatgcatttcccaataacattttttagcattcatttttaattttttccccagatatatttaaaacagtatttcacatttaaagtggatgacgtttgatttgtggagcaggtattgaatagaaaatctggtaattttttgttataaactgaagtggttcatttcttcatttttttaaggtcttttagtattgcagaataaattgcagactaaatagatgtgattaaacaacttttcttaaagggtgaatttaggaaagtctaaaaagagcttctctatgttattgcatttcctttcaacttaatctatttaaacgctaatccttttgtgtcccaacataactttatgagataygtacaattttcagacatattttgaagatcttctatataaaaaacagcatgagggctgggtgccatggctcgtgcctgtaatcccaacactttaggaggcggaggcaggtgggtcacctgaggtcaggagttccagaccagcctggtcaacatggtgaaaccccatctctactgaaaataccaaaattagccaggcgtggtggtgcgtgcctgcagtcccagctactcaggaggctgaggcaggagaatcacatgaacccaggaagcagagttgtagtgagccgagatcaggccactgcactccagcctgggtgagagtgagactctgtctcaaaaaaaaataaaaataaaaataagacagcatgaaagtttgtatatacaagagatgggttcttctgatgtttggaaggagagatctgtataaaatcagccacagcataaggcagaatatcataattgctctacaaggcactggagcacagagcaaggagaatattctagctgagaagatcaaggacgtcttcatggaggagacagtattttatctgggctttaagagtaggattggaggatagaagaaacaagtagaaaattstatgaccaaaggcatagggcatgctctggggccagtgaacagttttggcatatgtgggcgctagtctctgttggagagaggaagttatgatagtagataagattagaaggatggacaagagtcatcaagagagacttggatcaaatttgaattttgtcctgtaggcacaaggaaccattaaagaattttaaacttgagagtaacatgatcataactatacttttaaaattagggaaaaatagatcaagccaccaaaatgtaaatggaaacaacatttatttttgtttctgttccacctcttattgttaacctcatccccatagtggttcttcctactttattctcaaatacatgcaaaaaaaaagacaaaggattttttttaagaggcagaaagagaagtgaacaggaaaaaaattattttttctacactaacctcgttttctttttcttttcttttttttttgaaaacggtctcactctctcacccaggctggagtgcagtggcgtgatcacagctcactgcagcctcgacttcctgggttcaagcaatcctcccacctcagcctcctgagtagctgggattataggcacatgccaccacgcccrgctaatttttgtattttttttgtagagatggggttttgccatgttgyccaggctggtctygaactcctggcctcaagtgatctatccggctcggcctcccaaagtgctggtattacaggcgtgagtcactgcgcctggcaacttcttttattttctagtagaaaaacataaattcgttttgtaagaacactatgtagattgttattggcacatgttcttataagtttttatttttctttcagtacacagtattctcaagaaatgatgttagggtcacttctctagtgttaacatgctgttaaattgaggtaataaacatttaactcattaaatcaggaacttaggtagtttattacacaacytgaaggaaactagttagtattttacctcatgtaaaagtttttagggaagattgcatttgttccctcagtaacrtagttactaactgtgccaggcacagtctttatccttttagagcttatattctaggagggaagaaaaattttaaataagtaattatagttatttgatcagaattccggtagagaagaataaagtattataagagcatgtatcaggggwcttggctagttctaggaaccagggaagtcttttcagagggagagatgtgtaagccaagacctaatgtgggcattatctagatgaacagctgatagacctaagttgggaaggagcatggcatcttggaataattttttttttaaggcaagtatagctggtatacacagccatatgactggagaggtaggcagatgtaagaccatacagggcattacagactatggtaaagattttaggtgtactgagagcatagtgggtagcaaatcaaatttgttttaaaatgagtcctctggctataatgtggagaaacagattggggggcgggggcaagagaagagatgggcaactagttgaaagctatgctgtagtcctggtgagagaggaggttgacatggtcttagcctgtggtagaagagatggagggacagatataggaggaaaattaacagcgtgcagaaggatatgggaagaacatatcatgggactcaggtttttgatttgtgcaactattgggagagtgagagtggttacatccatgagattaggaccatgtttgtcggggtggggggaatcgtgaatccgttttggctgtatggggtttgagatacatgtgttgacactcaaatggaaatattgggtaggcatttggatacctggaagtggaacttaagtctaagtatgcccaggtctaggttttatgttttagaataaagacatttttaactcttttgtrtacaaaacactcaggaagaattgaaagtgttgaatcaagaggatgtaagttccagtgatgtttgaatatctaccattcaarttctgttttatgagaaatcttgacactgagtaattaacaaatagatgtgctgatagatgttgtctccacaaagtgacacttcttttatcacaacttgatctcaagaactgaggttatttcctgatttttgacaaaaatgttttgctctggttttgttgctctagattgatcgtactaaaaaaccagcagtcaaattgcctgaagagcatagaataaaatctgaaagtacaaaccatgagcaacaatctcctcagagtggaaaagttattcctgrtcgttccaccaagccagtagttttttctccaactctcatgttaacagatgaagaaaaggctcgtattcatgcagaaactgctcttctaatggaaaaaaamaaamaaraaaaagaacttcgggaaaggcagcaagaggaacagaaagagaaactgaggaaggaagaacaagaacaaaaagccaaaaagaaacaagaagctgaagaaaatgaaattacagagaagcaacaaaaagcaaaagaagaaatggagaagaaagaaagtgaacaggccaagaaagaagataaagaaacctcagcaaagaggggcaaagaaataacaggagtaaaaagacaaagtaaaagtgaacatgaaacttctgatgccaagaaatctgtagaagatagggggaaaaggtgtccaaccccagaaatacagaaaaagtcaacaggagatgtgccccatacatctgtgacaggggattcaggttcaggcaaggtaagcagaaacagtacaaattgccaacgaagtgaaagaaaatgtatatgaaaatgtgaaaacaccagtggcattccataaaagggcaggcatttcaaatagtcttttcaggggtgatagaatgtactgatctatccacatttgctcatctattctcctttgaggccartgccatacatttatgaaatgattggttgggaatgaaattgctttttgtatattacatctataaaatgcaatatatttcaaataattgagataaatagctacattcttcatttttatgtttgatgtatgatcatgggaagactagagtgaaatataatctccttctcagtatggggaaactagatgctaatatttgtatgatagaatttatatctgtttagaatatatccaaaatcagtgacatctaaatggcctaacatttatctttgcatatagtgattttttggtcagatcggtgtcattttgtttcttgctttatctatttaaataatattggcaaataacccaattaattttgcccttggctacacacccaaaattgatagccgtaattttaggggactttttttgttattctttttcaatctctaataatgctatgcttttctttttttcttcattatgtcattaacaatgccttttccttttgaacaccaagtatatgtttataataccaagaacagttatggtcctttttacatatgtataaatggaaaaaacatttttagtagtgtggaaatgacttctaatggaaggcgggataccatctttacagaatgtcaatttctatacttctcaaacacaattcaggcatgttaccaaaattaattcatagtcaagctgctcttatccagggaacacttatctggtaacctctgctattaaaaaagatagcttccatccaaaaaccttctaaacaccccaaattggggatatgaagcccatgtactaaaactctctaattttattcacaggaggagcaaaacatgtgcactccaagatacaatttaagtattattcattgagtagctactatatgccaagtattttcactgcattgtcttatttacccctaatgataaccccataaggtatttaatttacaagtgaaactgaagtttagaggttaagtatttgcctaggatcacatagacagtgagattccaaagccacttcttttccatcttgctatactagaggcatgcagtctttagaacttaaatcattcatatttgtggagtcatttagtatataggtgccaaatattcctacacatctaagattgcattcyttgtgtgctccttttaaaagtaggagaaatatgtaatttattctagaataaattttgttaaaattatcactaattttaaaaagtttttagtagagttattttaaaataagatataaaacaaaaatgagtttttaaaaagaatctacgggccgggcgcgttggcccacgcctataatcccagcactttgggaggcctagacgagcggatcacttggtcaggagatcaagatgatcctggctaacacggtaaaaccctgtctccactaaaaatataaaaaattagccaggtgtggtggcgggcgcctgtagtcccagctgcttgggaggctgaagcaggagaatcacttgaacccatgaggcagaggttgcagtgagccaagatcgtgccactgcactccagcctgggtgacagagcgagactcggtctccaaaaaaaaaaaaagaatctgtgatgttataagaagatatgaatatagatttttgcattttttactattggtctgtatcttaatttcttctttctcttgaatacttcaaattttttgaagcacaactcctttcaagataaccaaaatcgtaatagtatttaaataaaagaataatgttcaaattaggtcatggtgaatatacattaatgatcagcattttatacttggccatgtagtgtgaaccagtgcttcacagtccactttgattttcatcttttttttttcttcactgattcatcagagttctttagttttttaagtattttgaatgtgacagtaaaatataataaaattttcagaggccttttttttctccttttacattttcattctcatagattcggttgtgttagctagtagctttatgttgggaggagaattaaagttttctttcacttctgtaattttaataattttacagccatttaagattaaaggacaaccagaaagtggaattctaaggacaggaactttyagagaggatacagacgataccgaaagaaataaagtaagtagtttattgcaggaaaaaactggaaaaaaaagccaaacatggattataactatgtgattatcttaccacactgctrtcttttatcatgagatctacagtgtaaggggatcgttgccatctttggtagctggtgttttgcttgtttttgcatgatcaatccatttatatgctaaaggaaatagtttgtcttcctgtttaaagtgtgacagcgtattctatttattttatgaaagtaaaaaatgtttaggccttaccatatgatccagcaattctacttcagggtatatacccaaaagaattgcaaacaagaagtatttgtacacccatgttcttagagtattattcataatagccaaaaaatggaagcaacccaaatgtccatcagcaggtgaatgcataaacaaatatggtatgtacatgtaatggaatattattcagccttaaaaaggaaagaaattctgacacgttacaacatggatgaatcttgaggtcatttgctaagtgaaataagccagtttcaggataaatactgaatgattccatttctatgaggtttgtaaagtaggcaaatgtatagagacagaaagtagaatggtggttgtcagagctggagaaaggggaaatggggagttattgttcagtaggtacagagtttcagttttacaagatgaaaagagttctggagattgttggcacagcaatatacttagtatcactaaccagtgcacctaaaaatggttaagatggtaaattttatgttatgtgtatttcatcacaattttttaaatacataggctttgtataagacatctttgctgggagcggtggctcacgcttgtaatcccaggcaggcagatcacgaggtcaggagatcgagatcatcctggctaacatggtgaaacgccgtctctactaaaaatacaaaaaaaaaaattagccgggcgtggtggcaggcacctgtagttccagctactcgggaggctgaggcaggagaatggcatgaaccagggaggcggagcttgcagtgagtcgagatcgggccactgcactccagcctgggcaacagagtgagactccatttcaaaaaaaaaaaaaggcttctttgcctttgtttttccttcagagcttgagatacaatttgcataccataaaattcacccatttttagcatgcagtttagtgatttttttttttttttttttttttttttttttttagtaatttagtgttgggaaaccattaatacaatccaattttagaacattgccgtcacaccaaaatgaccccatgcccaatttagtctaccctaaagcccaggcaacactgagtctactctgtctccatagatctgccttctctgggatatatatacagtcttcccttggtatctgtagatgactggttccactacctccctctcataccaaaatctgaggatgctcaagtcccttatataaaatggtatagtgtttgcatataacctatacacatcctcctatatactttaaatcatctctagattacatacctaacacaatgtaaatgctatgaaagtagatgttatcctgtattgtttaggggataataaaagcctgcacatgttcagtacacccagagttatttttttcaagtattttcaatctgtggatggttgaattcacagatgcagaaccgatgaatacagaggactgactccatatccaatctaaatctatgtgaatttaacatgttaaatttttgttaggtcattctgctgtattttgccattaaaaaaatctgagaccagccttggcaacatagcaagaccccatttctccacagaaagagggggaaaaaagggtatggttgctcctgcctgtaattccagcactttgggaggctgargcaggtggatcgcttgagccccaggagttcaagaccagcctgggcaacatggcaaaaccctgtctctagaaaaaaatattaaaaaattagctgggtttggtggcgcctgcctgtagtcccagctagttgagaggctgaggtgggaggatcacctgatcctgggaaggtcaaggatacagtgagccatgatcatgctactgcattccagcctgggcaacaagggtgagaccctgtctcaaacaaaaggggaaaaaatgacataaaatatattaaggctagaatgactgactgaattcacagttttcttatttttgactgcaacagttaaagagccacagcaacaacaaacccattgatatttatacaaaaaaagttcattaactacagaagtcaaataatttatacaatttatttgtttagatctaagattaactaaacataacacataacccattaaaaccatgttgtgtaagaatgatacaatggactttggggacttgggggcaagagataaaagactacaaatagggtgcagtgtatactgctcaggtgatgggtgcactaaaatctcacaaatcaccactaaagaacttactaatggccgggtgcggtggttcacacctgtaatcccaacactttgggaggctgaagtgggaggatcatttgagttcaggagttcgagaccagcctggccaacatgatgaaattctgtctcaacaaaaagtagccgggtgtggtggcgtgtgcctgtagtcccagctacttgggaggctgaggcaggagaaccgcttgaacccaggaggcagaggttgcagtgagcctagatcacgctactgcactccagcctgggcaacagagcaagactccatctggggaaaaaaaaaaaacaacttattaatgtaaccaaatatcacctgtaccccaataacctatggaaaaataaaaacagaaaaaaacacgttttattaaagttcttctaagaacgaaaaataaaatttcttaagatgtgtaagccttacaaaaattaagaacttaagccttagtcaaacagcagtgctccaaaagtgaaacccaaaggagctgaaaatgagttaacaataagagaaaatgaagagagagagagagagagagacacacacacatgccttctcttcttctgacatccttctgttccttttaaagagaaagagtagggattagatgactggaaccacaaagtgaagactaaaaaatagaaagtgaaaattgaggtttgcagttactcccactggtcctgacattctaagcagggcttcacaccagctacagccaaggtctttggcaacattgaaaggaaaactaaagtgtctttgttggccacccaccatcttgccccatctctgcccttcaggaagcaagggtactcaatatatcttctggctgtcttaaatctcatactgtatgatccactctacactcattctgtgtaaaatgccacagacaactaagtattgatgaaatagcattttaaagtaattctcacgcattaagaaggctcaataaaacttactgtatttgctgagcaactactatgtctctagcactgtgctaaatgcttgagggcagtgtttttaaaatccctaaggtcataatcagtataagtataagcctaggtgtggtggcacaagcctgcagacccagctacttgtgagagtgaggcaagagaatcatttgtgccaagggttcaagaacagcctcggcaatgtagtgaaaccccatctctaaactttttttaaatgacatttgcaaacattttctcccaatatgtggcttatcttttcgttttcttgatggagtttcttgaagcacagaagtttttgtggaagtccattctgtcatatttttcacatgtggattgtgctgttggtattgtatctaaggaacattttttctgacccaaagtcctaaagtaatgaagatgttttcttcttaaggtttcagttttggtgcttagatctatgatccatttcaagttaatttttatatacagtgtggtaaggatctaaatccatctttttgcatgtggatatttagttgtgccatttgccttcattttgacagaatttttttccagcacacatattctatttattacatgtttgtattcaacagaatttgtcaccaggcaggagtacagtggcatgatcatagctcacctgaccacctgggctcaagccttgaccacttgcctcaagcgatcctcccacctcggcttcctgagtagctaggaccacaggtgcatgccatcacatcaaggttggcttttttttttttttttttttttttttttggagatggagtctcgctctgccacccaggcgggagtgcagtgacacaaactcagctcactgcaacctccgcctcccaggttcaagcaattctcctgccacagtctcccaagtagctggaattataggtgcataccaccatggctggctaatttttggatttttttttttttagtagagatggggtttcaccatgttgcccaggctggtctcgaactcctgacctcaggtgatccacctgcctcggcctcccaaagcgctgggattacaggcgtgagccactgtgcccggccaaacctggctaattttaaaaatttttttatagagacggggtctgtgttgcccaggccgatctcaaaactcctgggctcaagagatcctcctgtcttggcctcgcaaagtgctggattacaggcatgagccaccctgcctggcctagaatgtatgtatcttaagacatgaagaatataaaaatagaaatgggtggttcatcaggcgtttttgttttctattaattttttaaaggaagtggaagtatcacattcaattatattgaggttgatgcctcaatatattggcttgtttttacttatataacatttcatcagtattttgtgggatgaatgaatatagaagaagaaatgttaggagagcaagatgactttaggtagatttagaataagccaagataatgaagttttgtagcctttcttgtgaatattcatttgctaggatactataacgtctattctctacttacacctcttagcatatagagaaaaggcacacttagtcctaaagaatacattaggtttatattttacgtaatcgtttgctgtggaaaactaaaaaaaaaattttgactaaaataccttgagatgcaaaattaaaaaaaaaaatgtggcctttcttatttgcttggatccactgtcttcctccccgtgaactaccacagaaggccatctacctccaccttgccacctgctatcattacaggcttagacatactcctctacaccttggtatagtaatatttgtactttgagaaaaagataatttttttcatctctgaatctgttttttaaaatatgaagggcagccaaggcaaggttttttgattctttggtacaagtagcttaagtttttatatgacaaaatttaattgaaaaatcagatttaaaaaaawwttttttttaattttttttattttattttaattaggctcaacgagaacctttgacaagagcacgaagtgaagaaatggggaggatcgtaccaggactgccttcaggctgggccaaggtaaaagtcagaattagcagtaaaatagccactgtgttcctaaaaaatgttttatttgtttattttacatcttctgtaatgcagagtcaattccatttctccattatagagaacatagcttattcccctaattataacagggtgagatttctcaatacccaacctgagatgctggctacaatatatgagcattctggcatttatcatttagaaatagtgtattactttaaaacctaaatttcttttgaagtttatcrccattttattcgaattattttaatccaaaagtaaatttagcagaatactttggagtgatttctttgtttatataatgcttatttttgttttttgacctgtttttttttttcttttccatctaagtttcttgacccaatcactggaacctttcgttattatcattcacccaccaacactgttcatatgtacccaccggaaatggctccttcatctgcacctccttccacccctccaactcataaagccaagccacagattcctgctgagcgggatagggaaccttccaaactgaagcgctcctactcctccccagatataacccaggctattcaagaggaagagaagaggaagccaacagtaactccarcagttaatcgggaaaacaagtatgtttatcttaactcctagaactaaaataatgtgctgtatttcaaagtttctactctgaatctgtcagtatgttagtgtcagggagttggaaatttctgtggatggctataccagccgttattatttaccacagagaacaaaacaaatgaatagagaaaatgttgttggtttttctcccaagtgctcacttaatatcataccagagaggattattttaagtgttaatgtagatataaaatcattgttatgttttacagtttcatgccagagtaccctcacgtttttcatagacygcctgtggtcccggaatctccctttgaggaccataattttcagcaatattgagcttgccttgttgcagcactcaagttccaaactttttttccccttagccaataatgtaagcgaagttttcctatagtattaaaataacaagcactttagtatatcatcctctaatccttattctgttcccttttccttcgttgtagttttgctattctgtttacaaatattgaccaataggttaggtttcccaaaatagtttcatttagctatacttctggcttcgtcccttttggaatcctcttagcttatgactgatagggctatgaggagatgatttaagtctgtgtaccacttctaatctttacttacttttttgggaggaggggggcaataggtggaagtataaataaatgatttttttcccatttattatacacttgtatttgctaaggaattttaattaggctcttttaagcctaatcctaagtaagttgaacacatcctaagaaagttgaaattttttcttcctgagaacttaccctgccaggtgcagacttattcgaaggagcttttaaaaattctattaatcttgttatagattttagagttcattataataactagtgagatttaatttcttcttgaatcattcttaagtgtgttaatttgataatgttttaaggactgtatgctgtttgtgtatttttttatatattgaacagaaaaagcacacgagtacatgcacctgagtacaggtaaagaggagctgattgaaatatagtttaatctgttctcagtattacttttaggggtggaagaacgttaaggattaattaaaaaagaaaaaagacctatcagttaagattttccttatgcttcagcagttctagtagttccacatataaatcaaacacaccatattacagaagtctagaaggcattctctgccccagcactgtccagcagatctttccatggtgatagaaatgtactgtatctgtgctgtccagtatggtttgtgtctactttgaaacgtgattagtgcaactaaggaattttttttttttgagacggaatctcaccctgttgcccaggctgaagtgcagtggcatgatctcagttcactgcaacgtctgcctcctcaagcgattctcctgcctcagcctcctgagtagctgggactatagacgtccactatcatgcccagctactttttgtatttttagtagagacggggtttcaccatgttggccaggctggtctcaaactcctgacctcaggtgatctgcccacctcggcctcccaaagtggtgggattatagacagccattgagcccagctggaactgtatttttttactgtgattgtgtatccatccgtgaatagtcaacacactctagaatttaagtaatagtacccaaataacctctgcttcccttgatatctactccacggtatggttttttttgtttttgtttttatttttttattattcctcatttggcattctgggtgagttcaaacatttgataatgccaaacttccagggatcatttaaaggagtttaaaagagccttctctactagagctcctagttcatgagaagtgagataatctatctcaaggtgtctctaagaaccatgacccacattaagaggttaaaggtatgtgtttcatgggaaggtctgagaccttagtcgtatgactaatgttaacctaaatattaaatgtcctggaaggcccagcatcttatgagttaacatattaactgtttacaagatgcctgtggtacrggtgctacagtttgctgccatttatagtatagaaccttaatttcatatgctcagcattttaagacatcttgtatcctttttcttcctcaggccaacatgttatcctaaagctgagatctcaaggctttctgcttctcagattcggaacctcaatcctgtttttggaggttctggaccagctcttactggacttcgtaacttaggaaatacttgttatatgaactcaatattgcagtgcctatgtaacgctccacatttggctgattatttcaaccgaaactgttatcaggatgatattaacaggtaaatacatgtcatactttttgcattataatgctaaaaggatgatctaaccatatttactgtcttagtccattagttttctgctgctataacaaaatacctaagactagataatttgtaaagaacaaaaatttattttctcttagttcttgactgggaaggccatcgtctaggtgccggcatctggtgcgcttttttgctgcatcctcacagggtagaaggtggaagcgaaagaggacagactcgtcctgtcgagccctaaacggcacctaatcctgttcacccgggaggggagccctcatggccttatcacctctttaaaggccccatctcttaatcctgtcacattggcaacacctgaattttggaatatttgacgtgaatctggtggtaacctatgaataagtaagcattttggtgtagggctacagtatgtgaataatttcatgttgacatcaagaacccattttacctttcaaaccatagtacttaccactcagctccagaaaagtcaaattaggaaaggggaaaatatctttatccttaggaataatgaaggctgggcatggtggctcacactggtaatcctagcactttgggaggctgacgtgggcagatcacttggggcccaggagtttgagaccagtctgggcaacaaggcaaaactccgtctctacaaaaattagctaggtgtggtgatacatgcctatagtccctgctacttgggaggctaaggtgggaggatcacctgagcccagaaggtcaaggctgcagtgagccgtgattgtgccgctatactccaccagcctgggtgacagaatgagaccctatctcaaaaaagagtaaagccttctctgattagtaaaggacagacaggatgagagcagtgccagaaggcagaacctcgctgtcatgaactggagcctgttgatgatgaggagaccatgcagggcttgcagccaaaagaaggaagctgaagggatgtaagcaagtcagattcagatgagaatctggtggtgagcctgcaaataaataagtagtttaatgtagtgctacagtatgtgaataatttcatgttgacatcaagaatctactgtaccttgcttaacttttaaatttcctttattgtcttttgtaacaacttttatttgcacaggtcaaatttgttggggcataaaggtgaagtggcagaagaatttggtataatcatgaaagccctgtggacaggacagtatagatatatcagtccaaaggactttaaaatcaccattgggaagatcaatgaccagtttgcaggatacagtcagcaagattcacaagaattgcttctgttcctaatggatggtctccatgaagatctaaataaagtaagaaatttgatttttctaagttgcagagactctttagggttgctcagtagcactgtatttttatagcagtttaaaattctagttggtgatagttcagtgcttgtttattcaaatagtgactgtataagagaattataaaacatcaggtaagtgtaatatttgaagcatatacagttggtatttactaattaacaagcagtattgctgagaaatttgcaaatgttaaaatagttattggcgtttgtgacccacatgtatgtgaaagtaaaatcataaacaaatgatcttataaaagattatagacagtttgagcatttttattgtatgttatgtttatataatatgtatatgttattgtacatatccttattcttttctttttcccagtcccttgctgaaagtggaacatgcctttattcttacacatccttctaaaataagaattacttggctgggcacagtggcttatgcctgtaatcccagtactttgggaggccaaggctggtggatcacctgaggtcaggagtttgagcccagcctggccaacatggcaaaacctcgtctctactaaaaatacaaaaattggctgggtgtagtggcatgtgcctgtaatcccagctactcaggtggctgaagcaggagaatcgcttgaacctgggaggcagaagttgcagtgagccgagattgcagtgaccactgcactccagcctgggcgacagagtgagactctttctaaaaaaaaaaaaaaaaaaaattactccatgtaaccaaatgactcatgtgactagttattataaaggcatgtatgtatacataaatgaccaccctccatttacatactacaacttctttttagcactttttgtctcacatattttggggtcaccattcttaaccactgaacagatatatatatatatacacacacacctacacaaaaatatttgtgtatatatatatacgtgtatatatacatacatatatacacatatatatacacatacatatatacatatatacgtgtatatatacatacatatatacacatatatatacacatacatatatacatatatagagagagagaggctagggcaacaaaattatatatgtccagttgtagccctaattcccagctatatgtgggatatcttttctaaaaaccaaactttttagctttttctttttttagtagagatkggrggggggggtctcactatgttgcacaagttggtctcgaactcctggccccaagcagtcctcctgccttggcttcccagaatgctgggattacaagcatgaaccaccacatctggcccttttcagctttttaaataaaaatttgggaaatttcaacaagtcacattccttcaataaagtgagtgagttttttttggtatttttggctagaattattttttgccacactcagtgagatcagaactcctttatgagaactacaggtgtttctaaaycyggcaagtgtttgtattcacttttattctttcaatttaaatgttttctttgagatattaatatagagcttaaatcattttatttccaggctgataatcggaagagatataaagaagaaaataatgatcatctcgatgactttaaagctgcagaacatgcctggcagaaacacaagcagctcaatgagtctattattgttgcactttttcagggtcaattcaaatctacagtacagtgcctcacatgtcacaaaaagtctaggacatttgaggccttcatgtatttgtctctaccactagcatccacaagtaaatgtacattacaggtaagtttaagaagtagagagaaaatgatttattggataaaaatgctgtttttatggatatagagatgtaaatttctggtctttacccttacaaacattttatcagtaaaactcggccgggcgcagtggctcataccttgtactcccagcactttgggaggccgaggtgggcggatcacgaggtcaggagatcgagaccatcctggataacacggtgaaaccccatctctactaaaaatacaaaaaattagccgggcgtggtggtgggcacctgtagtccccgctactcaggaggctgaggcaggagaatggcgtgaaccckggaggcggagtttacagtgagctgagatctcgccactgcactccagcctaggggacagaacaagactccgtcttaaaaaaaaaaaaaaaaaaaacctkttatcagtaaaactcaatataaattctgttttataattaggcctatgtagattagaaagaattagaaatttcttttttaaagatacctttattaaatattctttcaggatttcaggattgttagtatgtttttaaaaagttttataagttaatttggaaagttgtctgttgactaacttaggcctacttttcataagcatttgctttacatggggatatcaaataaatatcctgttttccatgtatcaacaatgtttcttatataaaagcttgttgatacctttagtcttaaagtacctccagaatgtcatttcctccaacagggtttctctgattgaccaggttaggggctttcctgtgtcctgtcacaacacactgtaggtagcactcaccacactctgtgctgtcattgttcacttgtctrtgcttctcactagatcacaagctttgggaaggcaggawctcttttgtgtagattgctgttgaatcactggtgcctgcagagtgactaactaaataggtgctctctgacattattgaagaatcgaattaacgagtatctgctacttgtttttttctgccaggattgccttagattattttccaaagaagaaaaactcacagataacaacagattttactgcagtcattgcagagctcgacgggattctctaaaaaagatagaaatctggaagttaccacctgtgcttttagtgcatctraaacggtaaaggggaaagtttgtcctcctgttcagtgaaattaaatgagggaattttaagttctgtgtaatttatacttgttgtactgcctgccatgggcacataacaaagggcgattatctggttacagtagatctagggaaataaagcagaaatgagactgttagttcacctcagtgttttcagtaccacagcaaaatgacaataccactatttcatgtaattccttataattttaaataattacaaagcatcaagtgaaaatgtataaaaatattacagtataattcaaacaaattagcacatgaaatgtaacattcaaacagcagactaaagcataacagacttagttatgtgttaaataaaatttataatttttaaagtattttaatgataaaatatgttaacgataccattaagtgcagaaataatttcatccagatttttccaattgatggaaaagatctagtcctataatagaaggaataatgacaagagttataaaacacgaaccagatcttttgctgattctttggtcttcacataatcacataatccatgtaactcaagaactttgagttgattatttgaaaaactttttaaaggaagttgcacttttttattgagagctgtaatttttgtgtcaaaaaagcatttctgttaaaaatgttttatcttgtattgagattcttagttccatatattaatttccaaatttacatgttcagatttctcttgtgtaaatttttctaacaaaagctagttttttccattgtcctagttgaggattctggaagtataaacattctataagtgattacacatttgctaaaatttttaatgctgaatattttcaaaattatgaaataaccatattacaccaaccaagatatcattgttttgatgtttaaaggagcagaatatgccagaataatggaatgaatgacattattttagtcagtagtctcctactctcaatttctggctctagttttctctgaagtacaagcttgactcgagagcagctgtcattctttcttttgtggtggtcagcattataaacatgtgggtcttaccttcctagaagactcatgtagcagttgtagctggaccagagtatagtcctacctctaccattctggctgtttgaccttaggcacatcattaaatatccatatgcctcagttttcttgtttgtaaaatggaaatgaagccaaatgtctttaacaggttcctctactactaaaattccaagtctttgtatttgaaatggattttacagtcctggctaaaaatctagatgttaatgaatgaggattcatcctggtatcttcctctgtcagtgtaattgtaatgttttgttctgcagtttttcctacgatggcaggtggaaacaaaaattacagacatctgtggacttcccgttagaaaatcttgacttgtcacagtatgttattggtccaaagaacaatttgaagaaatataatttgttttctgtttcagtaagtatctctttgaactgaagactttttgtttcaaagcaagtttaaaaaaagttttaagtggtttcctacctcatggaagagtaagaacaacataaagctttgaaactattggcgtattttaaataacaattttaactgaattgatttttttttctatcttgtttggcacagaatcactacggtgggctggatggaggccactacacagcctattgtaaaaatgcagcaagacaacggtggtttaagtttgatgatcatgaagtttctgatatctccgtttcttctgtgaaatcttcagcagcttatatcctcttttatacttcattgggaccacgagtaactgatgtagccacataaggagacataggttataaactagttatcttttaaaaggctcagcaacacaactcttgaaatgcttatcaggataatggtagctatagctggccatttagaggaattctaggacagtgggagctgtgttactagcactatataattccggtcagtgctgacaaataacatttaacaagtattgcagtaatcatcacttacaggtaccatttatttcaaaacaacttttttagtctgctccaaagttaaaataattaactagctaagcattattattcgactggtctaaaaactattgttatctttttttttccttttcactgttatggccttttcacatttctaaatcccatcttgatatactatgaatactctagaatgatgtaaagcagataggaatgtatgtgtacatatttattgcatacttgcacatcaaatcgatgtacatagtttaacacgtggtccttttgtgaaacctagaactcagaggattgctttttttctttcagcctattttgagtaacttcagtgctttcttagggaaatgacagggcaaagcaatttttctgttggctttgggctgtatttgtgcactaaatctttattctaaaaaaaaaaatggaaactttaatttttttaaaacgagaatttcatttacagctacattaaaatcttaatgagaaaaataatttataaccctgtgggtgttctgtctttaatattgtattatcaaatataggacagtaaaaccatagattttatatacacacgtgctatataayaacacccagagtcattctttcaagactagtattctcacatattgagaatattcattctaaatattaaagtaaaaatgccgggagtcaggcatgattgcaaagtgaactgcattataaactacatctttacagagtgatgtattaagagggttaaaggagcttataatttatttaaccgagggactcagttgctatatatatagtcagtaaaacactccatataaaaataagattctaaaagtgcttcagaaagagaccaccattagcaggctctcagggagaagatgaaaggatggggttcaaattgtgaagctgacaacttttcatgttttacaattagtctaagagaccacttcttggctaaattattatatcaaatatattcaaatcatattcttaaactcatcgagccatttgaacaaaaattatttttgtttagcttcatgagtatctttggaaaataatttgttgaatatatatgattatgagatattttctgataaacactgaattttgaaacctgaactcactatataattgcagtgttttgaaggcctgcatccattagcattgcattatattcacactgccttttttagtgaaccaagacccatcttctggacgacagatttatcttaagatgaaaggttgtataacatgcccacaaggcataaaaatgttaatgatgcaagtaagttctaagagtttaatgaccaagcaaaactctaccaccagatgctgactgcttgttttgcagtgttcaggaaacaccattttcctggctcttaacgcttttgtattggtatgraaaagggctggcagctatagaacaggagatccatagcattttgaacagaagtatctggaatctcactgactcgtgtgttatcaaagctatatcaggcctgggtgactgaattcttgcagaaagcagtgtagtggccaccatccaaatcaccaaaatggttctatgggagaaaggaatgtcaaacttagtattcacatatgaacactaactactggaacagaaatgatagggccaagagatgctttttaaattgtcccttattctaaattaaaaggaagtgataattttgttgttaaatcatgcatatagcctgactgctatattgcttctcatttcattgtaactacttatatgttgtgcccattgactatcatctgtgaataaagaaagacaatatttagcagcatctgattaatgtttatcagtgaacatttagttagcacttaatatacatcaactattaagcattaaaggaaattttacaataagaagataattcaggccgggcacagtggctcacacctgtaatcccaacactctgggaggctgaggcaggtggattgcttgagtccaggagttcaagaccagcctgggcaaaatagcgagactccatatcttttaaaggaaaaaaaaaaaaaaaaaaaagatgagctaggcatagtggtgcacacctgtagtcccagctacttgggaagttggggtgggaggatctctcgagcctgagaggtcgaggctgcaatgagccgtgattgtaccactgcactccagcctgggtgacagagtgagaccctgtcttaaaattgtaagttcatttacgtaagatggcttcttttttttttttttaaagttaggataagccacagaagagacatttaacattagaataaggatcttaactgcatattgctacagcacaaattgagggggctatgtagcaacaacccctcaatcccccatagggtacaaaaaataatgtatctcattttcctttttccatgtctttcctaacccagtattgtttggaacaaaggcattagagaggtgtacttccaaggaggtgttatggtgtatgataagggtcagcaaaccacggcccgtgggtcaactccaggctgtttttgtaagacccatgcattagcaacgggttttaaatttttatatggttggggaaaagatccaagtaataatagtattgttatatgtgaaaattttatgaaattcaaatgtcaatgtccttaaagttttatgggaacacagtcatgctcatttgtttacacttttcagtggctgctttaatgatacaacagtaaaactgaatagttgcagccaataccatatggcttatgaggcctaaaatatttactgtttggcctttaacagaataagtttgctgacctctgctgtagaggaagaaaattgattatttgttaacttatttttaattttttgagatggagtctctctctgttgcccaggctggaatgcagtggcacgatctcggctcactgcaacctccgcctcccaggttcaagcaattcttctgcctcagccttccaagtagctgggagactacaggtgcctgccaccatgcccagctaattttttgtatttttagtagagatggggtttcactgtgttagccaggatggtctcgatctcgacctcgggatcctcccacttcggcctcccaaagttatttatttttatttgagacagagtcttgctctgttgcccaggctggagtgcagtgacgtgatctcagctcaccacaacctctgcttcctgggttaaagctcttctcctgcctcagcctcccaagtaactgggattacaggcacgcaccaccacacccagctaattttttgtatttttagtagagatggggtttcgccgtgttggccaggctggtcttgaactcctgacctcaagtgatccacctgcctccacctcccaaagtgctgggattacaggcgtgagccactgcacccagcctatttatttttagaagcagtttcttgctatgttgcccaggctgtacatgaattcctaggcacaagcagtcctctcacttcaggcccccaaatagctgggactacaggcatacaccaccatgtccagaatgaaaatggatctgactagttaattccaacgtgaattcgggtgtaatagtacattgtgaccttagcgaaattatttgacctttctgagctttaatttctcatctattaacatggcttgttttgtatagctgttatcaaatatctcatgtattgagggctagtacacaggagttatttattcaatattcccttcaaccttcgtcttccccacctctctccttacaggtaatagaaatatctgaaattcacatttaaaagatcaaggttccgccaggcctggtggctcacgcctgtaatcccagcactttgggaggctgaggcaggcggatcacttgaggtcaggagtttgagactagcctggccaacatggtgaaaatccatctcttctaaaaatataaaaattagctgggcatggtggcgcatgccggtaatcccagctacttgggaggctgaggcagaatcatttgaacctgggagatggaggttgcagtgagctgagatcatgccattgcattccagcctgggcggagccctaaacaggaaatttaacaacagtatggtgtgtggtttatgctttgtgactgcctgggcgtaaagacagtccctagtttctgtaaccagtatgctcgggttttaaaggtcacgcaaggacactcgaggtaaagtcttaggcccccctacaaggtgagaagttggattgagatccacatacaaagccaggacctttaaagacattcaccctcaatggaaggattaaaaaacaaaatccaccctctagtgcttgtgttagcttggactcatggtacagagaataaaagtcattcctgggaatttgtcaccatagacctaccttttcaccagtttgggattcaaatttatactacctgtgtggtctgcgaatcctgtgaacttaatatgaaaagtatttctagggcagttgccagaaggaaacagaatttctagattgttgcatgttaactcagacctaacaggatatccacatatgaaaccccaatgaagttgagatcacaattcaaaataatagaacatgcaaggaaacaatttatcataagagtcagaaggcaataagatttaaacccccaaggactttagataatagaattattaagcagaggctacaaataaagtatatttaaatatatttagaagaaggaaacaaactttagaaactaaatagaattttcagaaatgagaaatacaacatagttggccgtccatatttacgggctctgcatcttcagaatcaactaatgtgatgggaaagatttgaaaaaataatacaacaataaaaatatacatattttaaaatacagtgtaacaactatttacatagtatttatattgtattagatattataagtaatccagagatgacttaaagtatatgggaggatgtgcataggttacatgcaaatactactccaggcctggcatggtggctcacacgtgtaatcccaacgtttttgggggatggaggtgggcagactgcttgagcccaggagttgtagaccagcctgggcaacatggcaaaaccctgtctacacaaaatacaaaaattgaccaggcatagtggcacgtgcctatagtcccagctacttggtaggttgaggtgggagaatcacctgagcccaggaggtcgaggctacagtgagctgtgactgagccactgctctccagcctggcaacagaatgagaccttgtctcaaaaaacaaaaacaaaaaacaccagaaaagacaccattttatatagggcccttgagcatctgtggattttgatagtcaaagggatcctggaaccaactccctgcagatactgaggtacaactgtactggaaattaacttaatgaagatattaggacacagaaaatgaataaaccggactgggcgcggtggctcatgcctgtaatcctagcactttgggaggctgaggcgggtggaccatgaggtcaggagttcaagaccaacctggtacacatggtgaaaccctgtctctattaaaaaaaacaaaaaaaattagctgggcctggtggcgtgcacctgtaatcccagctacttgagaggctgaagcaggagaatcgcttgaacccgggaggtggaggttgcagtgagccaagatcgtgccattgcactccagtgtgggtgacagagtgagactccatctcaaaaaaaaaaaaaaaagaataaactataaaatgaagttggggaaattagcaagaatggagtagtgatggagaatacgtgttaagaggcatgaaaaattgaatgagaatattcagcgtatgtcctgtagaagttctaggaggagagaatcgagtaggggagcaaggcaatattaaaagtgataatggctgaaaatgattaatgagacatgaatcttcacatttaggaaatgcagcgagccagggataaataaaaataatactgcagaacaacagagacaaagagaaaaagcttaaaagcaaccagaaagaaaaagagagtttacccacaagaatctaacctgctggtagaagttctccatagcagccatagaaatcagagacaatacagtagcttcaaaataatagagaaaaataactgtcaatctggaatttgatttctagttatcatccaagaatgaaagtgaattaaagacttctcaaagactgagagacttcaggataacagaccctcactgaaaagcctactgaaatatatgccacatgaattttaaaaactcaatgaaggaagaagtgatacataatagacagtgattaacaaaaaagactgatgaagatccgggcaaatataacccaatatgaacagtagaaaaccatgataatgtctcctttggaggcatattaaaaaattaaaaaccggctgggcatggtggttcacacctgtaatcccagcactttggaaggccaaggcaggaggatcgtttgagcccaggagtttgagaccagcctgggcaacatagtgagacctggtctctaaaaaaaataaaaaagttggccatgcacagtagcatgcctgtagtcccagctacttggcaggcagaggcaggaggatcccttaagcccagagttcaaaactgtagtgagctatgattcattgcactagtgcactccagtctgggcaacagagtgagaccctgtctcaaaaacaaaagatgctgaaaacagtagttcagtgatcagaattacagtgttctaagagctttccatttctttgggagcagagtataaagatcttgattaactttaggctttaagtatgaaagctgtcgttttttagcataattactaaagaatcaaaatgtgtaacttccaaagttgtagagggaaaataaagaaagctttatcagtttagtagcagcaagaacaacaggggaaaacaacacagcagaggtccccaacccccccaggctgcctgtccctgacctgttcaggacctggctgcacagcaggaagcgagcggcaaacctaccctgagcaccgcctcctgtcagatcagctgctgcattagattctcacagcagcacaaactctattgtgaactgcgcatgtgagggatctaggttgcgtgctccttatgagaatctactgcctgattttctgaggtggaacagtttaatcccaaaaccatgcccgccccggcccccatccatgggaaaaaaaccgcatcagtggaaaaattgtcttccacaaaaatcagtccctggtgccaacaaggttggggactgccgaattagaaaaataaggctaacataaacacaaaagaagatgacgacaagtaaatccgaatttattactagttgaaatatatgggatgtagtaaatttaccaaatatttactggattttaaatatccagttctagccaggcgcgatggctcacgtctataatctcagcacttggggaggccgaggggggcggatcacgaggtcaggagatcaagactatcctggccaacacggtgaaacctcatctctacaaaaatacaaaaa

SEQ ID NO: 98087 - DNA, 43518 bp, Homo sapiens
agctcatgcttttttatgtaggactagcttacctgattttaatgaaaatcacattttgatacaaacaccagatttgaaagttcaatgtgtttgatctcaggagtccaaaataagttgttgcttctagtgtcctgcattttattgactggggtttgatctcagcttctgaaaatgtttaaaaattggaaggaaatactactcatatcttcattgtcactttgtcttacctcaattgagtaacagaatatagctcctgaaggaaacactgatttgctttctgtttcccatatctcacctctaggatatgatggaagaagtgcttgaaagagaattttagcagatggtacttttctcagtgacctctggaataaaagaactgacttttgatagttttaaaattaatctttgcatgaaggttggtttcgctttttttcctttaagtttgtttttaaatgtattagtccaggggattttgccttatgctgaggtcaaactaaggataagcaagcttttgtccttcattttaactgttatgtcatactgttatgttgacatatttctttataagagaatagaggcaaaagtatagaactgaggatcatttgtatttttgagttggaaattatgaaacttcaccatattatgatcatacatattttgaagaacagactgaccaaagctcacctgttttttgtgttaggtgctttggctgaacttgattccagcccccttttccctttggtgttgtgtatgtctcttcatttcctctcaaatcttcaactcttgccccatgtctccttggcagcaggatgctggcatctgtgtagtcctcatactgtttactgataacccacaaattcattttcatggcagacctaagctcagaccctgccttgtcctggcaagcataggttttcccagaccacaatgctgatatatcttatttaatgcagactgtattcttgcagcgtgttgtttcctttgtgactcaaggttgaattaaaatgcctgtgaactgcaaacttgcttatgattgacttggtgcaataaagttcctttctaaccatttctggtttagaaaacattcagccatcctagaaactagcaatatttatttttgcctctttcgttttaccttcatttttagatgaggtaaatgttttgtcttttacttaagggtactaagcaaggtccactctagtgtagctgaagagaatgcatatttggctacactatttctgtttactgtattttgcttcctactttatgtctaaatgctattgtttgtttaaaatcctaataatgtctcatttccaatatgttattttcagataactaaggttttgctactaatgtcagccatttactctcccactaattgggattattttttaaaagaggtctttctccccgaaatacaagttttagaaaatcttagaagaggggtgggtgcatgtcttaatgctgggaagcggcaactttggggttgaacttacttgaatggattaaaaattgcattgtgttacagagctagaaaattttatgtatgaaaaacgataatagccttacactgagtacaaataatactttaagagcatgtgaagatgtgatcatttgtgatgttacttgtaaaaaaaagtatatatacatatcttttgaagtgttaaaaggaaactagtactttatattctttatcatatcactttttgtaagtgttgaatatattcctgtttatttttctatgttctgttttgtagccttaagaagtgtttcaaacatatctgaatgtataaaataagagtaaatgccctacatggtgtgatgctgcattatatataaaactgtgtgcatatattaaattttgtctcttgattctgcttgtgattctttggttccagggttaaccaggtaatatagcatgtagatcttgagaatttttgtaaactccttaaaataaatgatttccatgacatgtttccagctagaagacaattctcatacatgcaactaaaagccatgtagaatttataatctatgggtactgtgtaattttccctagtttatataacgaaattgaggccaagttacttgcttagggttatgcaactagtaagtggtaggacttgtatttgagtctagttttaagtgattttatagctagtgctaccattttttttctgcaatgactaaatgggaatgtgcagaatatctaagaatatggattaaattgttttttaatggtttttacatttagcattcagtgatatttatgttggctaaaggtgaaagcaaattgagtgttttgaaaacaaagtatacttactttatactctgaaaactcaatttcttaaagcctgtttttctttataaaagttaccaaagaatattatcaagtcaatacttgtttacatacaatatgaactttctgttagcctggcttcctcaggaggccgaacctgaaacaagagcctctttcagttcaagtatttgacagaaaagtgagtgatctaggaacagggtcagcaggctgggaaggaggatgagctgttataaaggtaacgagagttggcatgtggaacttttgagactgctttaggagctgagtaaaatatagaaccttgtgggaaagggagaaaggaaggagaaaggaaacattaggttcttggcagtatgcccgtgggtttatccatggagtcaataagagaagccagtgttggggctggttagtaagaggtgtgtttgtggctggatggggggctcttgcagaattggtcactccagaagtgcatggcagtgacccaaattaagtcagcggtctccaaaaagtgtctgatacaaagggcctgcttttcactttgaataattaaactttcccttttcattcaaagacttaggtctgggtctagggcatagtatgagaatgtaagtaactatgaaagaggaagttaaacacagcttcccttcataaacttttgcaccctaacttaatctgtgagttcttcatgaaacgtggacccctcagaatagtttaatagggttttctaagaaaagctacagacagacataggtataaacatcagtttttgaaactggtttttctataatgaattcattagagaaactggggctttagaggcaatcctttaaaaatacataacattcctgtaattatattttatttttcacatttagtaaaaagcattacaaagattaaagatgttaatggtaggccaggcgtggtggctcacacctgtaatcccagcactttcggaggctgaggcgggtggatcacgaggtcaggagctcgagaccagcctaaccaacatggtgaaactctgtctctaccaaaaatacgaaaattagccgggcatggtggcacgcacctgtaatcccagctgaggcaggagaggctgaggcaggagaatcacttgaacctgggaggcggaggttgcagtgagccaaaatcgtgccgctgcactccagcctaggcaacagtgaggctccgtctcaaaaaaaaaaaagatgtaaatgtagatgagtgtggttcttaaggcctcctatccctatgaatattcttaactgaactggcaggttaaccgattgataacaaaattctgtgtagtaagccaatttctttttaaaaaaaatgagaaccttgactttggactaacgacctccagatcaaatagaaaacaaactactgcaatttacctatctagggatatatttgttacttgttgcatccttccaaactagtagtaaaagcatttaagtcctgtatagttttataagatacttttataaatggagacaagaaaccagaagcacagatataaagtgaccattgacatgggagacctatacttaggcacatgcaaggttgggagctggaactaacattttcattaaagccagagtcaccccagcgaaaaggagtgaaattaaaaattcccagacaaaactgtcttggcctgggatccagtttcttaaaggcaaaaaacaaaacaaccactgaaaatgttaccacattcatttaggtttgaggtccagaaactcacaaactaggaaaactgaaaagtggttccagggtggtaacacacttggctcccctggcagaaggcaaatggagagcctctcaaggaaaagacctttcttgatggcaaacaggaaaccagtttgacttaaccaggtttaaacaaatagggatttatttctcaagaaatgtggagagaagtggctgctggcagttgtgcagcattttaatgtcaggagtaacattcttgtagcttgttttgcatttcccttatatgtgtcaccttctgggcatgaaatgcttgctccatatattacaccctcaagaagcagtaccagatgataatctccctttattaggaaaacgaggttttcttgaggtattttctagaaaaacctcaagaggtttcaatttactggctagaactctcttgcagttaggtcatatggcttaactgcaagagactaggaaagtatggaagaggattttctatgtcttagaccaattatgaccaaccacgtgggactgggcattggcagaggaggtggtagtggtggtgagtacagggctgaggataaatgatatttgccacacaaaatctcagaattttcagatacagcctcactgaacatctgctcacaaactgaaacactacaaaggaaacaatcttccaagagcaacagtcagcacagtatacagccaagtttagacctgcatgtattaagtggacagagtagaaatgcttaaaaaaattaagacaaagcggtgaaaaattaaagtagaagctccggaacaactactgtctggatatttccgcttctctaactggccttgctttgtctcttcaagtcctactactttcagcatgtaaaaaactaacttcaatctggaaggcacagaaagctcatcacaatctgcccatatccatcatttccttccattaatctcttaaatgcccatgttcctttctgcctctcaccagacatgtattttgctttaggtagattatctcacttatccttttaacaactcagtaagatgggtgctgttactctttcctgggacctaattcctttatgtagtcctttctgacattccaactcagaatgattactttctcttctgaaccactcactgagtgctcacagcagactaggcactggggttaaggacttgacatacctgtatccaagtatattgatgaacatgaaggaaattatacaacacagcagttttgtagtcttcctactttctctgtggcatgcaggttcattccttcaatacagtaggccactacatgccagacaccatgctatatatactgagtgttaagacagatacaagactggacttcagaatgcttgtagtctaaaattaggttaacctaaattgcaaaaaacagttgtagcatcaatacactgcctttaagactacactaagtgaacacagaaaatatggattatccagtattatctcaaatgtggagagaagtggctacagatgccactattattatccaatgacgatttaaaaacttcaatggctgggcgcggtggctcatgcctgtaatcccagcactttgggaggccaaggcgggtggattacctgaggtccagttgagaccagcctggcctacatggtgaaactccgtctctactaaaaatacaaaaatagctgggtgtggtggtgggtgcctgtaatcccagctactcaggaggctgaggcagaattgcttgaacccaggaggcgggttgcagtgagtgaatatcacatcattgcactccagcctgggtgacagagcgagactccatctcaaaacaaacaaacaaaaaaaaaaccccaaaatttcaatgatttataatcacatgcaaagtgtaaaattcaaagggtattatatatgtgtatatataaatgtctccttttcccgtctattctttgatcaaattgtccttgtcaaaagcaatctgtttcttgagtattcctttatttcaatattttgtatattttcacaaaaatggtagtataataaactgttccagttttttgtttttttaagtatttgagactttttccaattaggacatatgaagtagtctcattcttttgctaacatctgcattgattttatactgattttataagtatttttcttgtgttagcaattgtaggcctttctgttgctatgtaaaattttaagatacatattttaaagatttcatttacatgaaaatacgtttaatacatattctgtcattagcagtaagtagaactgtgctcttatatcacaagtactttctttaagacaatccaggatcagtaaataacaatagcttttgcttattttattcaatatatttgaaatgatcattcacaaatttaacctatccttaaaaataggcattacttattttagtataatcccatttgtatacaaaacaaaccctttacatattcacacttaggtaagtgcacagaaaaaagcatgaaagaatatacattattaaattcaaacgctggtaacctttgggagggtaataaagggagatcatttttttattccattctgtatatttgaattttttacaacatgtatttatgggttactgaaattatttttaaaaggcataatagggtccagttaaaccatactttctagccattatttgcatattaatcaagacttctgttatttcaagtagctcttaaagtttgtcaaacagtttctaatttcctcctcaattttgcttgccccagtcatttatttagtaaacactcttcctcactcataattccagtttagtcagaagtacaacttaaagtggctccaggctccaggtaatcctgttcaaaattcaggaactcaagaaatttagatgggtttttggaactacaaaatggtttagataatgtgctctatatccaaactcacaaatgaatatatgtggtaccaggggatactttgtattgccatctggggacttttgcattaatgttgcctttagggaagtggtttataatccttggctgcccaacagaaaaatctgtggaacttaaaaaaaatacatagatgcttaggcaccatctttaaagatttcgagtctgtagttctaagggaagcaaatattctttagaaatgctttttcctaaatctcaatcagtgattatataaatatatgtgtacaaaaatgacattacctagagaatgactgaatacagaacctcatggaatgcaaaaacaaaaaaagttcagagtaaagttaggggttttttgcggggaatggaactgaattggtttttgctaaacatgtttaaaagcaccaaaaaagattaaaaacaatttaaaaatacctatttttccaacagtggtgttttgcagtagataatcttcctcggaaaccatatactggtaatatagtgcaaagactgaaaacaaacaataaacataatcctgatgtttatttatcaaatgtcaatcagtggaatctttgactggcttttaaaataagggcagtttcattacactggcatacttggcaaaccaggtaagtacagaaacccttttcaagatttaaaaaatggagcaacactggtcagcatttggtaccgtgaatataatacacctactgaaaatcttcccatacatcatgaaaacttggaagtaatttgtatagcttgaaatgtcttcattttagaatattatgcacaaaagagcctcttcaggaacagaaaagtggcattttctgtgtttcaactacaatttagaacccaactggctttttatgttatattaagtatattatacttcaagttccagagtatgtggggcataaaatcctgattcaagttttatatgacaaaaaattctagtaaatactccttttaataaatggcttatcaatattctcagagtcagtctaatcatccaagaaaaagtagtttccactcttcttttgttctacatcctaaaaaagaaaacagaagccacaaaaatcagcaacacgattctactataggtaaaagtagactttcactcatggtattacttagctgtgcttamaacagtgcctgtacaacctgttctgcacataccatctgtttctggatattcctgggtccactgctcaaaggaaagataactacctctgccccatccctaatgctagaatgactcacttgcaccaactcaagtaaagtccctttatataagatgcctcacatatataaaattttgctatgtgttattatttctaggaaaactattaaattccattttcatcaatgcaacttttatctccagattcaaaatgcagcatactgtcagtttgagatctgcctactacacaaaatatatatatataaagttttttccaatactggccagtaacaatctcacctacctacttgttgagctgttctcttattaggattaaggtatgacaatcttaagatgagtaggcatacagaaatgataactcatggtgactgaaccataagtctgtctaagaaaatgacaatayaaagtgtccttaatgcttccaaagaaattcttcttttctacccaatatgcttttcaaaactgagaaaactcttcaattttatgtgagaacttaaccatttctctatcctggccaagaagtaatatcaatcagaaaaaaggcatccagacatactgttaggtgcttaagaatacaatgacgtgcaagataactttgcctctggcattccaagagctcatggtttagcagcaaagctaggactacaaatatgaaaataaatgctacagcagaagtatgtataacatacttctaaagcttttaagcattaaggatgatggatacagagtgataaaatgtaaacactttgaggcactgcagatattaaaaacagaaatgatggccagcatggtggctcacgcctgtaatcccagcactttgggaggccaaggcaggtggaacactaggtcaggagttcaagactagcacgggcaagatggtgaaaccccatctctatcaaaaaaatacagaaaattagtcgggtgtggtggtgggcacctgtaatcccagctactcgggaggctgaggcagagaattgcttgaactcgggaggcagaggttgtagtgagccgagatcacgccactgcactccagcctaggtgagagagtgagactctgcctcaaaaaaacaaacaactaaaaccaaaaccaaaaaaacaacccagaaatgcttttagagttcatttactttctgtttctgagtgactaagatttttgccttttaagaaacaaatactgtatttcacagaggaaatcaactgtagggtgcacaactgtgaactacaaagacaaaaaacattgtcaattaagtagacacaatgttttcctcatcacaggagcttgtttagactttcaaaatatactttttttgcgggggttgcgggggcgggggcagggacagagactcgctctgttgcccaggctggagtacagtggaacgatctcagctcactgcaacctccacctcctgggttgaagtgattctcctgcctcagcctcccgagtagctgggattacaggcgcatgccaccacgcctggctaattttttgtatttttagtagagatgggttttcaccgttagacaggatggtctcgatctccttggcttcccaaagttctgggattacaggcataaaccactgcgcttggcctaaaatacaccttttaatcatgtattgaaaaatataacagaaattggttaaggtattcttaaaaaattctttgttacaatggtgaattagtgtaatctttccccagacattttaagtggtaatcaatataggtagtacaactgtgatacaacttaaagagaaaacaggaagagctcttgagttcacacagcaatgacagctacattacaattgctgcctaccgcacactaaagtatgccatcaggtcttaaaatgtaaaaaacataggaattttaaaataaaatatggttgttttttaatttatttttatttttttagacagagtctcactcttttgcccaggctggagtacagtgggatgatctcagctcactacaacctccaccttccaggttcaagtgattctcctgcctcagactcctaagtagctgggattacagatacctgccaccagactcggctaatttttgcatttttagtagagatggggttgcaccatgttggccaggctggtctcaaactcgtgacctcaagtgatctgcctgccttggcctcccaaaagtgcttgaatcacaggtgtgagccactgtgcccagccatatgttattgatttttaaatagcctttcaagtgtttatactgagatcagtaatccatgatttaagacaacttttctacataccttaattgaattaagtttgtttattcgtggcctatagttgtttggatctcttctgaatgtaatttcaagctgagacaaaaatttattcatgccagccaaaagggtttgaggactaagagaaaaaaaaaaatcaattttgattaaattttacttcagaaatgtaactaccttttgagaggaagggtattaagaattactattacctcaaattccccaatcataaatcatctggataacagtataataacagcatattacaaatcctgtgttcagaaatagctttgcttggactatatagttttcttggctgtaatatttttgtgcaaaacaaaaaaaaaatttaacctggatttctaatctggtgaaagaaacatttaagatagaagtactactttagaaaaacagaagataattaataagtagattacagaatctccaattgcacatttttaggggggatgagaatcttaaaaagttatatttatatgaaaaatttgttactggagggaatatgtcctcctaatagtggttttcagtgacaattcctttctaaatttctatgcttaatcgtttttacccaagtgagttcttaaatcatgccaaatcacaacatacatgtgaaacattttaaaattttgtaaatagaaaggtgggatatcactagatgaacaaataaacatcacatatgctaagaaatttccctagctctttaagaaatatgtaattctcaatttataaaaaaaaaaaaggaattcagggaagaagcccagcaaaatacttttatttcttagatgaattattaaaatggcaactccattccttgctctccaataccagaaaacatgctgaaaccacatgaaactgctggttttataggtgaaaactgaacaccagtaatttcatttagttcaatctaataatataggctttagcactaaaggtaaaatgaatttctcataacttgatctgaatgttaggcttctctatattgcaagtgctcttaatcaggctaacaaggaaaaatgagaagaaaaaacgaaaaaagtaaaaccatttattttaactctgctatagattaataccagatatttgggatccactgtgagctcaatcactgtcagcataagttggacaaatcatgtaacctctttaatcttgttttctttttctatcatgtatgaaagcaatagttttcaatcttttttgggaaattcaaataataaagcaaacaaaagttaagctgagaaaaggtgaggggcccacagctttttatgctgtggcctacagctttttatcttcctggtgagggattccacactgaagcctaaacactactcttccacatggtcccatccagtccccaataccaatgatctcaggagtcacagaatcaagtctagaatttctagctttcattttttaaaaattaaagtgagtgactttactatttactggaaaatttaaaatgaattactttgaacatattaaaaagtaattttacctgtttgcaactgtgttcttagatggaacaccatcaaaaacgatgacgcgatccgctagataggtggccatgatgaagtcatgttccacaacaaaggctgtcttttttgcatggagtatgaaactaaaacacaatgattttgaaatcttatagctttctatcataaaacattcgactgttatattaagcacacttgtaggacagtatacataatcaaaatatggctaggagcaagatatttaccgtttgacaactcgagctgccatcagtctttgctcagaatccaaatatgcasatggttcatcaattaaatagacatcagcaggtttgcccaagcaaagggctaaagctactcgctgtagttcaccaccagataatgtctgcacctaattggaggagtttagcaaaccatgtaaaggcatccaaaattcaaaataataaaaaaataaaaaaaattatgttmaagtacctcttgatcaatgatgttttcaatttgcagaggcttcattacatcggtcacaaattgtgggtgagtataagcatctcttatcttttcatgtagtaactggcgaacacttccctgtttttaatataaaaaagtatttaaatgataaactttcactatagaactcttctatttatgaatcttgacaaagttaagcttcagaataaaagtatatcaatttgccaccaacagatatcaatgtgtatccaccatctatgacatgttttgagattttctattcaaaacccatcatgtccaacaagtaaaaaggaatttttttttttcttttgagacagggtcttgctccattgcccaggtgtgcaatggcatgatcagggctcactgcagcatcaacctcccaagctcaagcgatcctcccacttcagcctctagaggagctggaactacaggcatgcaccaccatgctgaaccaatttttaagtttttgtggaggcggaatctgttggtcaggctggtcttaaactcttgggttcaagtgaccctcctgcctcagcctcccaaagtgctgggattacatgcgtgagctaccatgcccagcctgcaacaatcttttttttttttccactccacagcccctgcaataattttaaaattagaaagtaataagcaaataatgaatgtttcagaggaaaaatcatttaagagtagaaattccaaaggtcaaagtgggtatcaagcaaccttaggcaatcagtaagagaacacaaaatgcatgataatgtgctagggatgaatcctaagatggcttttccttgctgtttcaggataaggctgaattttagaatttaaagctaagcttatagagagcatcaatgacaaaacttttatggtaagctaagccaagtagacaaaacataaattgaatgttgaggtactgaggagttcattacaacacccgcagaaatcaaaggaggttaactttaacagaatggtttcaaggactgtggcatttgttaatatttcatttctttttatggctgaataactaaaagacatttgctcatttttaattataagagttctttatacatgctggatacaagtcctttattggatatatgatgtgcaaatgtttctcccatcttgtgggtaaagccttttcaccttcttgctgttgtcaatttgcagcacaaaatacattaggtttttaattatttatttagcaaaaagatgacaaacatctttatttttttatttttttttgagacagactctcgctttgtcgcccaggctagagtgtagtgatgcaatctccactcactgcaagctctgcctcccaggttcacgccattctcctgcctcagcctcctgagtagctgggactacaggcgctgccaccacgctcggctagttttttgtagttttagtagagacagggtttcaccatgttagccaggatggtctcgatctcctgacctcgtgatctgctggcctaggcctcccgaagtgttggcattacaggcgtgagctactgcacccggccaaagatgacaaatatctttaaagcactttcttagcagtggatatgaatcaaggattggactcttaatacatttgtttgcaactatcaataaaactgtatagaatctaatttggagaaaaattttaatatagtaaaagatgaaagctataggcatatatacaaaattttctttagtaaccatataaaaaataataactcacagttgatttgggactaattttctgtggcttataactgacatttagaactggtacttctcctgcaaaataatgaaatacataagacactaaaaactgccsagatctttaaagtttactgtgtaaaacagagtaaaaagactcaacagttacaaatgtacctccttcatcaggtttaagtcttccagcaagcattctgataaatgtcgttttacccgttcctggcaacacaacatatgacagtttgatctgaaagatgcttgacgtttaaagtaaatcactatgtcctatttggttttaactgagaaatttgttttaaagatatacactgacattattgaattctgaagtttatatagaaaaatacttaagtctttcatggctcacctctgaagtgtcattctaaggtaattaagaggaataaagactagtcaaagcttatgacaattttaataaatggtatgtctataaagtttaaatcctgcaatagtttgaaaagatctacttagctaaattatcagggcacacaatttattaagacagtatagactgttttatgaaagataactgtaattttaaagtttacttatataaaatatttaaattaattgcaacccaattcaaaattcccattatctaaagactgatacattgtaacaatctttatataaaatttatcttctatagttttgtaagctgtaagattacaattcaaatagttcttaaatcatgaaggcaatatcacatatttagtagtcaaattcatcttatatctacacttatgacaatttattatgaaatatatgctggtaatacaattatttacaaaggtagattgctctgaatttaaaataagaaaagttccacattgaagtgtatgaggaaaaaatttttaaagctggattatttctgaatcaccatttatcctttccatcttagtcaatttataagattaataactgccttatcaatttacatgtaaaaaaccagctgacaaagaacaccttattttcactagaggttataaaacaaaataakaactattaacctgattgaattacagtgaaattgaattacacaatgccaaaaaaatgtgaaagtacactaagaaatttgtgggttkaaataaaactctgcttctagccctataacatatgattcaaatttttccacaaaacagttaaaactaatttactagataaacaggaagatttttacttatcacaaaacagaaaacttaccattttcccccagcatcaccataatttcagaatctgtaaactctccagctacaattgctagctcaaattctcccatttttttcttcattcctggatatttatacatacacatctttttaacttcttcttcatttgctgtctcagccactttaaaaacaagtgatgcatctctgaatctcaagttttctgttggaacatagccatccaaaaaaatgtttatgcctgttgggaagaaaattgtcaaccgggagaaatcattagagccaaaatcctaagctctcttgggagcaatctatagactatatactttaaatttctgtggatttttgctaacatgttggtctgcatataaagaagtaacttaaaaaactatatatatttaatgtaagtttaaataattcatgaatatatatgcatgtcccccccaaccacatgaagtacatcttctcattatcctgtaattactttttccatcaggttttatgcaaaagagagcacatgatgtcctttttgctttatctttaaagcgaaaatgacaaatatgtaagagtattttcagattgatgtaatattgatataaaagtttgggggataaattttttaatatacaatgttatcaatatttaatttcatatgagacataagcacatattttgaggttataatttattgctttaaaaaaattaatcctgcaggttcatatgaaattgaatatgagctaattccagttaacatttttttaatggcttcactgtacaaagataacaaccattatctaaacagattttaataacttaaatccacattgtatacaagaaccctctgtaataaaattttaagatctacaatggcagacacactgaaatgaaaagcgtatttgagaaacaatgaataatccatatttcagtgtttcctatatttaagtgaagagaaagctgaagtttcttggaaggtcttgacgttattcattttatttggaactgagagacacatcatgcagcctgtatcctcatcctagaacacaggtgttcaatacatctttgctgacagaacaaatgaacagattacatttattttgccaaaatcagcatgttttttgatcttaaactatctaaaacctataaatgtgaagttaaaaaattaaataaaaacaattacataaaaacataaactcaaaggaaccttagcagccacttggttcaaatacctaacttattttggaaaataaaggctcaaagaactaagtgacttcgtttaaaaaaaacacagcaagtcagtctttacagtcctacttcaatgtttgtcttgtcaatttaaaaatgagttcaaaccataatcacctttacagtttatagaaagcttttaagtatgctgcactgatttcaatatattaaaggaacagagaaaaactaaagtttcttaagctgttttaatagatcgagcacattaaaaaccttactgggtaccatttactgaatggcacagcctttagacatgacatttataactggagttgtgaagaatgactgccgagtacccatattattatcaacttgattcaaagactaccatatggtatagagtaaggtactcaatacatatttgttaattgacaagaataaaacattaataaatttgttctgatgtcatcccttaagactactggcaagaaaactaggtaactgcaaatttttctttaaagtatgcatctatctcaaatgtataagtaggtaagttacaaccatttcttccccacatcttaatatttatgtactttttataaattataaaaactcccaatatctttttatgaaaaggattataatgcaatataaatttatttttccaaaagagcttttaggtataaaaaagattcctccaagattaaaaaaaaaaaaaagaaagaaagaaaccaaaaaacctgtcacctcttagggaactacaggctacatgaatttttctacttctaggagatggtatttttttcctgagtaaacagcccttttagtgttctgaattgtcagtttaagacaggtggagagaaaaataaaaataagacacaagtaaggaagcagtgaaaggaaaatgggaagaaaaaaaggaaaaaggtattgaaggcagagagtacattggtacttttttttaaggagccacttagtggtacgctagtttctatttttgcttaaattacacaggtaaggaggagacatggaagggagaggccagggaatctcattttcttggaagtacaaagactaaatgaaaattttaatacacttactaaactatcttattaggtttttagatagccttagttccaaaaacatagtatacatattacagataaatttaaaacatgaaaacaagatgaacactgaaagcattttaagagtttcattactggtattggcctgtcaaagttaatttgaaaatgacaaatactacagtaatactgcagaagccaaaatgcagaggacttttactgtagcctcccaacccccaacaaaagtaacattgcatttctacccatccccaggagaaaattctccaaaatgaaaaaaatatattttgtataacaactgatatatataaccttatatgctcagtgattaaattccaaggaactagagttttggatgatatcagaccaatgtaaaactacttaatatcaataatgtagtttataagcattagagtagaagagaatacagcatatgtgaaaaaagtttttcaagttaccttctcttacactaaaaggcatagtgacaactccataggcgcttggtacaccatataaacagcagatgaagtcggagagatagtctaatacacttagatcatgttccaccacaatgatatatctgaaaatcaaaccagattttagttaaaactcttacataactatttttaatagttggaaatttcagaaaaagagatacatctaataaaatttaagcataaagacataagaagcaaaagccataaaacatttttagtaaggctcattatcaatgctcatatttaaaaatgttttcctgaactaaaaggaaaaaatcagccaatttaaaagtttattgatatatgaattaaatgcattctgctaataagaaacatatttcgaaataagtgttacaaagtaattataatagatttaattcagatgtagcctaaactgtttattatgctactcaatttatgtattaagccctgtacctgtcctgtcccatgctagctgtagtaggggatggacgcatacacaaagataggacagaatccttaacctgagacgtttccatttagctggggaagacaaggaataggtatgaaatggtaacaaaaaaagattacatggcaaaatatgctccacagataataaaatcagtgaacatcagaaagaaaataggttagtgggtactggagcactttatgaatgagaatgggatatgatgtgaagcttaagtggctatatttgaatgaagtgatacagtattggctggaatagaagttttagacgcaagtaatagtcatgaaggttttatgtagcactttattcccatttccatatcgaacaccattcaacatgttaaaaaaatgtcctgcaaacatctcatatgtcaaattaatgtatcagcttcctacacaaataaaaattctccatatttgtattaacgaaattatcattccctcaaaaatgacattttattcccactgatattttgtttaaactgttaaagtctgtgaattccttctcaacaatgtcttgtgtttcaatctcaccctttttcttctttgcctaaattctagttcaggccctcgtatttctttcatatctcattttctttaggtcccctgatgtgggtctcaattccaaatgaaattaatcacttaaattaattagacttagactttcaacactttctaaaactttagttactatctttctattagctcatacacaggaaacactgaagaatgcatcttttttcttaaataaaccacttctctacttctctggtgtctaggaagctattctttttctaagtagtctcctgcctagatctttacctgctgaaatcccacctaaccctttaaggtccatctcaaatccaacttgctatgggaatacttttcctaatatgcaaatgagctttccccctcactcttgaatactggtaacaagtatttggactgatacttggacttttattatttttgattaccccataacttgctcataaacatcttaagggagactcttaatacattttagcacctctgtgatctttagtcttacactgtgtactaacagacacctaaaaaagttgttgaatgacaaaatgaagagtatgaactaattggaaatgaggaagatagtagtaggttctgaaatagcactgtccagaactttctacaattatgaaaatgttctatctctatgttgtcccatatagtgactactagccataagttgaatgttgctagtttgatgaaataaaattttaatttcaattaaaatttaaataaggatgtttgtctagaggctacagcacaattctagagtaagggaatgaaatgagaaaacatttcaggagtaatctggcaagaaaaaaaaagtaacaatggaaaattggaaaataagagcaggtctaagatgaaaagggaaaattaaaaggaaatgttttctaccacaatggtggtaattatcaataaaaatggcaaatcacccaggtgagctggtgatactcatcttgcatcggtgtctttgttggcactaatccattacatggaatacttctctactcttaaaatcctatgtttccttaaacagccagtgtgagggagcattgtattacgtagtagcttttactttgctttgaaaagaagaaaaaaataggtcaaacttcctgcccccaaccccaaccttcaaatggaggttatggagacagaagtccaaaatataaacatgatttaggtcagccattctgttttctgagaagttgggaagaaataaaaatctggagcatagtaaggaatctaggttgtaaaaaatgtataccctacagttaatttggggctatctcttagtcttcaatgttactgataatgttctgaggtcaaactctataaaacttcttaaatctctattcttttgtccaatgcatcctctatttttcattatccaaggatatgatctccaaaatctttttatggcattaaagactgaatgtatgccttgacccatcaaatttcagaatggagatatactttytatgactctttatcatcaatctatcactacatagagatcttaactttatacctgtaaataagaccagcccacttgtgaaatgtcttaaaaattttctctacgttgtcatgccaatctgtcttaccatgttatccctattacaattaaagttactgtcctctctcttataatataggaaagtcttgggtagtattacttttccttaactagtttttttttccccgaggtccatctacacttatttatttcactttcctattgcaactatacaaaatagttactgatcttttaattttaaatttattcgttataagtcaatataagtacctgatgccttgttttctagtgatgtgtctaaacagttacacattgaaatactggctgtaaactagtattttcttttagttttcctcttattgttaggacatgatttgatatctttaaagttttatatgaacgtagatattatctatgactttcattttagtataaaaagggactataaaaatactttttataaaaagtgacttgagttgagaactagtgacctgactttgtgtattcctttcaagactctggtacatgtgtatgcttttctttaccacagtgtgtatttttctttaccacattgtgaagtccttgaatactgggactgtatttttacacttgccttccccaaagagcctatcataatgcccaggctcttaatgcctgtgtatggagtaaaaattatggcttctatttggctcacatgagattgtctctttatcactgatattctaagtttcacttcaaagtatctacatgaattagttagtatctgtagaacttgtgctccttgaatctaaggagctgaatttttcatcaattctgaacagttctcagtcataatcctttcatcactttatttttcagactattaagatatatgtaaatagtttcctcattacattctccaggtttctgaaccttctttccacattttaattttattctctctctgctgtattctagtaacttcctaagatctggtttctaatgcacttttctgctgtccctaacccatctaacatgtccagtgaatctgtaatgtcaccatgcttttaatttctagatttgtctgggtttctgaacatctacctattgcttttttagtagcattatatccttagggttttgaatccttttatttaaagattttattttgaagattatttaatagccgcccttagaatgtcacctaaagttcttgaatcctgctgccatataatatgtgctggctaatttgcggaccgtttcctcctctaatttataaattttataatttacaatttgagctcgtcctcatgagccattacctataggaatcctgtgcaaccagggttgaaagcatattggttcgttgcttctgctatgtaccataaaagttccagaccccttaaacatattactttctcactttgaagggttcacagattccactggttatataaatttcaattccatagccaggcgagctgctggcccatgaatagagatttgaaacagagcaatcccttcacttccagggagctcagtgaatgatagatatttgctttcttgacatttccgtgcaatgatagacaagttgtttctaattcgccctttcagtgagaaagcagtcctttgagagtcctggcactttatgtgtgaaaatccaatactagaccttgcttcttgcccatgagtggatgttaaaacccaagacctattacagaaaccatcaacatctggtcctattactcctctatagttctaatgctttagtttttgaccatttgggatttctcttgctttcttgcaagatgagccatgtatttaaaaggatgttcattaaattgttaagtcagaagaggcagtataacacagaaaatactatacagaaaaaaacccctggggtctggtcacagctttgtcatacagtaaatttgtaacctagaacaaacaactagatttttgaccttgtgcttcatctgcaaaataggaataccatctaaagattcctacaagataaccatgaggatcaaatgacataatgaatctgaaaactctacaaaccacaaaagcaccctataaacacagcgtattttgaatactaacagaagttatgataattttcttttcttttgtccagcaagattctgaaaaaccagaattactctagtgattcttacaaattctaagcgtgtgcgtgcgtgtgttgtgtgtgtgaaaatgagagacagagagagagaaaaagatagctggtaaaagctaagggtctgcttcctataaagctacggaatttgcatataatttcagaatattcctaagctccctggaagcgggggtgttaataaatgaatcttgcattgagaacctctgttctaggtaaagaaaggtaaatttaggtggcagctataaacaaccaagataaaaaatatgtacatcacattgacagtcccagtgtttaatcyttagaaatctgtaaaaatctccaaacaaaacaacacagtaatatgccagatctctacttacctatctggatttattagagatcgtatagtaatagcagcctttaaacgctgcttgacatctaggtaactagaaggctcatcaaacatgaaactatgaaaaaaaaaaaaaaaaagcaaatataagtttgaaagacaagacattctaccttacatactattttaaagcactgtagtatcaagagcttttgagttaaccacaacacaaatctccaatagtaatgaagagtctacttgtaatggtaaaaatttctgtattctgttcagaagtagaaggaaaaaattacagaaagcaagattacacaccaggtctggtgagggtctaccaggttaggctaatttacaaattggtcactcctcataaaaagtattctgatatagtctcaagtagtttggagagcttttctcttaagtcagctgcatttaagcatagttttttggagggtatttcaagaatttatagaatactttgtggagaagagttagccttcaccggacaacagggcagaaatgtggaaaaagcagcaataaatgtctgggaggagagacactaaataaaggaaggaaactttcctctcctctctttcacatggcatgccacagtgatctacagtgatttaaaagacctcgcgtcttgcttcagatattaaaaagcttgctagcctggctggagagcttaagtcttttcacataaaaacagggcttaggccaggcgtggtggctcacgcctgtaatcccagcactttgggaggccgaggtgggtggatcattgaggtcaggagatcaagaccaacctggctaacatggtgaaaccccgtctctactaaaaatacaaaaaaaaattagctgggtgtggtggcgggcgtctgtagtcccagctactcaggaggctgaggcaggagaatggcgtgaacccgggaggtggagcttgtagtgagccaagattgcgccactgcactccagcctgggcaacacagcgagactccgtctcaaaaaaagagagcttagataatgaataactgactttatataaaaagttccggcacctatcagttataaactatctaaataaataaatattttcccctgtgaatataacagggaaaatgagtagtggatacacaactgcttcaacatcttacctcgaaattaggaacttagatactatttctattaatttctctcaaaaccattcctctattagcagcatcacaactgaaaactctacaatacggatgaagataaacaaaaattgtaaagtaacctacatatcagctttctgtatgcaaacgacagcacaagcaaatctctgcaactctcctcctgaaagatcttcaacatttcgttcttttaggtgggttaaatctacaaagaacatagaggcattgtgctcaatgtatttcacctcttccaggtaaaaagtatactgcatgtcatcatttgaagtttgaatgctatttcagttgaaaattgtttaaatataacaattactggagattttcagtaatccacataaagatgtgtactttcatcacttaagttcagggcctattgaaatatatacacaaaatggccgggcgcagtggctcacgcctgtaatcctagcactttgggaggctgaggcaggtgggagttcgagaccagcctgactgacatggagaaacccggtctctactaaaaatacaaaaaattagctgggcgtggtggcacatgcctgtaatcccagctacttgggaggctgaggcaggagtatcgcttgaacccgggaggcagaggttgtggtaagcagaggttgcatcattgcaccccagcctgggcaacaagagcgaaactccgtctcaaaaaataaataaatatatattcacacaaacaaaaaataaacacttaccaagctgctgacatacaattgcctgtgtctttgtttcatcttttcggtccaaaatagatcccactgtcccctgccacaatataccaaaaacagttactattttctttcaatattaaaaagaatcacaaagtaaaacaagtttattttgatatatcttttatacttctactaatatccgttaagttccctctatcaaaaaccgacctttgcagccttaggaatctggtctacatattgaggtttgatgatggcttttaggtcatcttctagaatctttgtaaagtaattttgtaattcagatccacggaaataagtcaaaatctcctgccagtcaggaggatcctaaaaaaaaaaaaaaaatacagaatcatgtgaatttaataatacaatgacaaagaggatgaatgctacaggaaatagattatatatgcaaatagaacacttgtggcttttaacttaaggttggaggcgaacataattaataaaagtctcatttccctatagcagcaaagaaagaaaacagaacagatattatgttattcaaaagcagattcctagcacctaggacatagaagggcatctaataagaggttaagctggaaggaatgtttcctgctcatattttcaaaacaagtgaaaatgttttcaggtatccaagatatctttctggatacttaatcaaggattcagaaatgaaaagcaaaatacacttatgatttatttgaacaattaatagggcggcattcacactctggtgaagctccattttataatatctacaaataaaaatatctaacttaagaacattacacagtggctcctaaatttctttatgtactaaagttggaaatttaccattcatgagtcaaaagcctaatcaaactattgactgcaacaaaaactaattgagctatttttacattattgggacaaattaaatagaaacgtgtgtaatacagcagaatcaagcagaattctgcttcagatcaaggcttaacaactcagaattttcagttaagtaacattaacagatttttagttcaaaagtacaaaagagctttgtttataaatttctcagcattaattccataaataattttgaaaataagaatattttaaaaatatacatatcatccccccaaaatctcataaaactgactcatgatatyaatttttacaaggtgataatacatacatcgtactttccaaggtttggcttttgttttcctgctaaaatttttaaagcagttgactttccaataccattagttccaactaatcccaaaacttcacctggacgagggataggcaacctgttacaagtatacaaaaataataaaacaactcagatttacacagaaaaagccacataacatcagaatgatatattttaatgcacctgcacttcacaaccatccattaataagctaagaaacatatgccagatattactggctattaggaaaaaaacagccaagattaatggctattagaaaaaagaacagccaagattaacttacactgttaattgttagaaatgcatccttaaacaacattactacaagttttatttattcagttttcaaagtccatcctaaagtaaatttcttctttacatataaggcccagttttaatgtataacaaaatgctttggtacaaaattacacagcaggtgcaacctcacaatgtctttcttttctggcctgccatttacttacaaggagagaagtgccacatcaaccagaaatattccacttccttctccctgctgcagtaggccccttaaagctggcaggttgagaaatacttttttattagtaaaaatctagactcctagattcaaagtgttagtgttcagcagataaaaatcccaaactaaggatttatttgtgccttaataatacatgtccaaattcaaagtgatattctctgtagatcataagattaatggataaacaaaatcaaaggcaagttcccttaaaagttattttggggataagggtactaggaacaacagtgactctcagtcccagttgtatattagagtcacctgggactttttcaatatactaaggtccagaccctatgatgtaattaaactgggctgaaacctgggcattagtagctttaaaaagtcccataggtaactgtaatgttagccagaatgaaccacagacatatgcagtatgattctgcatgatgttataatattgtattttcctttagtgactggttaatagcatttccccccaatttctgcacttctcttaaaatcccaaatgtattttactcttaacttgacagaagaggaatcctgatgtgaaaatatacctgtgaagtttgaaggcattggcacaatatcgatgtgtggtttctttttccaagttgcttggtagattgacaattgataaggcgccaaaggggcatttctgttatttaaagtaaagaattaatttttgtattaatttgtagacatatacacataactaaaatggattaaaaatatttttataagcaatcttctaaacatgatttcataaagatgtgaaatgttgtttcatttccttctactatttacttaaaataaaaggttccttgaacattagaattatatcaattgtctctcagtatatgtggggaaaattgttccaggactgccgagtacaccaaaaaattggcacatactcaagtcctgcagtcagccctggagcacctgagtaaaagaaaaagtcagccctttctaaaatggttttgcatcctgcaaatactctatttccaattggcatttggttgggggaaaaaatacacgtgtatgtagatctgcacagtttgaacctgtgatttcatgggtcaactgtaacttgatattccctttagtgttgggtataatcctatacatttaaagagtgcttaatacttattgaaaaaccttgtagaacttgargttttttgtttggttttgttaaaacatattagatgaggggaggctaagaggcaagtcaacaaaaaagtcactgaatatatggctttatattctttccaaaacagatgttctccctctgtttccttcaattattcctgcccttgtatacttcctgttctaccttgtaaagtcgtttgaggtcatggatcttatccttttttgggctatttccatcccaccaatagctagcatatttgcacagactggggattaatgtctttccattatgacttttatctatcttatatgaataagatacttgaattctcggagtcaattcacattaaaaaacaaaayaaaacacataggcttattcaaataacattcaactataagatgactgtccaaggaacaagaacagcaaaaacaggaaggtcatttaagaatggtaatatggctagaaaaatttttcgtaagtacagacaactacagaggtacatgcaaaaattataacctcatgttattagagatctgttcagcagacatgttcaatgagcttaggggaccaattctaagtttccgtgtttagagattccagggaatttccattttatacattataaaaacagataattactcttgttttctaataaagtaatttccaccctctaaccaaaactattaagtttttacaaattatatttttctatattacagtggaggatagtggagttacctccattatcctcttctcttaaatgtacatacaatgcttatatgctgcaagtgatttaaactcaattctacaaggaaaaaaatatccactgttcatatatgaggtacattataatatcttagtgttcaggaattatacattacttctccaccctcaaagaggaccacctcattagtatgtttttagccactcaagtgtatatccaaaatttaaaatttaaattaatataattttcttacagcacaaagagagaaaacagaatagatactatattgctcaaaaccagattcccagcacccaggataaaggcaggtatctagtaagagattagtaaatatttgctggaaggaatgcttcctgtttatattttcaaagcaagtgaaaatgtttcaggtatccatgaaatctttccggatacttaaacaaggattcagaaaccaatgtgaaatatacacacgatttatttgaacaatagtgtggtatctgaattctggtgaagcgcctttttataatatctacaaacagaaagatctaaattaagtatgttacacattagctcctaaatttcttttatgaactaaagttggaaattcaccattcatgagtcaaaagcctaatcaaactattcaaggcaacaaaaactattaataattgagctattttaagtattatactattgggaaaaattcaatagaagcatgtgtaatacagtagaagaattatgttaaattttaaaatttttggctgtgtgcatttctatttaaaaggtgtgaatttaaaattcaatacagacttgaaagaaacatgtaatgtgatggtaatgtccttataaaaaggtgaaaaaagagaaattttggttggaaatggctttataaagttgagtacagcaagagtaacttttaaaaagggtggtttaatttatttaaaaaagcaacaatgtcactgatattagaataccactttcctaaatttacattctctattcatttgctttatactttgcctcacttaaagtagttatagcatagtatccagaattttcagatttcagttttaggttacacgtttgatccagtaaataaaatattacttaccttaatacagataccacaaccaatacaaagagtttcggaaatccatgctattttgctctggggtgtaacctctatgcataattttcctggtaaaggaaaagatataattaagccatttcctttgatcttctaattttccgaacactgttatttaggcaatgctggttctaaatttccatacagaagcagattttcaaaaacaaaggccacacaaagaaatacatttgagataatgtcttaaatcagtgctttgtggggacagatttctaatcacttatatgaatatccttgtttggcagcagggagatgattaattaatatatatttattttacttaatttactactggggaagaaaatatgctagtaaaagtatgacatatcctgaaatatttttaagctgattaacctaaattttaaattcataaaacaaaatatgccttgaaaatggtaaggcagagcattaaacgaatgaactattgtagctagatcagtaaaactccaaaaaggtatgcagtcatctaacatacagctaaaattaaacatggtagtagggataatggaatttctgaatagcaaaggagacaataacagatgacaactaaagtttctaagtttcagtaattctaagagtcagtaattctatgcctcattcgtatattcacaattacttaacatagcccttaacgactaccaataatttttcaactgaattgttggaaatttatctaatcttcaaaatatagttaaaccttatgaatagtcattcttattaagctctttgttcattttttaaatatgaaaatactgtcaaagtttactgtaacccttcccccattgattatagtaattaattactatatatataatattaaagtaattataagattttgtagatttcaagatcagtaagctgaactctgctttgagttcacatccaatacacttttaaatattgatgtattattctaaaatttggtctttctttaaaaaatatgatccttcagtcacaaagcaataaaagaaatttagaacaaactacttttcttgtcttcacagttttatgaaactaatggtgaacacaaagtttatgttaatgtccgtaaagaattatcaaaccagttgatttctttcatggttttcttttatacttaaatgatccacagaacagcttacccattcgaactacaggacaactctttttgcattcctgtcgacatttcttaggtttacatttgtcatggttgacaatagcaattctcgttaacttgtctgccataactgggcgaaagaatatccagctcttctatgaaagaaaaatcaacaaatttaatgccattagttaagggaactaatttgcrtacatgaaagacaggaaaacataaatgatcattatatggagatgaaatgattatctgcaaaaaaaaaatataaattttgacaaatgtaaaaattgtaaaataatctataatctagtaaggttgggaaaaycaaattttacatatatactttaatcagaagayttatataaggaaagaaaaaaatgtcatttacaatagcgacaaaaagaaaatatctaggaatatactcaacaagatatatacacaagaaaactttaaaacaacaccaaatgatataaatgacctgaacaaatgacatgctatctcagtttttataataaagaatagttaatatcacagatttaaacccttcctgaatttatatatttaattcaatctcatgagaaaaaacaaacaaaagaaccccagacatgtggtggtgtgcgcctgcggtcccagctattccggaggctgaggtgggaggattacctgagcctaggaggtggaggttacagtgagctgagatcacactactgcactccagcctggatgagagtcagacccagtctcaaaaaaaaaaaaaaaccccaaccaacccagacaaagcaaatctaaagctctaatggaaaaagaattattaatagccaggaaaactgaaaaaggggaagcaggatgggggaaatcccacaagctcttcccccaaactaagcattacttcacgtcgtgtacatctgactataatgacactgacagaaatggcaaataatcataatagcaatgaaattaaaaggagaccaaataactatatgtatatactatgctcacttttaaagcttttataagtcttgatattccaatttaatcaactacacagcattaagatcaaagttaacttaaaaatctttcacaatattgggcttagtggttcagaaattaatttccttagaatggtgattaaagtaaaaaattccaaaaggtgccttaatactcaagtttattccaatatgtaatgaatgaatctgaaaccaagattatccatttagaaagagatcatgttgtctttttcttactgtgataatcaatcttgattttattttattttttttaatagactgcttccctttgtagacatctcaagtctttttcacacccatcaatatcattaggcttggatggggataagagatcttgctcctcgacgctgtcctagactattatctctccctcctccctaaaaagttttgcatctcaactatctaactgctttagttagtagtgaccaccagatcactccctttcattctttgaagatttcagcccctgttaactttcacacactcttttacaactcctgacatagttctcgatttcaatatgctcacagatgaccctcctgtcctctcatttaacccctctcctcaaacagcttgtcttctaccttaccacagccattcattttttctggttacatcctagaccttatcattaccagtaattgcaatccttctataacctcaacttcaaatactccattctccaaccaccattcttatctttttagttcaccccctactacacaacaatccaacaactctgattcctccattcttcaaacctttcattatctcttgattctatcatatttccactgtccctcagctcttggtgtttttattttccttctcacccagctaaaataccctaaatcacaatcttggttaaattcgactcttcacctgcacacatagagctgaaaatggtaggtgaaaaaaaaacacaaaacctgctgactagtctccctttaaattcatcatctcaaatggacccttatgccaaccagcaatgacactgtatgtatttccctggctaagaccatttgtacactagaagacattccataagaatgtcccaacaattctcccttctgtctttaacttcatcaattattctctccactggctcattcttatcagcattcaggcattctattatctgaccccatcgtctcccattgttttatttttccttcttcaagactacttcaaagagttgcttatactcaatgtctcaaatttcttgctacatgctctctggaatccattctaggctctagagcccatcatttaatcaaaacttttcgagccatcattgttcttcacatggctaaaacaaatggttatcagaccttaattcacctgaccaatcaattgcatctgacacaaataaacacttttcctactagataaaaaccctttcttaacttggttttaggatacaacactaatctggtttttctactgttttcctggtcactcatcttcatctcccaggcttctaaatgcagagtgctctaagacttggtcatttttttccacatatactcattccccaagttgttctattctggtctcacaggtttaaattccatttatatactgcaaatttccaaatttctatctttagtcagcatacctctcttgaacccttcctgcccacctaacatctctggaaggcttaagaggaatctcccaactaagctcctgatatcctcaccaaaatttcagcagtcttgcccattttgttagatggcaactccagtcttccatttgctcaggcccaaatccttgaagtcattttcttttccacctaataacagcaaatcccactgaagctataaaacatccagaatctgatctcatgagtttggtgtaagctatcactatcatctcttaccagcatcactcaaatagcttcctaacagatctctttgcttttaccctcacctctttctactctaaccctcaacagttcattctcaacacaggaaccataggaagccttttaaagagtaagctagatcatgtcactcctctatttaaaatcctgcaatggcttcattctcaatctgagtaaatgccaaagtcctgaaaataatcaatgaggcattgatcagcctctgttaactttctgatctcatctccaactactctagctcttgtatggctccagctacattggctctttgttgttcctagcacatgccaggcatgttcttgcttcaagatcttggcactttctgcctgtaatgctattccccctagagagttacatggcttactcctttcaatctttactatttctcagtgagccttttgtaactacactaccacaatatacactaccgaaaaatacacccaactgcctcttcatccttctttcttgctttatttttctccctagctcaactatatgacatactatatattccatatatatattttttttatatatatctggtgtatatgcacacatctatcgtgggtgtgtgtatgtatattgtctctctacaaacacatacacatttttcccctccccaagtagaatgtactccatccatcatgagggtaggaatttttgttcattccagtggctgaacctgtgcctagcacacaggagatcaagcatttctgctaaatgaatgagaatatgaatttaaatatagtaaataattttcctgtaggttataacaactttagaaatcttgcaagttaccaatattttatagtgacagttgtccactaaactacatactgaaaaaaaaaatcattcaaaaggagactaaatgttcatgtaataagtacagggttattccaataaacaggttgactctattcctctaaaaactggtccaggtcttgtaaagattagaagaggaagaaattagatggcttgaattgtcacaaaaaagctattattcgggaaatgacaacttcctaggaaatgaagattcttcagcaagctattaaaactggacaccatgcattctaatttaaatactgaatgcctttctacaattactcagtgaaagagcataatgaattcccctccaggggataaatcaccacgaaattgcttaaactttatttctgttaaactactaaaatatttaatttttcaaactattttaaaaaccaaaagactgtaaaagacaattttttaaaaagacacagggatcttgctatggtgtcctggctgagggcagtgatcacaggacactacagactgggactcctgggctcaagggatcctcttgctttagcctcccgaatagctgggactataggtgcatgtcactaccctggcttgatttttacagtagaataaaaacataccagaagtggttaataaactgatttatataaaaatagtgataaattgtaatgcatttaagaaaaatgaacatggattctttgtagaactgttaattaactgtgtgaacacttttaattcaatttctgtatcrgtttcaataattggggcaaggggattccctacttgtttttcaatagaaaacctaggcacagtaaagcttggagaggaagattatagttaacaggctcctgcaaacaaagaaggatttgcggatatttcagattcgaagacaaaagtgttcaaaattgacactagaacaatgaccctcagtgtcattcttacagctgagaggaaaaaaggaagtgaggaatacttagaagcatttacagtctaaagccaaaataattgtaacgctgtgtaaaagcatttcaaagactgctgttaactaatgatgtttagtatcacatgaaatagtctaacccatgcttattgtagtttattagtcttacaaaacacgtagaagttaggagtggtacacggctctgatttcaaagagttttaagtttaagacatttagaagaactctaacttaatattgttttctccccctctctcccaattgttagatgctcttccaacaaacaaacaaacaaaaaaactcccttttttaaaataggggagaactaagttctcaaaaagctcacaaaccccaaacagcttttggttcaaatacaggttctgagcctttggttacactaacaaagtattagtgtcaggtggctggtatacaatgaatattctcagaatatgggacaaactactgcaacataaatgccactatcataaatgactagttagcagtcctgttgggaaagagtaaaaaaataaaacatgttatttggacagttcttcctcttatagatttttaccatcaaaaaagagaaaataagcttatgtagttaatgggaggtgggaattcggctttggctgtcattcattcacaatacgtattaaatgcctacaatgtacgaagccctgaagagataataaaggtattctgagtaaagacatcaaccttgatctcaatgagtattagatacaataaaaggaaaaacgggtaaggggagaaagtgcctagtgctacaaaagcgtaccaaaaaaactataggatttctactgggaaactacttgggacaaccccagtcatagctgcgtacacgctgttctgagaaaagcagagtgacatgtgggcatcatttctataaagcctgggagtggacagcgagtattcgacttcatggcggcaagatgccatgactcattccactcaacaaaacgtggaagccacgacttcccacaaccaaatatgcacatgtgacaatatatccattttgggtgctggaggagtgtgggggtactagagagtgctgtaagttctaaaggtgccttcctctccagcaggtttagcttcagggcgggagtggggtaaagggggagtggagactacggcatctaggtccattctcgaagtccctcgcgggtgtggcaggcaacagcggcgacagccgggtcggctggaggggaagaccgaggcgcccccaagctctcggcgtcgcccgcgctccatcagttccagctgtcccgcaggaaccgctgccacgcgctgctgctgtctccgccacctaaggcctaaccaaaggctctcggagaacgtccctacattctttccaacctggcagatggcagctaacggccaaacctctccgggstattcacgtacctggagaaaacgatccccttgcggaggggagcacagaggccaaatcagctcttgccttcacttttcagccacacagcgtgttctcacggccaccggccaaaatggcggtgcccagccgccgcacgcgcaagccataggacgtagtgcgcgcgcgcgacatagagcgtgagrcggaaccctggaggtaggtagggagatatgacgtcattgagctgcgacccttgttcaacgccgttggcgaagccagctgctggaggtgccgagaatctgagtttcggcaagcagccaggtctggaaactgtgagtgtgtgggcttttctccgacgtcgagcgtggtcctagcgtaaacagatgcattcgcctctccggtttcaatctttttttacgtttgcgctttcctcaaggccggtgggtcaggagtggagccttagtcattctaacgctggaggtgtcagtaggaccaacagagtctggtgccgacacggcttactgttgcgcgctcttctaggcctcaacttcctctcaactgtgtggtcagttcagggccgggaatccaatcttttccgagctccatattttatccacttggtggcgtccagtcccaagtccggcagttgaattctgccctaaagatgggctttatttctatctttttttaggtaacaggacattcagttagtaatgatggttgcaggttgaatagtctcgccctagatctcacctaacttgcaggcaagtgacaactagttcatgactgaacctattcatctgtttattcattcagtaaattacttattgagcgtttaagcctcaggccttgccaaagtttacagtccgttgtgtctgccgttatttagtaagtatcaagtgcttgtgtgccgattaaagaacaacttcggatacaatgggaggtgtcaaggaaacggtatgcagaactattgcacctattttgaatagcatatataacaatgttcagtagcagtaactgcgctaccaaagcagttttacatattgttcacgatccagtattgaagtgttttttcacatatgaatagacttagtaaaattaacaaaagatgtgaaagatgaggtcaacctttttagaatgggccagttattcacttcaaaatcttgaagccattttcctgaccttatcttctatggtaagagcatatgtaagtgaacttttaacatttttttcttatttttgtgctttttgggacagtgtcttgctctgttacgcaggctggagtgcagtagcacgatctcggctcactgcaacctccgcctcccagttcaggtgatcctcctgtctcagcccccctgggactacaggtgtgtgccgccacaccaggctgattttttggaatttttttagagacagggtttcaccatattccaggctggtctcgaactcctgggctcaagcaatccacctgccttggcctcccaaactgctgggattacaggtgtgagccaccgggctgggtcttaaataaaacttttgacagctagagggcaggtatgactgttctctgcatcactcaatgaatatttaaaatgaggatcttagtggggtgatgggatcacacctgtaatcccagctacttgggaggctgaggtgggaggatcgcttgaagcaaggtgttcaagaccagcctgggtaacatagctagatcctgtctctaaaaaaaaaggaattaagtaaataaaatgaggatcaatatttatatattcctagaataaaagtatttcagtctgacttttctagggctaaaagtcatttgaattttcaggcacagaattatagaactgcatagcattgtagaagtaaaaatcatcaagtgaacctctttaacaggagaggaaataaagcccagacctactcaaagtctaggctgattaaaggagatactgaagccaaaactttgattctgtgctcttttgactactatagctcactgctttgcatatctggtcatatgaaacaaaacctgaattcctaagatttttatttatttaaaaatagagatggggtcttgccatgttgtccaggctggtcttgaactcctgggctcacatgatcctcctgtctcagcctcccaaagtgttgggattacaggtgtgagccaccatgcccagcccctaagatttaaattacagtgatttaattatattaactgcattcttcagaataaatgattaatgtcagggtatatgagttccattaaatttttcttggtaaaaaacttttgtagaaagatgcccagttcctgatacaatgtgtgcattcttgttttctacatagaatattttaaaaatgactacaccaaacaagacacctcctggtgctgaccccaagcagttggaaaggactggaacagtacgggaaattgggtcacaagctgtttggtcactctcatcttgcaaaccaggtaaaaactaacaaacaaaaaagctgttggaaatagtcacttgcagtttccttgtacaggcatctccccttatcccaggggatacattccaggactcccagtggatgcctaaaaccatggatagtactgaaccctttctatattaatactatgttttttcctatacataaatacctgtgataaagtgtaatttataaattaggcacagtaagagattaacaataattaataataaaatagaacaattataacaatagaagtaataaagtaataaaagttttgtgaaagtggtctctctcgctctcaaaatattatattgtacccttcctcctgcgatgatgtgagagataaaatgtctatgtgatgagagcgagtgaggtgaagaatgtaggtgttgtgatgtagtgttaggctactattaaccttctgacaatacttcagaaggaggagcatctgcttctggtgattctggatcatcaagccacgatgatgttgatgattggatatcaggagcagatgatgttgatggctaacggtcaggtagtatacacagtgtggatatgctggacaaagtggtggatgtgctggacaaagtggtggatgtgctggacaaagtgatgatttatgtcttgggtgggatggagcaggatggtgagaaatttcttcacactactcagacagtacacagtttaaaacttaccaattgtttgtttctggaatttcccttttaatattttgaaccatgattgaccaagggtaactgaaactgcggagatgaaactgcagataaagatactactgtacactggtctgattttaatattccttttgtttagatgctttattttaattctaatgcactgaatttttttttatcatatatctctgtccaatttctttactattccctagttagatttaattacatatgtcataaggtcttctcttttcctcctctatctctactatgattcagttgttattcatttattttttttggccgtttctctcaattggataaatgagtgataacatacgccaaaatactttccttttactctttgttgggatagaattcttgggtggcagtccttttctctcaaaaatttatgaatgctctttcactatcttcttttgccatgttgtggatataaaggcctatgcctacctctcttttttttttttcctaagtaacttgtttttttctggaagcatctaaggtttttctctttattcttgagttcatggcatttgccagatatcttttctcacccttgtaacccataattttataggcagttttcacctgcagactcaagcttggagaaatttctttagcttgagggactttataatgttattagtttagtagtcatctttctttcagaaacttttattatttgcacattatgactcctgtatccatcctctcaaccaagcctcttctgtttcccctcaagattcccttctctgtctttctatgagcactttcttgaggtataatttacatactataaaacttaccctttttaggtgtacagttctgtgaattttacagacatgtacagtcatataagcagcattataatcgaatatataacattgccatcatcccacaaagttccctcatgtctctttatggtcagtcttctgggcctttccaagcccctgacagctcagttttgggtccctttggtttcgcctttcccagaatgccgatataaatactgtatgtagcttattgggtctagtgtctttcatttagcataattcacttgtgggttttgctggggcacatatctgtagtttattcctttttattgttgattactgttccacaatatgggtgtaccagtttgtttatccattcaccagattagtagtagctagctttcaaaatggtccccagttatccttgccttctggtattcatgcccttctgtggaccgcttccaaattgtgtcaggattggtttctgggaccagtagaataaggcaaaactgatggtatatgacttttgagactaggttgtaaaagacattgtgtccattatttcttcaattatttcttttgccctattgcttctctattatctttctaagaatctgggaatccaattatacatatgctagaccatttgttattatcccacagcttttgggtactctattttttttcactttttttggagttgtgtttcaattctggtatttttcattggcctgtcttcaaatctgctgcattcatctttggctttattgaatatactgataattctgcctaagaaatttttcatctgtgatattatattttttatttgtagctcttccatttgactcgtagaattttcatctctattgaaattcctgtctgttaacacatttcatctacctttctaggtttttgttttttttttttaacatcttactcatagttatagttatttaagattcctgtctggtagttccaacaactgggtcatctctgggtctgtttctgtttatgataattctgtttttctttttgtttgtcttttttttttattgagtgccaaatatgtgcagattagtagatactgagataaatagtttttacaccttgaaatgggtgccttttttctatcatttgtcctttattgtgggatttgcattagttaggaattgagctgagtttgagttttgttattgctatggttaccttcagtgtctcacaggcttcaaattcctctaaagatgccctgtgcttactgtgagaacattgtgccagagacattttcttatttttctatataatagttccactccagttttcctgtgctttggcgcacacttgtgctacagagggtgcctcttgccatgctcttgccctacctccagctgtagaatactgtgtttcattactcagttcagggtatgagaggcaggttagttctctgttttcctagtgcagctacactcttaggtaggctgtatgtgcctggcctcagcattttggcccctgctgttcatgacagccttgtatctgtggctggtcttttgtggtaaagagttttctgcctcactctgagaaaggactgttgtttgcccctctctcaggtatagagagttttttcttttactcatctttcagcaaggatggattgtatttgtgtcctggggtcaacagggttgattctcctcctacagtagcttaagtcctttcctctatgggagagaagggtttggaaggagggtagaacgttttgctttccttcactggtggtcagtcccctcctctgtatctgtagcactgacttaggctgtttagtctcttcccctctcccagtctttatgtgtaaagtgagggcccttgcaaaagagtctgagagtcagtgtgaattcaccttgtgttttgggctctcagtgttgctgtactattatgctagcctgcatttggtctttgtcaaattattaaagttatacttggtttcttcttatgtatttatttggtcttgttccttcctcctatgctctactacagttgggacaatctgtaatctttttttctcctgggaatgggggctgccccattcctggatttcaggctgtctggtaggagtttgtagtttatccagctttttctgttgtttggatggaggtgattttttttaatttaaattttaagtttaagttctggggtacatgtgtaggatgtgcaggtttgtgacataggtaaatgtgtcccatggtgatttgctgcacctatcaacttatcacataagtattaagcccagcatgcattagctatttttcctaatgctctccctccccctaccccatcctgacaggccctagtgtgtgatgttcccctccctgtgtccatttgttgtcattgtttagctcctatttataagcgagaacatgtggtgtttggttttctgttcctgtgttagtttgctgaggatgatggcttccagctcctgaaagggagaggcagggtagtt

SEQ ID NO: 98088 - DNA, 85594 bp, Homo sapiens
ccttgtgggaaattgaaacagtccggggagatgggggagcaaattttgcagttctggcacagactgtggttcaggattttgcctgctcacttcagtgacaggtcgttagctcctggcttatcaacgatggcagacactgagagagtgccgggggtgtataaaactgatggttcctgcccttgtgctttacagatgaggaaaacaacgtaaaatgcgtaattgaaaattgtaagaaagccagagatggaattggacttggggtgggtgttgagaatatatatccagaagaatgggacactttagatgaggccaagtggctgtggcagtggaagcaaatggggagtaagtatggctggagagagggacagagaccaggccataatgaaaggtcttgggggctaagggaggaagtttacattttgttgaaagtacactagaatgtgcagaatcttccagttgcttctcatctcacctgagtaaaatccagaggtcctacaagaccgagtaatccagcccccatgaatccatgagtgtgccaatatcatctctactccccccacccccaacatgactccacctacactggtctccttgctgttcttttatttattcatttatttatttatttggagacagagccttgctctgtcacccagactggagtgcagtggcatgatcttggctcactgcaacctctgtctcccaggttcaagtgattcttgtgcctcagcctcctgagtagctgagattacaggcgtgtgccaccacacccagctaatttttgtatttttaatagatacagcgtttcgccatgttggccaggccggtctcgaggtcctggcctcaagtgatccacctgcctcggcctcccaaagtgctgggattacaggcgtgagccactgcgcccggccccttgctgttctgaacaccccaagcacactactgatctttgctgttcctgttgtttcctctgtttggctcactctttccccagatgtctgcagggctcacactctcactttccttaggtctctgtgtagatagcatataatcagtaaggccttctcagactacctgctatgattaacaaggtcctcctctggcattccctagccatcttagcctgctttatttttctctacaactcttaaggtctgacaaatcatatctttattctctctcctccactgtaacataagctccaagagggcaggaactttttcttgttctgctctgttgtctgtatctaaaacaatgcctggcagataataggtactcaaaaaaaaattgttgaaggaattactatttgctctttcagaagatgtgatggtttgcttcgggaacatgtttatcaagatgcctcaccctgagacaaaggaaatgattgaaaaaggtaaggcctcctggggatgggtcaggggtgtgctgcctctcccaccagctttggtcttaacccagaacagggagtcaggcttcaggcagcgtaaggagaggcagttctgtcacagggttcagactgctgtgggttttaattccacctctgccactgtgggttatttcctcatctctaagagggggatgcatctgtgtagcatagctgtgcagttgaggtaaaacaatatgtgtgcctagcatagtgctttcttattagtgaggaatcagttgggctgcagataacaaaacccaacaaattgaggcttaaggaaatatgcttcttttactcttgcataagaaattgtccagaggtgtgtactccagtcctggcatagatgcccagcagtggcaccttagcatattctcctggttgttgtttcatcgttgcaggcctcatgtcctcatgccaggctggaggaaagacagaaggctttcgccacatagagctttgccttctattttggaagtaaggccatctcctcagggacttcctgccaacatctcattggccagaactaagtcacatggtcacccatagctgcaagagagcctgggagagtgagcttttcttttttacatgccctgcaatagagactgggttgaaaatggaggtttggggagattaaacctctagggtctgccatagcctaggcactcagtgtactcagtttccacaaccataatctggaagctctttggaaaagcatcttaaagcaagtcaggctgcaaatggattattggctagaaaaagaacaggctacacatactttttcttccataaccttgaaaatggccaaaaggacaagcaaggttgcctcagtccctgaagacaggatgtcttcatacctcatgaaataaaacttttttttttttccttgagacagagtcttgctctgtcacccaggctggagtgcaatggtgctatctcggctcactgcaacctttgcctcccaggttcaagcaattctcctgcctcagcctcctgattagctggaattataggtgcatgccatcatgcgtggctaatttttgtgtttttttagtaaagacagggttttgctatgttggccaggctggtctaagtgacctcaggtgatccacccaccttggcctcccaccaaagtgctgggattacaggcgtgagccactgctcctggccagtgacataaaactactaacaggaagctatatccagcctggagaagtttccagctgttgtgttgaaaaaatacactaatattatggttataaaattaaactgcacttggtggtgggctggaggctaagctttcagagggtcccttgcctgggttcaggatcttgttggcccttttggcccccaaatgtcgtcttgtcactgtacctagaggggttctgagacattatcagatttcttggggatcaacataggctaaacaagctcatggacattggggttactcattcacaatgagaaatagaaccaggctgtaaggcttggccattcagggtttctcccccatctgaaagagtgagtctgtggggaagacaggctagccagaatgtcactcatgagcaggtggaattggctgggtgacttcagtcaattggtcaatcaagctttgatagccacctctgtcatcacaccaactcttctcaggggcagtccatgacactagaagacccttttctgttcacagtggctaattaagttaagcttgagcattgcttgcgtgttgattgtttacgtcacatgtttacacaatcatgtttttctaaaaccccctcaccttgatggacttgggtttgtaaaatttcttaggcatccattttccagccatctagggtgggctgaatctagagatgcttattttgtttgtgcatttgaattttccataatttcattgtgggagggcagcctaaagtcctgatgttgccttctccatccactgaccaccccaaggtactttgcataatgcagaaaaggccagtgtaatgggagttgggactgctgtgtcctgggctctctgagtggtcctgagcaggtcatgtcccttctagactttaatccttcctcagttggcctctgatgtccccttttccttcctgaaagctacacgcccttgctggggagaggctggcctctccactactgggatcaagtctgtctggtacaatcttatcctctgcttgcccccctcattttttcagatcaagatcatctggataaagaaatagaaaaactgcggaagcaacttaaagtgaaggtcaaccgcctttttgaggcccaaggtattggcttagcagggactggagataagaaggggagggaatcatcagcatggactttgaagggcagggatgggaagtccgaccctcagagatgggcagtgtccggggcagcctgtgagtggccctggaggtgtgcacagtggttggttgtagctgcccagggacagaatggacagggggacttctacagtcctagtcctgtcatagtttcttttccaggtcccaggaaccgcttggggtgatctcacgttatacatcggggcatggcatggggatcagatagctctgactgaggaaactcagaaggcttcagtgagtgagtgaggtcagagctgaaattcttgataaatgcaagcactctagattggtcacaggtcttggaaaaacctgaggttctttgggcagcagagttacgcgtttgcaggctcttggtgacacaggagcagtggtgatgcctcatctggtgcattgcagaattggaggcccatccctgccagacctccaggctgagtttggcagcattagtgcagcgtcagcccctttcctgggcctggctccagagccagcaggaggcccgacgtgctgatggatcatcttctctcctaggcaaaccggagctgaagggttttaacttgaaccccctcaaccaggatgagcttaaagctctcaaggtcatcttgaaaggatgagactcaagaaccaagatgggggaccagcaaccccccagggtcatggaggacccaggaccctccaaccttgacacctgtaaggacaggatctgccctgtaaggggccagccgtcaggaatctggccatgaaaacctctttgtagtgcttggctactctgtgatggcaggagggaaccttcagcctgtctggctgctggacctggacaccagggctcggtggacacaagatctattgacgggccttggtagccaccagtgggtgtgtggggcagtggctgtgggggtgtaagaatgactgcaacaggcacttcccaacaatggcctgctgttcacatggaccctgagcaaggaaggagggagggaggggcagagtggagtgtcattccagcattcctctcagaagggagagaggttttcaggctggtgccatgcgattggaataaagcaggaggctcatgggtggttgctgaatgaagaacagaatcttggtgctttgtggctcaccacagccatctgtggggcaggcacacacacctcccgccagctccaattttgcactttttccctgcttgattccaagagtaggtgctgcctagcagcccttcgtggccactctttactcaggagggccttgcagagtcctgcaccaggcctgggtgagtggatgcgcctcttaccatatgacacgtgtcaagatgcccttccgccccctctgaaagtggggcccggccagcactgctcgttactgtctgccttcagtggtctgaggtcccagtatgaactgccgtgaagtcaaaactcttatgtgttcattaagggctcaataaatgttagctgaatgaatgaatagcagcaactagtctttatttgcctcatctagtccttcagtaagggcacgccactccatttagaatacaacctatgaacatggttcttgccttgaaataaacctgtgatttgacaggcgggtgataacaaatggcagcatggcaggggcacacctctcctggtccccccgctccttggctctggctcatagttacatagaaacacaggctgtcatggccagttcttacgtgttttcaagagaagctagacatatgggttgtgaagttgaatctccttttaaatatttttgactaatgcagaaacttttaaaacatgagtgtgggtcacaggtgttagctccagatagtgcaataccatacaactataatcaagaataaggaacaagctccaagatacatcaagtgaggaaagcaaggggaaggctggtgtcttataagctaataatttttgtgcaagcacagtgtgattccctcagaacagcacctgcagggttggggcgcacaggtgggagggaaggagatgtcaccctatacccttttgtaaactttggattttaaaccgtatgaatatattgcttattttaaaatgtaaataaagtagggagttgcagaattcaccttgctagatgttgtccagtgtgactgcctgattcacaatttcatcactggaaaattgccccttcctccctggcagggtgggtgctgggccaaaaaaagctaatcgcattccttctggaaatagggaacctggagtccatgcctggacctgtctgggttggtgtgcctcaggtacagggatgagtgggagaagtcctcatgctctgaaggcagaaggtctagagtagcctggcttctggctttcctaaagtcggctggttcacttcttggatttgccagtattttccttccaaaagtcttcccttcgggcttgacctaggcaggcagattcaaccatttgcagccagagaaactactctgaagcaggcggagtggtagagggagtaagtcccccctggaacagttaccccaacagccccgagtcttgttgcaacccctcttaaaccaagaggaagcttagcaatgtaagatgtgaaaaggcagatttttactcacactcaactcccgaagctgtcctgcccatgagcccagggttttccggtttctggctcagctcccaatctcaaacacaaggcctagagaagcacttaagtcacccatctgacttagataaatgcacctttgcagagaccctcactaagctctgcctccctggtctgtcttgtccatctgagaaatggggatgccctgtcccactggttttcagatgatggtcagggagccccatgggctcccctgacatgcaaggagaagaggatgtgtttagggctcagtacttccccaggcccccaataaacacacaatctaataactgcttgctgtgtaagcacagcttaaagacgagttccttagcctccaaactcttgctcctgaaggaccttttcagcactgacttgggaggtatccaagtgtcaaagccaggaggacttggctgcagccaacagtatccccggaaccaggcctggtgcccagtgactccaagtagggcctgtgctcatttattagatatgatctcctgggggtagcagaacttgctgtatttgttctctttgggcctaactgccaagtcagtttgtcaaggttaaacctcccccagtcccagtgattggctgtctcctggtgcaaagatgcctggggatgggctggaggtatccaaggggcccaattcaggtagtaagctgcagctgctaagccagcaaagctgrtgccaggctggaggtggggaggcgaatgctgtgaggtgctgtgctgggatctgggagtgggggggaggcctgggtggcacctgctaaggctgatttcctcctggcagctggggatcaactggaagctttcttctgaacttgaagggagcagaagagctgcctcagttgtttcttccgatcgttgacgcagcctggaaaggaagtggggtgttggctgggatgacctatgcttgggaggagtggaggggcctgtgccccaactccctgctgggaagaggggacagcgggagtcagacaaccacacacagcctgtggtttatatcctggctccattcctaaactgccatggccctcaagcaggtcagttacccttttcagcatcggtcttctcatctgtaaaccaggatactactgcccaccttatggagtgaacatgaggactgggggcttacctcaagccaggaactgctccagatgctgaatgtggatggatttgtttggccctcgcaggaatgatgtgtagaagggaaaacaggctcagagaggttaaatcatttgaacccagactacctggtgccagagccacactcttaaccactaccccacgctgctgcttctcctggctttgctcagtgaaaatgcatttaaagctagcacagtgcctggcacctcatagctgcccagtactgttagctttcttcccttacccaacccatgtgccaggcacaactggctaagagatgagttttccgtacatgtggcccccaatcccaggcagttcgtgctgaggctgccgtgagctgctgagacgtctctcccaggacgttcatggtgctacatgttggctgtttgctctcagagctgatccttgaggtaactatggtcatttaacctcatgccaggcacattgctggcactcaaaaatgctgcttgaatgactgaatctctgtggccactagttctgacctgtgggtgtctgccatcttccacatccccccaaaccctgtccctgcttcccagacactcactcagccattcactgagctgagagcctacgatgcacatcctcagggttttccagagtgagttccatgcagccctaacttaaactctatttggctcattcctaactctcgagtcttcttgtccagtgcaaacttcttggagttctacactcatctctgagttatctgctgaccctttcacctggatgtccctgaacgcttccctaactcagttcatcagtactcttcctaccctaaccagctacccttgtgtttaccaccataaacccaaacacttgaaacaggaataattctagagacttctaaagcactggctctcccagcctggtcaatatagtgagattttgtctctacaggaaaaaaatcacacacacaaaaataaaattagccaggtgtggtgtgtgcctgtaggcctagctactcaggaggctgaggtaggaggactgcttgagcctgggagtttgaggttagttacagtgagctatgattgcaccactgcactccagcctgggcaacagagcgagactccgtctcaaaaaaaaataataaaaaaaaaacagtagctctcaacttgggctgcatattggaatcacctgggagctttaaaagctactgatgcccacaccaaccatatcttgatctggcaggcgtcagtagtctttaaagctcccaggtgattccaatgggcagccaagatagagaaccgccgctttccatctttgctactcaaatgggggtccaggaagtagcgcattgatatctttggtgcactgttggcaaagaaggctgcaacaatgttcctatatgcacacctctgtgcaaggtgactttgctgctcctctcatcaaaaggtggggtctattttcttttttttttttttttttctttttctgtgtgagacagtctcgctctgtcgcccaggctggagtgcagtggcgcaatctcggctcactgcaagctccgcctcccgggttcacgccattctcctgcctcagcctcccgagtagctgactacaggcgcccgccagcacgcctggctaatttttttgtattttttagtagagacagtgtttcaccgtgttagccaggatggtttcgctctcctgacctcatgatccgcccgcctcggcctcccaaagtgttgggattacaggcgtgagccaccgcgcccggcgaggtggggtctattttcttacccagtgactgggctacaccagcaaatgctttgattgtagcagaatgactttatgggacttctgagtccgggccgcaaaaggctttgcagtgtgttttctcaccctcttagaaccccgagtctaccacgtgaagaagccagggccagactgttggaagacgagtggccacatggaaagagaggcccaactgacagccagtatcaacccccacacctatgaatgaggctgtcgtacaccatcaagtctccagtaaatctgccaggtgcctgcagccctataagtgaccccaggagagacctgaggaaggatgagcaaataaaatagttgctttaagctgctaggttttgggagggcttgttacacagcaatggttaatcaatagagcatcacccaggagcttgttagaaatacaatcttaggccccaccctagacctatggagtcacaatctatagtttaacaagatttccaggtgattgtatgcatattaaattaagcttggacagtgttatatagtcatctgaagccttatacatttagaaaactaaacaacccatagaaaaatggataaagagtatggacagcttacaaaagaagaaatgcaaatttaaaaaacggaaacctcaccagtaatcaatggaatgcacataaaacaacgagtcagtatgttttacctcaccagttggcacagatttcttttttctaaaaattcaaatctgacaaattcgtataatctttctggaaagaaatttggttgtaataatcccatccctttggcccaataattctgcttctaggaatctgtcctcaggaaatggccagaatttcagccgagcttaatgtgaaaggatgttcatcatggtataatttataaaagtaaaaaaaaaataaaatgcaattgtgccaaatgtccaattataagaaattggtttagtaaattttggcatatgtacaaactgaaatattttgcagccatatggtaatttttttaaactctgccaagaggcaggagagtctagcggacaagcactcaagttttggagccaggcagatgggagtttgagtcctggctcaccacttatggccaaaaccttcattcagcaagttacatagcacctggatatcatttcctcatctgtaaaatgacaataaaaactccttaaagataaaatgagataatgtatgtaaaagatttcatccggactggaccaaaaagtgcattcaagagggaggctcttaatatgcttgaatgaaaaatgccaaggggaaaagagggattcaaaactctagcccaatgccaattttataaaagaaaaagtatgaatatatgcattttttaagaactggaaggaaatacaccagattgttaaagatgcttatgtctggatgtttttatttctttctctagttttcaaatattctacaatgagtgtgaatcccttttttataatcagggaaagttttcactttttagaaaccaagtttaaaaacgaggaacagaggttaagtcccttgcccaaggtcacacagctggtaagttgcagattgaattcaaacaatctaaccactatcccaagctgcctcctagactacctggtacctcccatgaccccatcccttgtgcccactccccacctggccctacataccgagrtgtgtgttggtcacaaagtttcccattcccgacaggtcaggagccccctcctctctgctaacagggccatcattccacatgaggtcaaagcccccgactcgcttctcccttcccgtgagcctggacaggaaggaggcccacagggttaatgaaggtgcacctggcagagccctaagacccaagtgaggtccctgatctctccctgagcccaactgatgtccgtccctcagaagtcctttttcccaaccattcattggctgtttcccaggtgcctatgtaggtctctgaggggttgttcccatttttcccccaaggctcctcctacttgctcttggtaacatgcccctatttgttttttttgtttgtttgtttttgttcttgttttgagacagagtctctctctgtcacccaggctggagtgcaatggcacaatcttggctcactgcaacttctgcctcctggttcaagtgattctcctcactcagcctcttgagtagctgggactacaggcgcacaccaccacacccagctaatttttgtatttttagtacatatggggtttcaccatgttggccaggatggtctcaaacgcctgacctcaagtgatctgcccgcctcggcctcccaaagtgctgggattacaggcgtgagccaccacccccggccgctatttgtgatttctggtttaaagtctgctttcctcctcagaccttaaactccataaaggcagggactagttctgttgtgttccttactgtgtccgcagggtatggcacagggcctggtacagagcagggctcaaatgtttgttgaatgaataggtgatggtaggaatagtggatacctgaggtttctgcctgctcagcatccatttcaccttctttcagtccaagagtaccttgggttttcctctgagaaccactcctccctccctccctcaccccatggctcacatggggttgaccccactccctaggaggtgggcacaagaactatacctggtcaagcagagtcacagtgagtggtttaggaatgggaatgtgtcccagttaccagcaaggagaatcagccctcaaacttctgctggaataatcggggaaaagctaatacagaggaaagagaagggagggagggagagggagagggagggagggagagggagagggagagggagggagggagagggagagggagggagaaagggagagagagagaaacagagagagagaaagagagagagagaatagaccagccaacattgagcacctggattcacccattcctaaaagtagctctgggtttttttttttttctgctattgcacattgttaaaacaatagctttgtattgagcacttactgttagctaagcactagatagtaaattatctttgtaaattaacaactctgagaggcagacatggcatttcctattttacagatgaggaagctgaggctcagaaaggtgatgtgactagtccagagccccacagtcaggaggtttcgaggaaatcctgctggactgtctcagaaagctgtagttggccctgctctgccctggagaggtcaagtccttgggtcaggaccccaccctctgtggacatctcagcttctccatctataaagtggtggggcaggccagagccatcgctgagggccactcaggccccaaggttctaagctccccctcttccttggtgggagcctcagttgtcatgtacaaggacatgtgatcaaggctgccctccctcacctcgcttccatgtccacaacatgcagggtgtcttccaggaggcaggtcttgagctcatagtcttcctggctgctggctgtcagtgatggggacgcattgacctccaggagccacctgggaagggaggggagtagagagtcttagggttactcggtccctggagcccctaggatttcactgagaggctagatggatgcatggaccccaccgtcaattcaatccaggctactctctctacctttctatttttttttaattatttttatagagatagggtcttgctaggttgcccaggctagtctcaaactcctggcctcaagtcatcctcctgccttagcctcccgaagtgctgggattacagatgggagccactgtgcccaggcccctcccacttttttttttttttttttggagagggagttttgctcttgtcgcccaggctggagtgcaatggcatgatctcagctcactgcaacctctgcctcccaggttcaagygattctcctgcctcagcctcccgaatagctgggattacaggtgcctgccaccacgcccagccaatttctttgtatttttagtagagatggggtttcaccatgttggtcgagctggtctcaaactcctgacctcaggtgatccacccgcctcagcctcccaaagtgctgggattacaggcatgagccacctttccactttgaagaaaggtaactcaaatgtagaaagctggcataggaatgattatggtgctttcgtggtgttattgttttcccttcttccaatagagatgtgaatgcaagaaaaacttccctttcttagtgaaaatttgcacactgtaggtggcacccaacctgctgtgtcagggggtgggaagcggtggggaggggtggagactgtggtgagctggagagggcattccaagtctaaaggggtggctgtggccagccccaggagagtgccgccctgtgggaatgtgagtccagaattgcgagatcatctgatttttccagaaaagccaaaaatagactttttttttttttaaagagtcagaatccrgttctgtcactcaggctagagagcagtggtgcaatcttagctccctgcagccttgaacccctggcctcaagtcatcctcctgcctcagcctcctgagtagttggtattattattataggtgtttgagtcactgtacttggtaattctgatttttatgtaaacatcttccaaattttagagcctgtcaataaattgaaattaaaaacaaaaacagtctaaaggccaaattcgaagtatctgcaggccaaaagcagcccaaagacctcccgctagccacctcttgtcttgttcaaccccatccttttacagacagaaagctggggcccagagagggaagggctcacccagcaggtctgtgggagaccaagcccctttccactacacagcaaattatcttggtaaattactctaacaacttggagaggtagacatggtgtttcccattttacaaatgaggaaacaggctcagagaggtgacgtagccatctgtggtcctgtgcagccagtcctcttggacctgcagaatttttgcccatacggaggggcacagccggagtcatcctaatcacaacactcagggctggacccctcttgtccaggcctaagggcagcactgagggcaattgtttaggggtctcagcaggccaggtggcgattaactgaggtccctcccctaacctgactacccaggccccagggctgcaagtggatgctccagtgcttcctgcagtagctggtgtccaagcatgggccagagcttattcctccaccacgtccaccttaatgccagcagtcacatcctgctgcaggggacaaaggagagagacctgctggtgccaggaccctgtttccgttgagcaagggcctgacttaggtcttgctctagggctcctcctcctggcttagaaagcccctcaacacttacatggtgaccctgaatagggggttggctcctggagctggcagtgctggtggggagcagctcagcccaggtccttggaccctgggcctggctttgcccttgacttgctacatgacctcaagctccctgaccctcactgggcttctgtgtcctgttgcatcatgtgaggccatcgtggtggtccctgccaggtcaggcttgttctattcgtcagctcaacctcctccacgggcatcttgggagtggatcaaagtcttggcagagatcgacattgtaacaatattccattatatggctctttgcatcttcaaagctccaagacttacagaggggaagtttcttgcttggtataggggagaattcctgactcagcagatgatcaggaagggcctcccagtgccaggctcggtcctcagtgctccaaagactatatctcacttattcctcataacgatcctctaatgacctatggatagatcctgtcatgaccaaccccatttacaaatgggcaaattgaggcacagtaaatgtaagtgtgcacaaggttatacaactaggaattggcagagctgggattcaaacctgggcagtctgggtgccgagtatgcaaactatgacctsctggstctcccacccacccacttacggcttgaggtcctggtcgatgaggatgtcatagccgtacagctcgaagcagtgcttgtcactgatgatcaccttctgcacactctgcaggcttttgacaaagatgttgtcgatgtccctgaagagtgtctccactgcctcgggcccgtgtttggacgccaggtactgccggaagcgctgcagcgtccacttgcagccctgggccccgggcagccgggtcgagagaggagcctcagttagtcaggacctggcctgctaggacccttacacaattgctctcagtgtttcccttagacctgggcaagaggggcccagccctgagccctgtaattaggatgaccccaggtgtgcccctctttgaggggcaaaaattcttcatgtctaagaggactggctatgcaggaccccagaagtccctgcccacatggcctgcgtaggccccttttctgagcctgacttgctaaggacagaccacactgaccatgtgtgcatcccaaggccaaggagtgaccgacaggctgccattttcagggctgtgtatgcacaagggccccactgtgggatggagctggggagggaagagaagggaacaggtgtgagctggggacctgctctcctgtgtccccttgatctggcccttgactctgagaagtctgagaattctgtatttgaacctggccttgcaggttattttacatagacagagagataaaatatatctgtatgatacattacattaatcgattaatccgttgaccaatagaagatatctgtcaaggtaggaggataggacatattttgtttaggtgtgtgttagtgtgatttgcaacttttaaatactgagacacatgatatgtgggcctccatttgtagtcctgccctgagccctgcaagtgggatgggtaggcctgcctcactggtgaacacaggctcagacaggcctgtcctgggctccttgccactccaccctccccaccccgacctggcgccagagggctgtacccgtgcatagccgagcccggcttcctcaccttctttgggtggtagtcgggagatgttttttgcacagccacgttggtgaggtgaacatctgggagagggtggtggtcaagggtcagcgtgaacaaaaagggtgagctctgccccacgaagtccccaggactgaactgagaattgatggggaaggctacgaaatagctccacggtcgtgtgtgtgagctttggagtcagatgggcctggattcaaatcctgcctgcatctttcctggctgtgggctcctgaaaagccatttcacttccctgggcctatttccccaccttttaatgggggtacatagcagtatattgacctcacaggatttttcaaaaggttaaatactgtgcctcttccagtgcctggcatagctattatactacggtttttcttttcttttcttttaacctttgtggtatattatgattttttttttttaattcaagaggagtggttctaacaagtaaaggaaccaaatacagaacaaccatctcaggacacagtaggctgtctgtcattagaggggtccaggctgggcggccactttgtaggaatattggcaaagggatccagcactgggatagggtcagggtggccttggaaggcccagccctgagatttggcctctcagtaccatcaccatcgtcaccaccagtgacatcagcagcactttgcagctcacagagcatgtttacacacattatctcatttgttccccaaattattcccatctcacagatgagaccatggaggctcagagaagttaagtgaccaccattcagaatactccttcctcaacatcttcaccccacaactaagcaggatggcttccccaaaccttgttgtatttgtttgtttgtttgttttgagacgtagtcttttgcccagactggagtgcagtggcgcaatcttagctcactgcaacctccgcctcccgagctcaagcgattctcttccctcagcctcctaagtagcggggattacaggtgcccaccaccaagccagctgatttttgtatttttagtagagatggggtttcaccatgttggccaggccaatctcaaactcctgacctcaagtaatccacccgcctcggcctccagagtgctgggatcacaggtgtgagccaccacacccagtaccaaacctcatgaaatgaccataagacctgactttctccaggacttacttggggcatttctcagatggggaggtagaggttctaggtctctgactccaagtctaattcccctaaatgtatggttctgccagtctgtggtgtattgaacagagtagggtggtttcagcctctctggaaaaggtatcctctttactctttagcatctttttcctagacgtcttctttagaccttttttttttttttgagacagggtcttgctctgtcacccaggctggagtgcagtggtgccatctcatctcactgcaacctccgcctcctgggttcaaacgattctcctgcctaagcctcccaagtaggtgggactacaggcaagcaccatcatgcccrgctagtttttgtatttttagtagaaacagggtctcaccatgttggccaggctggtctggaactcctgacctcaggcgatccacctgcctcagcctcccaaagtactgggattacaggcataagccaccatgcctggcccaaatttattttttgcagagacagggtttcaacatgttgcccaggctggtctcaaacttctgacctcaagcaatccacctgccttggcctgccaaagtgctgggattacaggcataagccactgcacccagcccaaaaattaattttgaatggaccacagacctaaatataagaggcaaaactatgaaattcatagagaaaaatagaggaataagtcactgtgaccttgagtaggcagatcttcttagatatgacaccaaaagcacagatggcaaaagaaaaagtagataaattcaactttatcagaattaaaaacttctgtgcttcaacggaaattatcaaaaagtgaaagaaaacccacagaatgagaaaaaatatttgtaaataatgtatctaataagggactagtatccagaatacatacaggattcttataactcaacaataaaaagttaatccaatttaagaatgggcaaaggatttgaagagatttataagtggccacaagcacataaaaggtgctcagtataattagtcatcagggaaatgccaatcaaaaccactgcacatccactaggatggctataatgaaaaagacagataatagcaagtattggccaggcatggtggccgcgcctgtaatcctagcactttgggaggtcaaggcaggcaggtcacttgagtccaggagttcaagacctgcctgggcaacagggtgaaaccctgtatgtacacgaaatacaaaaattagccaggcgtggaagcgagcatctatagtcccagctacttgaggggctgaggtgggaggatcatttgagcccgggaagtcgaggctgtaatcccagcactttggaagggcaaggcaggaggatcgcttgagcccaggagtttgagaccagcctgggcaacatagtgagaccagtctctataaaaaatttaaaaattagctgggcatggtggtgcgtgcctgtggtcccagctacaagggaggctgaggtaggaggatcgcttcagcccaggagatggaggctgtagtgaaccgtgattgtgccactgcactccagcctgggcaacagagcaagactctgtcttgaaaaaaaaaaaaaaaaaaggaaaagaggatgctggggcaaagtaagttactggctgaagaggggaaatagctctcttcagatgaaggaagtacgactcccagaacttcacacttcacacactgctcccgcctgctgtggaggagacagcgggcctccttaggagcagaggagaagcagaggctgaaagaaaggggtgagagatgggtcagccaacctcagagcctcccgtctctagagaggaacctaaaaccaggtctcagtggaccaatggtcaagtagcagagtaaacatacaatcaaaataaatccacagagaaacagaactgattcactgcaaaatatttaggagaaaaagacttttcttagtttagaaatgatggtaaaaatcacagaggaaaccaatggacaagtaaaccaatggacaagcatgtgaaaataaaaatgaacagatgtcaatgcaaaaattaaagaatcagtgaccacagaaaagatgtgtagcaaatgcaatagtctgtttctgtcacatgaaaatcccacatgaattaacaataaaatgtatgactgtttatttactaagtaaaggatatggacagacataaaagagaaaataaagctggtaggaccccatctgggaaaaagctcaaagttcctagtaatagaagatatataatttcaaaggcacgcaaatgggggaaaatgaaaattggaagaaatgctaattctaaggcaaaattctgctccctcatcaagtcagttgcatttaaaaaatcttttcattttgaaaacttcaaaactcacagaatatttgcaagaatcatataatgaatgcccctatctgcttcacctagacatgcccagtcgtttcagaaatggctgtttaaaacaattgtccccaggactggggagttgggatgaaatggaccagtcaataggagggtaaaaatattttatttttatttatttatttttaagatagagtcttgctctgttgctcaggctggagtgcagtggcacaatcttggctcactgcaacctccacctcccgggttcaagtgattctcctacctcagcctcccgagtagctgggattacaggcgcctgccaccatgcctggctaatttttgtatttttagtagagatcaggtttcaccatattggtcaggctggtctcaagctcctgacctcaagtgatctgaccgcctcagctcccaaagtgctaggattacaggcgtgagccaccacacccagtgagggtaaaaagataaaaggactcttctgggaagcaatctggccagatgggcttgactcagtatttacatctttgtgacaccatccaaaggaaaaatcttaatactgtaaaaggtttatgaagaaatatgttcctttgcagcattatgtgtcactatagcaagaaattgaatacttcccaaatgcctgcagcatgggggattagaaaaccaggaaacctactcagtggaatattttcattaatgaaaaaaaaaaagtctacaaggaaaatactgctgataatgtttagtgcaagaaaatgttgtatttatacaatgggatcatttatatataaaaggtgaatgacaacaaaattccctacaaatgagcctggaaggaaatacaccaaaatagtaagaagtttctgctagaaaatatgcctagagaaggtttctctttctttttgcactgttctgaatattctgatttgattttcatgagctataccacttttattataaaactatatcctttcaatgttttattattttattattagagtaaggcctatccattgtagaaacaattcataatagacatgtataaagtttaaaataaatgtttccygacctggttctaattctctgcagttttcagagttaatagattagtgaggctgggcacggtggctcacgcctgtaatcccagcaccttggaagatcaaggtgggaggattcaaactgttgaatcaaggtcacactcttgagcctaggagtttgagaccagcctgggcaacatagcgagaactcattgctacaaaaaacaagttagccaggcacagtggcatgtgcctgtggtctcagctgcacaggaggctgaggtgggaggatcacttgagcccaggagttcaaggctgcaaagagctgtgatcccaccactgtactcgatcgggggcaacagagaaggaaactgtcaatcaatcaatcactaagatagactggtgaatcacgaacatccwttcatactttttcttaaacataaacattcttccttaaaggcaaaaatgggaacatgaatataccaggttctccatcttacattttgtttttcacttaatcatctgttttagatatctttctatgtcatgatattttgacctatctcattgctttcaacagatgcacaagatcacatagatgctttatcattcatttcaccatccctcaagggagatttaagggatcaagggtgatgactgtatactattatatacagtgtttcaatgaatatttttgtatttagtgtatgtatagatatactatatgcaaatatatatttgaataattatgtataaactatatatattatatataatgaagtcaggttaaaaatgtttattattttgtgatccaaaattattttaaaagttagtatgtaatatctgatgcgaatgtggtaaaatattaatctgttaaatctggatggtaaatgcatgggttgttatagtccttcctgcagttttctatttatagaaaattattttctattaatatttcaagattaaacatttaaaacaatataaaagaaggggtggaaaatgtgtatttactcactgtgaaaacagcaaagcctcattaactagaaactagccccgggagagggcttgatttgtttaaaaagtccccatgatgcccagagctgtgcaaacatttttaagtgggagaggaggaccactaacatttactgagaggtcactctgggccagccactgttctaactgctttacatgtattatttaactttagttaaaaaaaaaaaaaagtaggtggcaattaaactaaactcgatgacttgcatatgataaatgcttgttagaattacaaaataaaatgaacgtactggaagtgctgacgttggcaaaatagaaaaaaacaaattgcaaaaaatactcagaaaggtctaatcgcagtttcacatgcaggcaatgcacatgcatcaccttggacacgcactcaactgaatggggaaattaatgcagagagatgcaaatgggctaaaagcattggctgggttgtccacacccgaagctggggagcgtcacccccatttccatctttcccatgtgcaagtcatctggtcccgcccatttgcctccaaaatattgctggattgtctacctcttttcttctgaggctcaggcctaaagatctttaaaacttcttttgatgtgtctattttgaccagataatacattcacatggctcaaaagttaaaatgcacaaaatgtgtgtaaggaaacatctcctttctacctctgtatccactaacatttctcttcccaaaggcaacatctatttccagtttcttttttttttttttttttttttttgagacagagtcttattttgtcacccaggctggagtgcaatggcgtgatctcggttcactgcaaactccgcctcccaggttcaagggattctcatgcctcagcctccctagtagctaggattacaggcagatgccacaatgcccaactaattttgtacttttagtggaaatgggatttcaccatgttggtcaggctggtctccaactcttggcctcaggtgatccacctgccttggcctcccaaagtgctgggattacaggtgtgagccgctgcacccagcttcttgtctgttcttccagagttgtctatgtacagataagcaaacatatatatatagacagagagagagagattttttttttttttgacatacagtcttgctctgtcacctggactggcatacaggggcaaaatcacagctcactgcagcctggaactcctgggctcaagtgatcctcccacctcacttgagtgggtagctgggagtacaggcatgtgacaccacatctggctaatttatttttatttttatttttttcatagagrcaggatctcactatgttgcccaggctggtcttgaactcctggcctcaagtgatccttctgcctcagcctccaaagtgctggaattacaggtgtgagccaccacatctgaccagatataatttttaacatgaacgagaacatactttcaaacactgttctagacatgctttgttttttcccaattaacaatatatcttggaaattgtttcatatcagtacataaagcactttccccattcctttttaacagcttcatagtattccactgtataaaggagccattcatttcaatgttccctatttttttctctcacaaacaaggctgtgcagtgaatgaccttgaagcctgtcttgtcttataccgcagatgtacttgtaagatgataaaatcccagaagaggaattgctgggtcacagggcatgtgtgcatttgtcttttaacagatctttgctagattgtcttcaaaggagtcataccaatcaatttacaatcccgccagcaacgtatgtattctcccagcctcgccaggacactgtgttatcaaatttttggtctctgccaatcggatgggtgaamatagcattgtacttgaatgaatgagtgagccaatgactaggcactgaagaaagaggcacataaaaggatgcaaatgttctccaaaggggctaaaactgtccgaccctaggaatataagtaaatgtgaatgttaggcatagcaccaaaactatcatcaggcagagcagcttgcagtgagctgctctgagcagagttggcctctcccatggaatcacccccacaaaactggaagctcccggagggaagggaccagacctatctcataccctgtctcctgtgcccagaccacagcaggcattcagcaaacacctgtgggacaaaggagttcacttgggactggccagagtgtgggaaggggtaggtgtgtcgggggtggttagccaggatcccaggatacactggtcatcaatgctgttcagtgtgaarcgggtgttggagaatcgggcaaagccatcccgrtagagccaggcccgcagcgggatgtactaaggcagaggtgggaagagagagagagaagggaaagggaatatatacaggcactctcacaccgcctagctcttgcacctaccgtttcctccacccggagtgcccttatgtctttcccaaatcatccttcaggcacctgcttttacaccaggcttctttgattctatcccctcctttccccaggtggagggggatacagaaggaaataaaatgaaggtgaagtccaggagaacaggggtggagtctgtcttggacacccctgtatcctgtgcccagcaaaaagatttgaacattggctggatgaaggaatgcatgaatgggtggagggaatatagccactccctggttaaaagagtaggctctgaggccaggctgcctggatttgaatgccagctctgctgctcaccaactgtgtgaccttgggcaaggtacacaacctctgtatctgttccctcattgtaaagggagaataataatagaacctgcctccctgggttattaggaggcctgaatgagataaaacctgctaagtgccagggcctggtacttagtaggtgctcaataaatgtctgctgtggatgaccgaatgaataaagaagggcagagagagggcaaatctagactttggggcatctaagatggtaaacctcagataagtctccctgcccccaccctatccctagatgtccctcggggatctcccagggagagataaaaccagacaagctcacacaaggtacccccaggcctcttccccccatctccctagcccagccaccctttaacccctgctggaggagggcccccacctttgttactcaccgacatcaccagcacatagacacgcaggtcaaacttgcggcctgtcaggcaaggaaaaaattaatttgtgcaacaaatattgatcgtcagacattgtgctaggttttgggaaaatagcagtggacagacaggaaaccccgccttcatgaagctcctgctgaaactacacaaggggctaggcgcggtgcctcatgcctgtgatcccaacactttgggaggctgaggcaggaggatcgcttgaggccaggaatccaagaccagcctgagcaacatagtgagactctgtgtctacaaaaaaattagcctcgcatggtggtgcacatctgtagtctcagctactctggagattgaggcaggaggatcgcttgagcccaggagatggaggctgcatgagctatgatcgtgaccctgcactccagcctgagtgacagagcaagacatggtctcaaaaaaacacaacaaaaaaaacgcacaaggtataaagagagaataatgggaggtgggggaggggtgcgtgggggtcaacttgggggaaagtcttgaaactcagtggtcaaagacccccatggggagtggtgaccttcatggagacaaggtgcctgcccagcccagagtggtgcaggatcttgggcagaaggaactgcgagaacagtctggagggggaaagagcttgggccaagggcagagtggaaggagatgaggtcagttaggctggcagaggtcaggtcccatgcagttttggggttttgtctcacaatccatgggaagccatggaagggtgtctcctctctggctgccacgytggggtggagtgaagtgggcagagcagcggcaggcaccagtgagggggcgggcgtggttgtctaggaggaagaggatggtggccaggcccggggtggaggtgagaggaatggccagattccagagcttgtgggagcttggtgagaaccagatgtggaaggggaagggggacacacccagaatggctcctggcttctagctgtgtcccctagagaagctgaggcatggtggggggatgggagggcagaatttgggatgtgttgggtttgagtggttggcagatgcccaagacggatgtcacaggctgctggacataaggatctggggttcaggggcaaggtctcggctggggacagaaagctgggagtcactggcctttgggtggtgtttaagccacagacaggatggggtcactgtgggggagagaggagaagaggcccaggggctgccccctggggaaggtaattgccagaggacgtgggaggagacaactggcattaacgctattgcaatgatgtcaggcatgcctgatgtgcctgcagttcccagagcccgagtgagaaaagcagatgttggcccgcctggggaaacccaccaagcttgcggggaggaggctgggttccacctcagggccttttgcccttgtgattcctcctccctgcatttctctccctccaaatctacccacagtgactcccagttgtcactcaggtctcagctcacatgtccacctcctggcccccatgtcactctctgtcccattgccctgcttgactgacttcatagcacccagcactgcatgggaccgtcctgtggtttgtattctggtttattgcagcctgctcatcacaggtgtaagctccaggagagcagggtgaggggcagccagtattcagggcagtgctgccaccaagtaggtgctttataatatttgttggataaacgcatgaataagttggtttttaaaggaggagaatttttytgaaccaagaagggagtggaatggacatgccgggcagagggaactgtacaggcaatggctaggaggtgggagactgcagaacccatctctttccatgcatcccttcatgcctggtgtcaggctgggcccttggcaggctgctggtcaaagcttgttgactgactgtttgatgaccatgcaatggaagagcaggagcagacacagccatctcacctcctatcaggtaaggattttcaatgtaacgctgagccacatagttctccacgggaatatcatctttctggtcgtcagagcttcttgtgtcctagttgtaataataataataattgaacatttatttatggaacatttcctgtgtactaggtattctgttagacactactttgggtagctcactgaatctttaaatcaaccctgtcaggtamgtactaatgttatttccatttcacagattagaaactgaagcacagagagggagagtaacttgyccaaggtcacacagccagttagtggtgttgctgggatgtgaacctacatggtctaggcccagagcctgagtgtttaaactctagactggtgctgcccagtagggcagtcactggccgcaagacgccatttacatttaccttgatgaaaagtaaatgaaattacatgctacaacatggatgaaattcgaagacataaggctaagtgaaataagccagatacaaaaggacaaatattgtctgattccacttagatgagtccctggagtagtcaagttcatagagatagaaggtagatgggggttgccaggggctggggagaggagggaacggggagcttgtgtttaacagttacagagtttcagtttgggaagatgaaacgttctggagacggatggtggtggtggtggttgcacaacaatgtgaatgcacttagtgtgataaagccacacacttaaaagaagttacaatggtaaatttcatgttacagattttaccacaatttttttttttttttgagaatgagtcttgctctgttgtccaggctggagtgcagtggcatcatcttggctcactgcaacctccacctctcgggttcaagcaactcttgtgcctcagcctcctaagtagctgggattacaggtgacagccaccatggttaatttttgtatttttagtagagatggggtttcaccatgttggccaggctggtctcgaactcctgacctcaaatgatctgcccacctcagcctcccaaagtgctgggattacaggtgtgagccaccacgcccgacccacaatttttttttattatactttaagttctagggtacatgtgcacaacgtgcagttttgttacatatgtatacatgtgccatgttggtgtgctgcacccattaactcgtcatttacattaggtgtatctcctaatgctatccctcccccctccttccaccccaaaataagccccggtgtgtgatgttccccttcctgtgtccaagtgttctcattgttcaattcccacctatgagtgagaacatgcggtatttggttttctgtccttgcaatagtttgctgagaatgacggtttccagcttcatccatgtccctacaaaagacatgaactcatccttttttatggcagcatagtatttcatggtgtatatgtgccacattttcttaatccagtctattattgttggacatttgtcttggttccaagtctttgctattgtgaatagtgccacaataaacatacgtgtgcatgtgtctttatagcagtatgatttataatcctttgggtatatacccagtaatgggatggctgggtcaaatggtatttctagttctagatccctgaggaatcaccacactgtcttccacactggttgaactagtttacagtcccaccaacagtgtaaaagtgttcctatttctccacatcctctccagcacctgttgtttcctgactttttaatgatcgccattctaactggtgtgagatggtatctcattgtggttttgatttgcatttctctgatggccactgatgatgagcattttttcatgtgtctgttgccggcccacaatttttaagaaggatatgaaattataaatccagtcctcagtcacaccagccatgtggcaagtgctcaacatcctgcatgtggctagtggtcaccgcattggagagcacagatatccattttcatccctctagaaagttctgttggacagtgctgcctacaccacccatgggcccccgaggacattgctccttcttctctacctgccagcccagctctggaagacagcaatgctctcatgcatctgcacagcacctcgcaggttgcaaacacctctcccacctattgtccccttcactcaaagacaagggtcacacacttgatggggtgacacaacagccccaataatggcaggcagcactagctctcagggtagacctgcttcacccaccattgttccccactcagctgtgtcaagacagaagcagccaggtcttcccttcctgggacctgggcccagccctacctccactcacgtggctgccagagggactgaccgtgctccaggcaggctgggcctccaggctgctgagctcttkcctgtagtgccctgacagtttcatgggaggagtcaagacattgagcactgctgtgcgcctcctggtacagcaggggctggtcctataggatttcagccatcctgctcctcccacccaccctgcaccatygtcaccgctcaggttcagagggcttcggtcattttcccaagaccacacagctgctgagtgggagaggcaggatttgaaccaggatttctactgtactgtgtcttgggacaagaatggattggggttgggaggtagctgcccccgaggctcagtctaggccctgaggaagagtcagccaaactctccccagccacgtgagcaggaggcccagataaagaacgtgcatcgagcgctgagtgccaggcactgtgctgggtgtgtgggtgtgtgtgagaatgtgtgtgtgtgtgtgtgtgtgcgcgtgtttgcttattagctcactgcatccttagcaggtataattaccatccccatttactggggcactgacaggtgaagtaacttgctcaagggcacacagctattgagtgactgagtggcaagatcaggatttgaacctggacaatctggctctggagaccctgctccaatgggcagacctgtgggcagagtttctctgccagccctctgagctttgattgcaggaaggagtggcccctcctgctggcaaggtcagaggagggttcagggaggaagggggaagaggcaggctcaccttcctccagtccacgatgtccttcagcctacggaagaggaagatgcctttcccttgagaccgggctacctggggtgggatgggggcagaaagccagctcttagctctgcgtggttccttgttggcccccgtggctgggggctctccccagcatatctgtctctttttccttatgaaccccmaactctccccagaggaaggctagctgaaggggctggaacagagaaggtgctaaccctggcagagggagagagggaagggaggggaagggggagactgacttagctcacaaagacatacatttgcatgaataatgcaaaagaacagacaattaaaaagccatttctaacagtcctgggaacatatcatccaaatctttttttggaaatcaatttgccttcctaattagggtttgctccggctaatactgaaatcagcctgcctttactgaaccccagcatggataattcatagcttcacacagtctaggggctgagagaatctttgatctcatatggagtggtcctcaacaaaggcattactccccttctaccattgtagaaggacaacagtcctcctgcctggccttgcacactcacagtgcctagcagctcactacctcccccaccaatgccaaacagcccattttgttacaggatagctttgttaagtagtcatccaaaaggtatatatgaagtgcatactgtatgttgagcattatgcaatggaacgttcacagcctaacctgtgttgagctaagactggccagtctggctttggcttttaggacctcctagaacaaagctgattcctgggtgccagaagagtcctttaggtatttgcagccactgagcagatctcccaagtcatcttacctccagcataactgcaactctcatttccttctgttctcctctgagcatggcccacctggcccacccgaggctctctgtacaagataggggcatgcagggctgccaggtgtggttgtacaggttgtctactgcacaaagagcccctgctctgcctgccatgctgtgcaccatggttcagggttgtgtgkgcccagaagactgggtgccaaaaactctatggagcactggtggtggctcaggggcagccaaatgtgcacagcaattttagaaagcaactaataagtgtgcatcaggagcttccaacagttcacggccttgcaaaagacttgaacaggcattttacgaaagaagattaccagtgtaaacatacaatagcttgggcacagtgactcacatctgtaatcccagcactctggaaggccgaagtaggaggattatttaagctcaggagttcgagacaagtctaggcaacgtagaaagaccttgagatcacatcgctactaaaaatagctttaaaaattagctgggtatgagagtgcacccctgtagtaccagctatctgggaggcagaggtggaaggatgactttagcccaggagatcagggctgcagtgggcagggattgcaccactgcacagcctgggcaacagtgtgagactctgtctgttaaaaaaaaaagaaagaaagaaaagaacgggcactcaacttcatcagagggttcaccaacagagaagtgctaattgacagaacaagagcaccgtcatctcgtcatctcggacaaacactgccactttaagttccagttccctttctggcctcatgcatttcaaggaaatcacttctcttctaactacaagcagacagaaagagcagacagtaaaacacagataagacagctcgggcacagagggaggtggggggaaagtctcttgggtaactgccaaacttcgccctcatacaatgggccccagtaaaacagtagatcttaataagcacattcctttcccttcaggtgcactaagataggaaagctaaaagcaacccgggggatatgcctgcagctgcagaaagatgtatgggaacagacacacaactctccctcccagataagcacaataaagagacacagaagcagtccaagcctctaataaactctcccgccctgaatccttaaaaactcttagtctgtaagagagtgtggctctgacctaactcagccagaaggttcctctcaggtttgttttctctaaaataaacctgtcttgacgggcgagccacctttcgtgtttctctcctctttctttaattcttacactaatgaaaatcacaatatgatactactatatactacctgagaatagttaaattaaagacagacaataccaagtattggtgaggatgtggagaaactggaacttgcacacactgctggtgtgagagtacgttgtttggaaactggcagcatctgctaaagctgaacataggcatcctctatcctatgtcccagcaattcctctcttagggacctacatgacagaaatgtctgcacatgtcaccatggacatggccccagacacccacagcagcactatcataatagctccaccctgagactccccaatggatgaatatttaatcaatggaatagtatacaacgatgacagttaataatgtacaattacccacatcagcagaatgaactgcaaaacatgtcaagggagagacaccagacacaaggtagtcatcctataagattccaattatataaagtccaaaagcagacaaagcaaacctacgatgtttagtgccttggggggttgtgagtgagtggaaaggggcctgagagggctgctgagggtagggaacgctctgtttatgacctgggtgctgattatttgagtggattcactttgtgaaaattcatactgtgcccctataatttggctacttttctatattttattaaacttcaattaaacggtatcttttcaggttcatatgctttggtctaggaacccctatccccaaccctgttggctgccttccctatggccactttccttcctcttcttccttgctagcaaagcccacctctcatgagggaggctagaaagaccagatgtaggttttcccagcttcccttgcagttggtggaaaccacatgaccagttttggccaatcagacctaaggagacatttgctcagagattccaggaaagatgtttctccttgttaaaaatattagggaaggagctggggagaaaggggatcgggaagaaatatcccgggctccttccttctttctttgaatgctacagtctgcggagatgaygcctgtgactgcagcagccatgtcacatccatgaggtgacaagtctgatgacaaaaagccagcacacaggatgcagagtcgatggagagaaggagcctgggcctctagtggcatcatctagcacatccccaaacctggatatgcctaccctcagccttcttgttctgtgagataacaaaatgcctttattgttcaggccattgttagtaacttgacatgactgttccaggaggtgccttcctaagggactaaccctaaagaatgaaagatgaaccgcctgcatggtgttacatcggggctgatgagatggaaatcacctaatacctagttccagcagatggcagtttccaaaaacaaccacgacaatatttcctgtcccatatgttctccagaaccctgtcaaaaggtaaatcaatgtcccctcccttgaatctggaagtgtctctactaattgcctatggcagaagtgatgtgtgaattccaatgccaggtcataaaaggcaatatagcttctgcctggctctctctttcaggatggttgccctcagaacccagcagccatcccgtgaggaagcccaggtcacagggagaggcccacctggaaggcaactgagtcttccagccctcaactctggctgaattcccagccaacagctggcacctacttgctagcccagccagtgagccagctaggaaggggatcctccagccctcagtggatgctggagcagccttccttgtcaagcactgtccaagctgggggctcacatgaactaaataaggcattattgttgtttcaagtcactatgtttgggagtggtttgctactctgaaatagataaccggaatacgagctttagtagaatggttcataacaatggcaataccagcagccaatacttaccaggtgtttactctgtgccagacaccgtgatttatacacgttacctcattaaagcttgaaaaaaaacacacaccctttgacataaacattaatgttatccccattttgcagccaagagaaccagcgaacagacaggccaaacacattgcccaaggtcacccagccaacaggtgacaaatctgagatagttaaatctgtgctacacaaacctggggctcatatacctcttgaaaagtgccggggatacacaaaatcacaggataaacactgctagttctgggggcagctctattacttgatggtttgggagggatatatttttatattatgcttttttctttgagacagggtcttgctctgtcacccaggctggagtacagtggcaggatctcggcttactgcaagctcagcctcctggattcatgccattctcctgcctcagcctcccaagtagctgagactacaggtgcctgccaccacgctctgccaattttttgttatttttagtacagacagggtttcaccatgtcagccaggatggtctcgatctcctgacctcgtgatccgcccgcctcagcctcccaaagtgctgggattacaggcgtgagccaccgcgcccggccgattttcacattcctttctattaggaatgcaacaaatcataggagtgttagccatgcccgtgactttgccatctaaagagatcacagtgatttcgacatcacattacaattgttgcagatatctcaaaatattgtttatgctcctcctgactttgaaattgtggtagctgtgaggcctgctgttagatcctctttaattgttaatgaaaagcgcacatatttctatagcacaaataattttgtaatcgcttgtgtggtggccatgacaatgcaccttgcaggcctccaacagagtaactgactgagagtgccagcggcttccagttgaggtctagcwgtgtttgccagggcgtcttgctagggctgctcccagtcagtgactaagccccaggggatatgaagaccggccattcctgagagacaggggactcctgacagccaactttggctgaggcctcccaggggccttgatgaactttcaaaggctgctcagcaatagaaacttccaaccttcctccctccctccctctcttctttcttcgcttccttggaggcctgattctctcccagcctcacctgctagctccctccccattttttctcaccagccaaactgtttaattttgtcttggcatccgtttcttggggaacccagattaacacagtttgataacgggttttcagtatagttgccttcttttataatggaatgtactgtattttatgtttttaaaaccacaattctttcatgggtacatacttatctccaaactcattaagctgtccacattaaatacgcacagcttgttgtacgccaattatgtttcaatgaagtggttaaaaaaacaccactattctgtgatagggtccacacatttcaccagatgtcaaagaggcccatggcataaaaacagtacagaagtcttgccctcttgtttaagctactgttatttggattttctattatttactgagtaaagcatcccgactcttagaaagtctcagtgaaaaattctgagaagttctggttggggtaaactagtgtgatggaatgttaaaatgtggctcttcctgccttgcagtttggaaataggcccccaaggctgagaacagccccctggttgccaagaacgctcgctgccgtgtgtgaagtgttagaccagcttggtggacgcagggtgagcagatagataggccctgtccctgagcagcttggggggcacacagagagactgacaggccccatccgtgacagccaagcagtcgcctccccgcaccacgaggcgggctggagccacagttgtcccatgacctgtgtcagtgtcctgcccacctccccaccaaccctgacggcctgaactgctggcaggggagaatgcttccatgggaagaaagctaagagcgatgcaatgtttacactggacttttaaatgccagacccaagagcctgttcttatattcccctaaaagctccaagatgggctggggctctggcctggtaggaagagggtccccacagggtggtgtagacggaatgatgctgcctgctcccttctgrgtcctgggctgctctgctgccactgatgaggaagatgaaggctcggcagacaccaggaaaacaatgcagaggagatgcccgagggctgccctgtgactggctgggccacaccaactatgcgaaaacttttgcctgtgggtgggcaaagatcaaccatgtcacaaagacaggccttgtgggaagagtggagggattcaggggactcttctccctctattctccaaatttagggcaatgttctgtttttaacactctctcctcctgaaaggaatccaaataaggtcccggaactaatactcaaacccagtggttctcagaaactgtggtactcagaccagtagcaccctcagaacctggtgtgatggttaattttacgtgtcaacttgattaggctatggtgcccagttgcttggtcaaatgctagatgtttctctgaaggtactttgtagatgtgattaacatctacaattattaatttttttttagatagggtctcactctgtcaccaggctggagtacagtggaatgatctcggctcactgcagcctcaacctcctaggcccaagtggtcctcccacctcagcccccaaagtagctggcactacaggcactcgccaccacactcagctaatatttttgtattttttgtagagactaagtcttgctatgttgcccaggctggtctcaagctcctgggatcaagcgatcctcccaccttggcctcccgaagtgctgagattacaggcatgagccactcacctggcctgcaatcattaattttaagttatcacccttgatagcatggggaggggcttcatttaatcagttgagggcttaagagtaaaaactgagttttcctgaaaaagaagcaattctgcctcaaaactgtaacatagaaatcctgcctgaagctccatcctgctggcctgccctgcagatttcagacttgccaacccccacaatattgtatgagccaattccttaaacacacagacatacacacacacacacacacacacacacacacacacacacacatacacatacacgcacacacacacactaatgctttcctttctctggagaaccctgactgctatacctgggaacttgctagaaatgcaaattctcaggcccccaccaggctgactgaatcatactctggggtgggtgggatgcttgaacaagctcttcaggagattctgctgcaccctcaagtttgagaaccgctgctccacaatctcgatactcaaagtgtatgcacagaccagcagcactggcatgtcctgggagctggtagaaatgcaggttcccaggccccacccagacctgtgaatcaggctctgcattgcactaggtccctggatgctgcacgggcactgtagcgtttgagaaacactgacctagtgctttcccagggacagagcaaagagacggtgtttcctggactcggaaataacaatgaaaatggtcaattatcaggcacctaatgccaagcccttgatataatttgtaaattcatgtgtcgaacgtgtgtaacttcactgtattctctcacaaccctgtaaggtagacacactcattaattccattttacagatgaagaaatgagcccagagggacttaagggggtcgagtgacctgctcagggacatacagcttgtaagcagtggacacagaattagaacccatgccagaaatgactagaagcacagaagcgcccactctccacccgagacagggtgcctcgcaatttgggaaagaggacacacacacacacacacacacacacrcacasacacacacgcacagacacaccgagccaagatgcctcctctaaattacagctgtagctgccgttgtgtctgctgctaacaaaggctgtgggctgggaatggaatcaatttaatatgcaagtgctgttcccaattagcacaaattaccatttgtctgagaggataatgctgggagctggaatccgccctggtgggtcacagcactccgtgctcatcagcctaatccctactgctccagccacggccttcctcactgcgccttccctggacaccagagatgcaggatgggccaggggaagaacctgggaggcctgggtacaccttggcttcgtgcctgttgggagcatccattgtttttgtcagccccatgtcagtttcccctccaagcacctgtgttattggctaaatctgcatcagccaacaccagacaccagtcttcagctccacaggaaagggctgctccctccaccctcctgctccctccctggcctggaacattctcaggcctggaaaacataagagggctttgatgatgccattcaaggctacggtggcatgtggctttgtggtgagtgacagttgtggcaccagaaagggctgagtgattggtaggtgcgctgttgtcctcacctttcttcagtttctttttcttttttcttttttttttgagacggagtctcactctctcacccaggctggagtgcagtggggcgatctcggcttactgcaacctccacctcccagattcaagcaattctcctgcctccgcctcccaaggagctgggattacaggcacccaccatcatgcccggctaatttttgtatttttagtaaagatgggggtttcaccatgtaggccaggctggtctcgaactcctgacctcaggtgatccacctgcctyggactctcaaagtgctaggattataagcatgagccaccatgctcggccccactcagatttttgagccccaataggctgcctcctgataccaagcctttgcatatgcagttccctcagcctaggatgctcttccctatctctacttttttccaggcagacttgtatgcatccttcaggttgcagctcaatactaattctgattattataacaattctcatttattgagtacttactatgtgctttacctgtgttaactcatttagtcccctaacactaggtgataggtattataacaatcccactttgcagatgggaaaactggagcacagagaaggtgcgtaagctgcctgaggccacacagctagtaagtgtatcagtagtatttgaacaagggggtaggcctcagaatccagtctctcacttcttcagagaagcctgcccagccaggaagagcctcctgtggatccctctcctgacaccattctccttaataacagcacaactgcaactgcataggtctcctttgtttgcttattgtctgcctgcaaaaagggcacagacccaggctgacttgctgagggctgtgtcttcagcacctaggtctgtgcctggcacatggtacatgctcagtaagtatttgtgaaatgcttgaataagcaagcctcaagttcttcattgctaaaatggggctgttgatccctcccccgagggtcactatgaggactggggtaacgcaggtaaagcacttggcatgtcaggaagacaggttccaaattccctgccctggcgtcctaaacatcacttgtgcattcaataaacactcattgagcacctactgtatgctggcagtcatagctgctgggtccacacactgcagagaagaggagctaaagctggcccttcgggaaggcagacagcatctaaggctgaattcccaggcagtgtctgcacctgatccctgctatggcacctgggactcattccctcccacccagcccctggcactgggcactcacaggcttcatgatccaggtgattcctgggtttttgcgaaactcctctacaaacaggtggtactcgcaaggcatctcaaaggttttggggaagaagtcacacttggctgcctccagctttcctgcctcacgctccagctgcttccggaaccgcttcaggttcttcaccatgtagttcttccgggtcagctgggtggcgggaaggacaggcggccattagctcctgctcacagccccgctcccctcccagccccacacatccaccagccaccctgcagcctccatgctctggcccacaaaatagcaacagtaagagtaactttgacccagaaagagcttgctagtcaagaattatccccacttcacagatgaggaaactggggcttagaaagattaagtcaattgctcagagctatccaacgaaggtgctgcactgccccaggatttgaccagggcctgtcttgactccaaaattcatgcttttggccgggcgcagtggctcacgcctgtaatcctagcactttgggaggccaaggtgggcggatcacaaggtcaggagttcgagaccatcctggctaacatgatgaaaccccatctctaacaaaaatacaaaaattagccgggcatggtggtgagcacctgtaatctcagctactcagctacttgggaggctgaggcagaagaatcacttgaacccaggaggcagaggttgcaatgagccgagatcatgccattgcactccagcctgagggacaagagcaagactctgtctcaaaaaaaaaaaaaaaaaaaaaaaaaaatcatgctttcaaccgctaagctacactaacctttaaaaatctcccaccactgcctcctccagtcctgtcccttctagacctccttcccatctttagaccccaaacttctcaacttgcctccaccctgaaatcaccataatcattcatgcatcctctcccttcaraccctgcaccctcaaaccatcttgctcctcaaatcttggtgctgaaactccaaccagcctgtgacctccagtcctcaggccttggatccctataccctgaaaccatttggctctccataggtctagcccgcagacttcccactcggcgttgcatcccacattctaatacacttttctgatccttgtaccagctccagctcatggccacacccagtgacatgagttggttggcacagtccctcccgcctgcccagctcacctcatagtggttccggaagtgactgatccgcacatgttcatccatgtaggtgtggtcgaagttctcccggagccagctgacgtcacaccagtagaaatcccactccccttcgctgggggtggggtgggggcggggataaaggtcatggtctgaggaccttggcactgcagggcccagggaggtgctgccgagggggcttgaggaagggtacacagcactgtgtccctctagagtctcttggaggtggccatgggtgccactggcctacatgtgctttgttagaccagagcaaaagccagggaaatgttcccacaaaaatccaggtggttggcttcccttgagctatcactgagcccagagtgcctcctggcacctattagctgggctgaggagcagccaccccttcagacagggcacgccctcctcaaaccacagtccccatgactctctgtggtgtgacagccactcagcctcacttgttcttgccagttgccacgcgtgcagcccgcagtggaatgagataacctttgcaagcccctcccagttcacaaaactctccactcactaaatcctcagagcagcccccaaaggtgatcttggatcatccccagaactctaaggcaagatggccttgctcactgaggacatggcagcagcaggacccacacccagctctgccggctccaaattctgatcccattctccaccaccatgccagggagaggaaaccgggccaatctaccaaatctgggtgccagagctggggtgcggggaggaggtgtttgaaaaagatgccacaggaaataaaacactatcatgattgttcacaattatttttaagtaaaaaagtacagatacaactgaagccccctgtctatccctgcctgattgtatctccttctgttctgccgcgaaggaaaccatcagcctgagtttggtgtgttatcatttctatgcagtggttttttttttttcttttttcgagacggtgtatcactttgttacccaggctggagtgcaatggcgagatctcagttcactgcaacctcctcctcccgggttcaagcgattttccttcctcagcctcccgagtagctgggattacaggtgcccaccaccgcaactggctaattttttatttttagtagagatggggtttcaccatgttggccaggctggcctcgaactcctgacctcaggtgatccacctacctcggcctcccaaagtgctgggattataggtgtgagccaccgtgcccggcctgcagtggctttatagtttcatcatgtatatatgtgtgtatccatgcatcatggcacatggcgttgtttgtcatgattttaaacctaacgctaatacttattgcttaccatgtaccaggcactgctctaaacacttcacaaatattcattcacggatcctcagtgcaacctgaagtgttaggttctgttattatacccattttacagatgagaaaatggrggcaggcacacagagaaactcacctagttcatgcagttagtaagtggcagagcaggatttgaactcaggcctcaggctccagagtccaagctctgtggttagaacccctcctgtctgtttcttttcacaacatgcttttttcccaccaaacttttgttctggagatcgatccttttgatacataggggtcgagttattctaactgccatttcccattccaytgggtgaacacgccacagtatatccattttcctattaaaaggtgtttggggctgggtgtgctggctcacacctgtaatcccagtattttgggaggccaaggtggatggattgtttgagtttgggagtttgagaccagcctggccaacatggtgaaaccccatttctaccaaaaacacaaaaaattagccaggagtggtggcatgcacctgtagtcccagctactcaggaggctsaggtgggagaatcacttgagcaggggggtggaggttgtggtgagccaagatcatgccactgcactccagcgtgtgtgacagagtgagaccccatctcaaaaaaaagaaaaaaaaggtgtttggtttgtctccctttctccccaccccttttctctaatatagacaagtaggctgagttttaaaagacatctggaggaggtctgaggcagaaatggagaaaaatgaagagacatcaccatcaccttgggatgatgaaggaagaggccctgaacaagaccaatggggaggatgcaggggcagactgtagttccaaaagattcctacactatatcccttatccagaggctgcggggccgtgaggccgcaaggagaacccatgagaaccttcttcggctgtctgccctagtgagatccccacagacagctagcatcgactgccacacgtgtgagtcagatgccctcagacaactcctgccaccaggtgacctccagatctggactcttcccagctgatgcccccaatgtcacagagacaagccagtcccactgtgtcctgtaagagtccctgactcaggagccccgcrcctaatgcaatgctgtcttaagcagctaagttttgggatttgttacacagccatagcaactggaacaatggccaagcagttgggccttgtgttgtaaatggagatccctttggaattttctttccttttttttttttttttttttttgagatgaaatttcactcttgttgcccaggctggagtgcaatggcacgatctcgactcaccgcaacctccgcctctcgggttcaagcgattctcctccttcagcctccagagtagctgagattagaggcgtgcaccaccacgcttagctaattttgtatttttagtagagacagggtttctccatgttggtcagactggtctcaaactcctgacctcaggtgatccgcctgccttggcctcccaaagcgctgggattataggcgtgagccaccgcgcccggcctggaattttcaaagaactaaagatttaaattgcttctccttgtggctgctgggttggtgtttctcctgaatgtcacaccatgtgcagaggggctttaaggcaggcagacagacccagcctttcactgagctcagagatgtccagagatggacatctgtgcacacaccgtgcacagatgtggtgacgtgaagcacgtggtaatggaatgacactggaaccagaaatctacggtttccaaattttgtcctaagttactcatgaaaatctggggcctggtccttctccaaacctcccttgtggctgtgccccaggcacagtggttcggaagaacggtttcaagaactgatggaaacccactggagaagtggccgtgtgctggttgggcacggtggcttatgcgtgtaatcctagcactttgggaggccgaggcgtgtggatcacctgaggtcaggagtttgagaccagcctggccaacatggtgaaaccccgtctctgctaaaaaaaaacacaaaaactagcccagcgtggtggcagtttcctgtaatcccagttacttgggaggctgaggcaggagaatcacttgaacgcagaaggcagaggttgtagtgagccgagattgtgccactgcactccagcctgggcaacggagtgagactccatctcaaaaaaaaagaaatggccatgtgctctataaaccctcagataccatagtgccacagattcccggctggctggctggggcttcatctagatgcccagtcctgccttttctccaccctgatgtttgtaccaagccatgtcacacagtgcaaggagcactagaccaggagtcaacacaggcactggcactacgtgaccttgccctcttctctgggcctcagcttcctattgggaaaatctaggtgtggtaacctctaggcaagatgatagactgcaatgagccaaactgatactaaataattaaatgagggacaggaagagaaaaactttctctacagaagaatgccacctaatacatgtagaaggaatgacagagagtaaccattttgcaattattgtaataataatagatttaggcaagaatccttaaaaaaggccaggcacggtggctcaagccagtaatcccagcacattgggaggtcaaggcaagagaatcacttgagcccaggagttcgagatcagcctggtcaacgtggttaaacytcatctctacaaaaaatacaaaaattagccaggcatggtggcatgggcctgtagtcccaactactcagggggccgaggtggcaggatcacttgagcccagagggtcaaggctgcagtgacccatgattgtaccactgcactccagcctaggcggcagagtgagaccctgtctcaaaaaaaaaaaaaaaaaaaaaaaagaattatcaaaaaatgctagaaccattgtgtgaaagtttgttgggaacaagatatttgcatagtctcagattatctgcccacaagatacttattatttttaaaaaaagttaatttacactggagaaagctggcagacaccaccttaatctaatggtcaatcaaggtactgtcaccagtgataagacacatcagcatcacaaacccccgatgagttccactgaaaagggcacagcatcacttctgtggtattcttgccaaaatgcataacctcatggtgagaaaacatcagacaaatccaattcaagggacattctacaaaatgtactcttcaaaagtgtcaagggcatgaaagacaaataaagaccaaggaactgaaatatatttgaggtaaaaaaggtcaactaaatgcaaagtgggatcctggattggattctggaacagaaaaaggatgttagtggaaaaaaactggtgaaattcaaatgatgtctgcagcttagttaacagtaatatatcaatgttaatgtcctgactttgacaaatgtactgtgattacataagctgctaacagggaaaggtggtaaaactgctaaaagaggaagctatgtatgatttttgaaacttttctgtaggtctaaagttatttcaaaataaaaaagtttaaaaataagtattttaaaatattaaagttggacacctacctcacaccatataaaaaattaaatcgaagatctagatgtaagagctaaaactagaaaactcttagaagaagacataggagtaaatctttgtgaccttggattaggcaatggtttcttagatatgataccaaaagcactagcaacaaaagaaaaaataggtgaattggactttatcaaaatgaaaaagtttttaccgcaaaaggcacagtcaagaaagaggaaagataactcacaaaatggaagaaagtaaagtatttgcaaatcatatataagaatacccttataagataaaattcttataactcgaatataaagagacaactaaatttaaacatgggcaatagatatttcttcaaggaagatttataaattgctaataagcacgtgaaaagatgctaaaaatcattagccatcagggaaatgcaaatcaaaaccacaatgataccacttcatacccactaggatggccataataaatgtgagggtgggtacggtggctcacacctataatctcaacactttgggaggcagaggcaggaggatcactcaagtccagaagttcaagatgagtctaggtaacataatgagaccccatctctccaaaaaaaaaacttaaaacatttagcaaggtatggtggtgtgtgcttgtagtcccagccactcaggaggctgaggtgggtggatcacttgagcgcgggaggtcaaggttgtagttggctgtgattgtaccactgcactccagcctaggtgacagagagagaccctttctctaaataaataaataaataaatggatgaataataacgagagttggtgaggatgtggaaaaatcggcaccctcatacactcctggtgttaatgtaaaatggcatagtcacttcagaaaagtctagcagttccttaaaaagttaaacatagagttatcatatcacccagtcactccactcctatgtatacaccaacaaaaagtgaaaacatatgtccattcaaattcatacatgaatattcacagcagcatcatgtataacagcccaaaggtggaaataacctaaacacctatcaattaatgagcagataaataaatgtggtactcctacacagcagaatattattcagtcataaaagggaatgaagtcccagctactcaggaggctgaggcaggagaagggcatgaaaccgggaggcagagcttgcagtgagccgagatcgagccactggactccagcctgggcgacacagcgagactccatctcaaacaaacaaacaaaaaggaatgaagtactgatacatactgctacatggatgagccttgaaaacattacgttaagtgaaagaagacaggaaaaaggttacatattgtataattccacttacatgatgtgtccagaatagataaatagagacaaggcccaagacagaggctggagggagggagaaatgggaatgactgctagtgggtatggggtttcttcctgagatgatgaaaatgttctggaattagatagtggttttgacacagcaggtatgtgggggaaaaaaaaagtggtgatgattacacaactttgtgaatatgctaaaagacacgaaattctmtatatatacattttttggacttatcaaaattaaaaagattttatatattttttcttccaacatgtatgtgttgaggttatctctgtgtcagagaccatgttggatgccagtgatacaggaggaaacagaataccttgccaggtggtgcgcacagtcttgtggggaagattaacaataaacaaggaaacaacyctataataaagaattgtgaagtgagccgccacgtgatccagtagaggccatgaggcggggtagttgagggacctacgctgggtggagtcaccctgtggaaggacctttcagctgagatctgaaggataaggaggtgcagcctagtcaaaagcaatggggaaggttctagcactgggaagagcagggactggggccctgaggttgggaagagcatgttcaagaacactaagaaaagccagggcggaaggaaagaagtcagagaccaaactgaagagttgggaagggcccaatcaagcagggccttgtagaccaccgtgtggatttcgtattctattctgataccaaaagttcattcatttgcacaccattttcatgattgtcacaatcaagttgctcttaaatcacccaggaagacatcaaattgcctcttaacaaggtcagtggagattcaggttctttccaccttcccagtctccgaccatcataaattacacaatcgagtttcccacattggagaaaatcgcaggggtcagcacatcgggagagcaatacatgagccttgccctgagaaaacctccttccactcatggcatttcccctgccaggtaagtatccattctgccatccttaacgtgtcctcatgctcatcgtgtcggggtcacagtatggttgctatagttccaaggcttcatgtatctttctcagggggaagcaagggaagggacagctctggccacatctgttctaaactgacctgatgggttggcagtctgaactgagacctgattctgtctggaaattccagacccagcttaggtcctaaaggatgaggccttggattcacagagctgtgttgaaggaaaaggccctggcctctgggcccttcctgatttaaggattcttgagacaatctgggaccagccatggagcaccctgcttctgggctcccacactgttagcaccagacaaatcctcagactctcttcccctgcccattgagcagaggcaggagaggggcagggagtggacagaggtcacacagcagatggggacattgctctctctcccctacaccacccccacctgctagtcacctcactctcttctaactctcctcccaactccccccaagcacttttcatgacacccgttctctggatccagggaaggaaaccctgtgcggatattagcatgatcacaagagaaccaagaaggcaaatccacaaaggctgccatcaccacatcctcaacatcactgtcattgttgtaatattccccaaagccctaaagagaagacgctggtgtcttgagttacctgcaccacagccaactcctaatttttcatgggatgatttagtaaagccttcccaagcagtgggaatcacagattcataacatctgctcatttgttgcttcaatccactgagaagccactataagatgaggctgtggctctgcagacagcagactcaatgcaaatcccagcccaaaccctcacaagctgagtgacctcaaacatggcattttcactactttgtgcccagttttctcattagtaaaatggggatgatgataacacctacctgaaagatttgttgggatgattaaaagatcatgcatgcgaaatgttagagtgtccagcagacttagctaatggtaagcagcaaatatttcctgagcaccacgcagcagggcagctacccctcctatcccttttcccctttctctacagtaaaagaattttcagcatttacttgggaaaatgtagcctgtatttccctgaataaaaactacattttccagattcggccaggcacagtggctcacgcctgtaatcccagcacttcaggaggccgaggagggcggatcacgaggtcaggagatcaagaccatcctggctaacacagtgaaatctcgtctctactaaaaatacaaaaaattagctggtcgtggtggcgggcacctgtagtcctactcgggaggctgaggcaggagaatggcgtgaacctgggaggtggagcttgcagtgagccgagattgtgccactgcactccagcctgggcgacagagcaagactccatctcaaaaaaaaaaaacaacattttccagattcccttgtagctgggtttggccacatggttaaggtctggccagtaagctgtgagagactcctgagttgtgtccttcaagggatgggcttgccttttctttctctctctctctttttttttttgagtcagggtctcgctctgtcacccaggctggagtgctatggtgtgatcacagctcactgcagcctcgacctcttcggctcaagcaattttcccatctcagcctcccaagtagctgggactacaggcacacaccaccatgcctggctaactttttaaaaaattttttgtagagacagggtcttgccatgttgcccaggttggtcttgaactcctggactcaagcaatcctcctgccttggcctcccaaagtgctggaattataggtgtgagccactgcacctggcctatgccttttattgcctcctgcctacctcctgctgtttggaatgtgaaagcaagactggagctctaccttggactatgaaaaacaaggacctcacctaagggatagtagaatggaaagacagaagcagatggatcccacatttctgtggggcccccttaccatctctgaacttcctacatatggacttcaatgagacagataaacttctagcatgtcgaagcctcttttactttgggtttccattgcatacatccaaaccttagccataactaatagcacctactctgtgccaggcatcacatgctggtttgtctcaatcagtatccccagaggccagcatgaaagaagaaaggtaggcttacaggccaaagtcacagaactagcaagtggccagggaagagcagtccttgatctggacccgtcactggaggatccaggccacaggtctgtggtagctacattcctagtttctactgaaaaccacaggacacaaacgtgcctgggtttgaatcctgctctgatgcttacaatgctgtgtgaccttaagcaattggtttcctaactctgaacataatcttatcttacggtttagttggaaggcttaaataagacagagatgatagtgataatgtgcctggcacattgtgggtgctaaataaatgtcacagccactttgggacaagtcccagtggccacccaggggaactgggagaaaaacaaaggaagacaaggacctgtgagacaaagggaaggagggacaaggctggggggagggtcttactccttcacttccacccatcctggcctgtggcgaaggacgtccatgagtgtgttcatgagggtggtcttgaaccggatcgatgctctctgctctctgcaagacaaggcaatgaacatttgctcaggatcaatgattttcctaggatggcgcaaggagaggaaaaaaggaggaagagaagtcaagttccatacctggaaagttccacactgtatttcagaatttagcattagagcatgataacacttaacataatcagattgagaattacagaatcttcaaatcattgaaaaataacgatcattgtatccaagcctactatgtgccaggcatggtctggttgctttccatgtgctatgactaatccttacatgaaatgataagtatttgcaaagccctctcctggcaatcatctgggaagatgaagcagatgtactttttcctattcctcctactgatacaactgaaaactcaagatactatctataaaacaaatataagactgaaagagaagaaggcagactggctggagatttcaggaccacgggaactacatggtggtgaattccctgggtttcctttttgtctcatatagttcagatatggagatgaaaagccaccaacccagaaatgccaatgggcatagacgacaaaagcttcgacaaaagcaccccgtcctagccaaaggaccaagaaaggagcggcctagccagacagaggacttgggcaatcactgctctactccagccagacccccaagaacacatctgtggcccactcccagtgatgccaggaaaggccgagtagggagtccagacttcccctgagtttgcagcagggcacccaacacccccgctcggtgctgtcagagaaggccacagacagagccaggctttcatccctgccaggcggtaatgagcctcccacccccactgcagcagtggagaccatgtgtggagcctggacttcctccccagtctggccgtaatgaagtgcccctcccactctggggtgatgttaaagggggcctagaggagagctggaaatcaataaaatcaaaaacagaaaaacattatagcaaatcagtaaaataaaaggcaagttctctggaaagatcaataaaatctacaaacctatttgtcagcaagactgacaaaggaaagactcaactacccaatatgaggactgaaacagaggctaccgctatggagcccgcaggtatcacagccacaataaggaaatgctactaacagctctacacacctacatttgacagcttagatgaaatggaacaattcctcaaaaagcacaattactacaactcatccaatatgaaataggtaatttgaatagctctatagctattaaggaaattgaattcataattcaaaacctcccaaaaaagaaatctccaggctcagtggtttcactggagaatttccccaaatatttgaagaaggattaacaccaatcctacacaatctcttccagaaaatagaagaggagggagaatttcctaattcattttgccaagctagtattaacctgatatcaaaaccaaagacagtacacaagaagtaaaccacagaccaatatcccttatgaatgtagatggaaaaatccttaacaaaatgcaatcaaatagaattcagcaatatataaaaaggactatacaccataaccaagcggagtttattccagtaggcaaggctggttcaatattcaaaaattaatccatgagccaggcatggtgtctcaygcctgtaatcctaaccctttgggaggctgagacaggcagattacttgaggtcaggagttcaagaccagcctggccaacattgtgaaatcccatttctactaaaaatacaaaaattagtcaggcgtggtggtgggcacctgtagtcccagctactcaggaggctgaggcaggagaatcgcttgaattggggaggcagaggttgcagtgagccgagatagcaccactgcactccagtgtgggcgacagagagagactgtctcaaaaaaaaccaaaacaacaacaaaaaaaacaatgtaatcagtcatattaacagactaaaatggagaaatcacatgattatatcaattgatgcagaaaaggcatttgacaaaaattaaacactcattcatttaaaaactctgagaggaacttcatcaacttgataaaagcatcttaaaaaaactcgagctaacattataattagtggtgtgtgaaagttgtcagattcaaaatggaatcacttgtgtcaaaccctggcaaaatagggccagggggccgggctaggtggctcacgcctataatcccagctcttcgggaggctgaggcgggcagatcatttgaggtcaggagctggagaccagcctgaccaacatggtgaaaccgcgtctctactaaaaatacaaaaaaatcaggccgggcgcagtggctcatgcctgtaatcatagcactctgggaggctgaggcaggcagaacacctgagatcaggagttccagaccagcctggacaacatggtgaaaccccatctctactaaaaatacaaacattagccgggcatggtggctggtgcctgtaatcccagctactggggagtctgaggcaggagaatcgcttgaacccgggagatggaagttgcagtgtgccgagactgtgccactgcactccagcctgggcaagagagcgagaccctgtctcwataaataaataaataaataaataaataaataaataaatacatgaataaccttactgttccagaaggcagagggactgaaatgggttggcatggctgcattccttttggaggctctatgggagaatttgtttccttgcctttcccagcttctagccgggcatggtggcatgtgcctgtaatcccagctacccgggaggctgaggcaggagaatcgttggaacctgggaagcagagcctgcagtgagccgagatcacaccactgctctccagcctgggctacagagtgagactccatctcaaaaaataaaaagtaaaaaaataaaaatacagagccaggaaaggtcatgaagggaggagtctcatgcatgatttgccagataataagaactttcacaagaacattttccaaaccacagcttcccacatgagacaagagtactgctaacagcacaagggcagctagcagctaacacaggaacactagcctgacacggtttctcaggcccaatccaaaactgcaagggcctaacaagaactccgagactccaagtcctacctagcaactactgacactcaccaatctgctactgaactcgccagctctcataaaaaacactgctagcgccaatgaactttcttttgaaacaacttacgtaaatctcctctttccccaagagaaccctaaacttttcctttgttctcagacatgctgggggctgccctagtctatgtggacatcctggattgcagttctacttcttgtatattattcccaaataaaacctttttacttggagatttgtctctatttttttatgttgatggatgaaaaactggagttggagaccagactgggcaacatagtgagacactgtctctaaaaataaaaataaattaaacaataatcagcactgcagccccacatagctcaaatactaacaagctcaagacggcagtgaaggaggttggattggagtacacgcaatttaattaaagctgcagcccaacccatgttcaactcagctttaggaggaatctgaatgatcagcccctaaacctgctagtcagaggaaggagctcgcatactctataaagtgtgtgtacgtatgtgtgtgtgtgtgtgtgtgtgtgtatatacatgtatatatatataaagtgtgtgtatgtatgtgtatatatgtatatgtatataaagactaaaaaattatgatatacaattgtttttcatacacaatatccagagtgcagttctaaaaatataacacatgcaatagcaaagcagggaaatgtaatacataatcaagaggaaaaagagccaactgaaataaacccataaatgacccagttatcagaatcattagagaagaaatttaaaaattattataaatatgttataggatttatgggaaaagatggatacaatgtgtgaatagatgagttactgcagaaaagaaccaaatggccaagtggctcatacctgtaatcccaatactttgggaggctgaggtggcaggatcacccaggagttcaagaccagcctgtgcaacacagtgagaccccatttctacacaaagttttaaaattagccaggcatggtggtacgtgcctgtagtcccagctacctggggagctgaggtgggaggatcacttgagcccaggaggttaaagctgcagtgagccatgatcgcaccactgcactccagcctgtgtgacagagcaagaccctgtctcaaaaaaaaaaaaaaaaaaaaaaagaaccaaatggaaattctagaagggaaaactataatatctgaaattgaaagttcaatggatgtgcttaacaagagactaggcattgagaaggaaaaaccgtacatttgaaaacagtctaattgaaattgttcaaattgaattagagaaaaaatttatacatgaacagaacctcagtgactcgtgagataatatcaagcagtctaacatacatataactgaagttcaagaaagagatggggaagagataggacagaaaatattttttgaagaaatgatggctaaaaaattttccaaatttgattaaattatcaactcacagatccaagatgctcaattaaccccaagcaagacagacacaacgtaaactacacccaggtaaaccatagtcaaattgctgaaaaacagaacagtcttaaaaaaaaaaaaaagcctgaggaaaaaagacacatcgcatagaggggtgagggtggtggagagtgggagtggaagacaagaacagctgactttggctaggcgcagtggcttacgcctgtaatcccagaactttgggaggctgaggcaagcggatcacctgaggccaggagttcaagaccagcctaaccaacatggagaaatctggtctctactaaaaatacaaaaattagccaggcgtagtggcgggtacctgtaatcccagctattcaggaggctgaggcagaagaatcccttgaacctgggaggtggaggttgcagtgagccgagattgcaccattgcactccagcctaggtgacagagcaagactctgtctcaaaaaaaaaaaaaaaaagaaaaagaacagctgacttcacatcagaaacaacataagcctgaagacaaaggaatatcatctttcaagtgcttaaagaaaaaaagatcaacctcgaattctatatccagtaaaactttacttaaaatatgacagtgaaataaagacaattttcaaataaataaaagctgagagaatttattgccaacagatccacactataagaaacactaaagaacgttcctcgggctgcaggaaaattataccagatggaaattcagaaggaatgatgagtggggtaaatatggaatactttcttccatgtcttaattaaaaaaaaaattcaagtagctatttaaagcaaatatagtgagaatgtaatgaagggtttataacatatttacaagtaaatatatgacaaaaatagcagcacaaacgatcagaggggagcaaacagaagtgtgttgctgtagggttcttagttgtgcatgaagtggtgtaattatgcttcaaggtagactgtgataaggtaaggatgcatattgtaatcccctagagccataggttgtgaagtgtggtctcaagtattcctcagggtccccaactctttttcaagggtacacaaatcttcccttttccaaatactatctttgtgaggctagattttcttcctgtccttcaaccaaaacaatctatcacagcagattgaacacagaagatctggaaagtcaaatgttttctaataagccagacgttaaagagagtcacaaaaatgtaaaacgactactactcatctcagtacattttggtggggaaatataactataactcacaaaaatgttgggccgaacacagtggctcacacctgtaaacccagagctttgggaggccgaagcaggtggatcacttgaggtcaggggttccagaccagcctggccaacatggtggccgtctctactaaaaatacagaaattagccaggcgtgatggcctgtaatcccagctacttgggaggctgaggcacgagaatcacttgaacccaggaggcagagtttgcagtgagctgagatcacaccagtgcactccagcctgggtgacagagtgagaccctgtctcaaaaaaaaaaaaaaagaaagtttatgctaccatgtaatgagtatttttttgctttttaaatgaattaataagtattttaaaaatttatcggcttaggccaggcatggtggctcatgcccgtaatcccagcactttgggaggccaaggcgcgtggatcacctgaggtcaggagttcaaaaccagcctggccaacatggtgaaaccccatctgtactaaaaatacaaaaattagctagatgtggtggtgcatgcctgtaatcccagctactcgggaggccgaggcaggagaattgcttgaaccccagagacggagattgcagtgagccaagatcgtaccactgcactccagcctgggtgacagagtgagactccatctcaaaaataaaataaaataaaatttatcagcttaaatttttaatatggtacacattgttagatgtatgccacatatacaaaagtcaattgggttcacaattatttttaagttgtaaagggacccaccctgagcttaaacttttagaaccactgctctaaagtaaccatttaaaatatcaaataggctgggcatggtggctcatgcctgtaatcccagcactttgggaggccaaggtgggaggatcacttgagccctggaatttgagaccagccagagcaacatagcaagacctcatctctacaaataatatgaaaaaaaaaaaagataaaataaggaggtttagctaaaagtcaatagaggagacaacatgaactactaaaaatacatgcaatagacccgaaacgacaaagagatacaatttcaaaatccatcagtttgcagaaaatattaaaaatcagacaaataccaaatattcacaagaatgtggagaaatgacaattatcttacaatgctgatggggtgcacattggacatacctttggagagcaatttggcatattacaaagatcaaggactatgtcacacacatcagactggcaaaaatataaaggtccaagttttggcaacaatggaatacaatggaaactcctcctctgctggtagaacacactttgcagggtcaccgggcggtttttagtaaagtcgaatatgcacgtaccctaaactcagcaacctgtcctagctctataccctgggtttgtactctgcatttctaccaggaaacacgtgagcaaggatgcttatatgtaattgttaatattttttatagaaataacctgtggcacaactgttggtggtccacccatatccctttggcattcaccactcctgtgcatgcaaatcaaagagcttcccactgccagcaccttcgatgctacctgagggttttccctggcccccggagtctgctcagccagcatgtggagcagattggaagcaccagcgtgaactgaccctctgccaacagcatacaaccagtgacgactggagttggtggataaatccgctaagtctctcatctctcacttaggataagtctgcagtgcattctacgttctcccaggaattccctgggggattcagcccactgtccacagcaattacctgtcgatgatgcaccttttactggtttctctccttagctgtcttatttccccacttccctgtcagtgctcactggaattaccttccaaataaaccacttgctctcacatccttccctcagggtcagtttctagtggaaccaatacttcgtaagtgcctttccacaggaagatgggtaaataacttgcgatacacaatgaaacagaggtagcagttaaaatgcattcagagctacaggtgccaaygtggataaacaccaaacatatcattttgtgtgacaaaagcagggtgcagaatagtaataacagtacaacaacacttacataacttgtattcctagctactcatgcagttggggtggccatgtgacacaattctagtcaataagatagaaacataagactgctagaaagggtaagttcctgggaaagttttgctcttttgatgaaagaaagagaaagaaagaaagaaagaaagaaagaaagaaagaaagaaagaaagaaggaaggaaggaaggaaggaaggaaggaaggaaggaaggaaggaaggaaggaagggagggaaagaaagcaagaaagcaagaaagcaagaaagaaagagaaagaaagaaagaaggaaggaaggaaagaaagaaagaaagaaagaaagaaagaaagaaagaaagaaagaaagaaagaaagaaagagagagatgtggcttgattcttccctcccctcttcttcctgtcctgatcatgacatgaaggctggagctgtagtggccatttggtctccatgaggaagaggtcaagacaatcatgaaggctcatgcctgtaatcccaacactttgggaggccgaggtgggatgatcacttgaggccaggtgttggagaccagcctgggcaacatagtgagacctcataactacaaaaaaaaaaaaaaattaaaaaaattagctaggccgggcaccgtggctcacacctgtaaccccagcatttgggaggccaaggcaggtggatcacaagatcaggagttcgagaccagtctggccaatatggtgaaactccgtctctactaaaaatacaaaaattagccaggtgtggtgatgggtgcctgtagtcccagctactagggaggctgaggcaggagaatcacttgaacccgggaggcagaggttgtagtgagctgagatcacgccactgcactccagcctgggcaacagagcaagagtctaaaaaaaaaaaaaaaaaattagccaggtgcactggcatgagcctgtagtcccagctactcagaaggctgagatgggaggattgcatgagcctgggagatcaaggctgcagtgagccatgatcgcaccactgcactccagccaacagagtgagactccgtctcaaaaaaagaaaaaaaaggcaatcatgaagatgctggctctgacattattgaaccactgtaccagcactccagactctttttcttcactctttgtgaataaaataaatacaatttgtttaagctactattatgagttttctcttactggtagtggaacacatatctatatgtgccctcaataaggcacataaataaaaaatattttatggtaaatatakgtgtgtgtgtgtgtgtgtgtgtgtgtgcctttataaaataagtagatggggccttgatatggtttggatgtttgtcccctccaaatctcaagttaaaatgtgattctcaatgttgaaagtggggcctggtgggaggtggttggatcctgaaaatggatccctcatgaatggtttggcaacatccccttggtgataagtgagttttcacttagttcacgggagatctggttgtttaaaagagcctgggacctctcccttgttcccactcttgccgtgtgacatgcctgctccccctttgccttccaccatgattgtaagctccctgaggcctcaccagaagctgagcagatgctggtgccatgcttgtacagcctgtagaaacatgagccaattacacctcttttctttataaattactcagtctcaattagccaggcgtggtggcgggcacctgtaatttcagctactcgggaggctgaggcagcagaatcgcttgaacccrggaggcagaggttgcagtgagccgagatcaggccattgcactccagcctgggcaacaagagcgaaactctgtctcaaaataaataaataaataaaaagtctcaggtattcctttatagcaatgcaaaaacagcctaacacaggcctgttaagtgctctttgttttgttaaggtgggcatgtatgtttagggccaggattcagaacattgctgaattgcactacataagagagtgagagatttgaagttggtgggatagtcagtatggagagaaagaaggcaaagaagatgggcactgcatgagagaagcatctcaaatcacacatgccctcctcagtggtagtatagccaggagggactttagaaataacaaaaatatctggctgggcgtggtggctcacgcctgtaatcccaacactttgggaggccgaggcaggcagatcacctgaggtcgggagttcgagaccagcctgaccaacatggagaaatcctgtctctactaaaaatacaaaattagctggtcacggtggcgcatacctgtaatctcagctactcgggaggctgaggcaggagaatcacttgaacccgagaggcagagtttgccatcagctgagattgtgccattgcactccagtctgggtaacaagagcgaaactcaaaagagaagagaagagggaagagaagagaagagaagagaagagaagagaagagaagagaagagaagagaagagaagaggagaggagatatctaatgaaccaaagaataaactatctaaaacatttgctatgtaaactacctcctctaactccccacaaaaatcttcagtaaagtctatgttgctcactcctcctttgtgcaagtggattctctttaggagatccaaaggggtgctgggtttggcatgcaggttatccatgcagagtgaagcagaagatcagagcacagctgacatgcaagtcatcaagtcatcacagggttgttgaaggaggcaggagagaccaaagttagacagygggccctggagtccaactagctctgcccctaactgatcatgtgatcttgagcaagtcacttagcctttttgagcttccgtttctccatctgtaaaatggacacaatagtagtatctacttcaaatggttgtggtcaggattcaatgagctaatacaggtaaagtgacaggcccagagcctggcacatggtaagtgctcaataatggtttagcattactccttctactatcattttcattataattgttgaagtagaaaagggagagagrgattgaaaaggggagggagggagagaagttggttgcgctgtgattgttggattggatgggaccactcaccgctcttttccctttgacaatccatggcccttgtaattttggttctgcaatgaggaaaggraaaggatgtaactggttttgtatatctgccctgttttcccaggttaacttactgcagatattaaaatgcccaaaccgtcagactcaacaatgcctaggttctgagacacgaaggtccagcctgatcaagttcccactggccaccatgtccccagcaaatggaccagaatttatctgctgtgaatgaactcccaagtatccaaggtaccaccttactgcaggtttgctccacaggtatgaccagtatagcaaatgcctggttttcagtactccaaaggtcagccctgaaccccagttttgaaagctcagttcaatacactctgtgagaagaatctgagcttttgttgttgttgttgttgttgagatggagtctcgctctgtcacccaggctggagtgcagtggtgtaatctcagctctctgcaacttccacctcccaggttcaagtgattctcctgcctcagcctccctagtagctggaattacaggcacccaccaccacacccagccaattttgtatttttaatagagatggggtttcgccatgttggccaggcttgtctggaactcctgacctcaggtgatccacccacctcagcctcccaaagtgctggaattacaggtgtgagccaccgtacccagctgatctggactttttactcttaacttggaatgtttgattaaattgaggatcccagaaggggctaggtcaaagactcagagcaatgttcattcctttcaccccaattggacctttcaaatcctcagtgggtggtgggtattatttcacttcaaccatgtccaaaacagcttggccctctgtcctgggaagaccaattcctaaggcacgtatgaagagagaaatcgaaattggtcctgtgcaggatgacatttgcagctgggacagacctgccatctgcattcattttctattgctgggtaacaaattaccacaaaatcagtggcttaaaatgatgggaatccattatctcagtttccatgggccaggagcgtgggcatgacttagctgcatcattggctcagctctcacaaggccacagtcaaggtgatggctggggttatggctctcatctggcgtgtggggtccccttccaagctcattcaggttgtaggcagaattcagttgcctagggttgtaggacggaggtccctgtttacttgctagctgtctgctggggactgctctcagctcctagaggctgcctgcagctccctgcagtgtggcccccacaggcacttcacaacatgcaaatttgttttcctccaggccacatggagcacgtccctctgacttccaatcctcccctctccaagtcacctatgatggagtcttaagtaatggaaggtaaccaccatagtaaccacaccatcaaattcacagactcctccatgctcaaggagagagaattgtacaaggcatgtactctagggggtgggaatcttggggcccatctgagaattctgcttagcacaccagcctacccctcaaagagcggcggagaggagtggaggaaactgctttacaaaactggcagaagcaagccccactgaaacacagtgaaatcttgtttcattcttccattcaagcccttccaactcccccaacactagtcaagctgtccttgtctttttgtattttatctttaatcctctctcatgctttcaattccattttccatatgtttatccagttgctccagagcctttggttaaaaaaattttcctctcctcattgaattgcattggcacgtctgtcacaattcaattgaccatgcatacgtggatctatctcgagactgtgttttgttctatttacttgtctatccttatgtcactatcatattggcttaattactgctgtagctttctggtaaatcttgaagtcaggtagagtaaattctgatttcaagattgtctttgcaattaggggtcctttgcacttcaacataaatttcagaattggcttgccaatttctacgaaaaaacatgttgagattttgactgggattgcattgaatctacagatattttcaggaagtgacattataaagtactgagccttccaatacatgaataatatggtctctccattaatttaaatcttttaaaaatttttttctattttctagttttcagtatagcagccttgtacatttttaattaaattcattcataggtatttgattttatgatgctattggatacagtatttttaaatttcgttttctacctgctgatagtaaattgtaataagcagaaaaaggccacctccaaagatgtccatgtcctgatccctagaacgcaagggggatttaaaattgcagatggaattaaggatgctaatcaaagaaccttaaaatagaaagattattttgtattttttgggcaggcccaatgtaatcataaggatccttaaatgtggaagaaggcagagtcaatgtcagagtgtcagagtcacgcaatgtgagaagaactgccattgaacatgaaaggggaccatgagacagcctccagaaactagaaaaggggtttctctcctagagcctccagatatgaaggcagccctgctaacaccttgattttagcccagcgagacccctttcagacttctgatctcatgaactgtaagatagggaccaggttcggtggctcacacctgtaatcccagcactttgggaggccgaagcaggcagatcatttgaggtcaggagttcaagaccagcctggccaacatggtgaaaccccatctctactaaaaattacaaaaattagctgggcatggtggcacacacctataatcccagctaatcaggaggctgaggcaggagaatcacttgaacccaggaggcggaggttgcagtgagctgagattgcgccactgcactccagcctgggtgacagagtgagactccatctcaaaaaataaataaataaataaataataactataaggtaataagttagtgctttaaaaagccattgaattggtgacaatttgttaaagcagacattggaaactgatacatatatagaagtataactgattttgtatattgaccttgtatttgatgcccttgctgaatgattagttctggtagtttgtaaatcctttgagttttctctggatacaatgatgtcatctgtgaataaaggcagacttacttacttctttcttttcaatatttatgctttttatttctttttcttgctttattgcactggtgaaaactctggtttgtacaaagttgactaaaagtggtaagagctgacatccttatcttgctcctgatcacaagaggaatgcattctctatttcagcttttaagaatgatattggctgtaggttcctatagtttcctgtactatattgagtaaatttcctactattccctggttttctgagggtttatcatgaacaggcttttttttttaacttatttaaaacatcttttcttatgtaattatgcaattatataattcatttaaaacatcttttattaggtaattattatgtaatttgaccattataggagtcaaagatgtttgactcagagatgtttaacatttacatctgcctgggcccccaagaacagtaaactttatggtaacattttattaagcatttctcagattagcctgaggactcatctaagattaagaattcttgctgggcacagtggctcaggcctgtaatcccagcactttgggagactgaggcaggtggatcacaaggtcaggagttcaaggccagcctggtcaacatggtgaaatcctgtctctactaaaaatacaaaaattagccaggcatggtggcgaggaactgtaatcccagctacttgggaggctgaggcaaaagaatcgcttgaacccaggaggtggagcttgcagtaagctgagattgtgccattgcactctagcctgggtgatggcaagactctgtttcaaaaaaaaaaaaaaaaagaaagaattctcaggagaaaggttttttccctgcactgaagctgactagcttcctagctgtctcccactgctgaagggtaaattggttctaattacacctttactaagggtgggggtctctgaagggtccagctttatggtgaggtctcagttccaactccttgcccagtgggccccatgacactctccaactcctgtttgtgagacaatcaatgtcttccccaagggaaatgacgaatgaagaatcagttagtgacaattctgtttttttattttcctttttgtgtgtgtgtgttagggtgggggttccttggggatttttcttctaccaatccttacccctccacataaacaggtcagctatacagttcaaaggatgtttgttacattttgcccagcagttttaagtgtgttgtgttaataagcttttcaagaaatctcatctgtcatattgcctgagatagaagtcctattactatcttgacccaaaaaacagcccagggatataaatactttccccaaaccactaaaataatgcatttagaaaagacaaggctacaagagtttttttttaaaaaattatcttattgagaaaatgattcaaaagtggcttagttgcttgtatgggctacaaacagagaactttaattttatttctcgttggtgccattcatggaaggtagcacgaatggcgccagttggtgttgagtcaaaaagagcataggctggtgacattgccacctgccttcattcctgtctctattcctggagtcctgctctgagctccctggtaatacctaccaggtggagacagccatgctgaaaccagtttgccacaccagcttacccaagactttgattatctaaccagagatcagcttcattgcttagctggttccactaatcccagcttcattcctgcctgatccaattcctcatttccccttagccctctggagagttcccagcacaactcagagctgaggtcttggcgaccataaccttgaggagatggggtcaaaggttggaacacrcggtattctgacctctggccttctctaggcatattttcgtgagggtacacaaagtatatcctggcatgttctcttaaggctgacatgaaygttcctgctcaaataagttcatactcctatttcccctgggtcatttgaaagaaaccacaaagtcctaagtcaatatacaggagacctttctttccctttccaacaacaaaaacaaaattcatagcatcacaaagaagtagtccactatttttttccttcatccaacatggtctgctacacccatgtctatactatattcacagtgtagactgctaagagtttgtgcattcttcagcaacctgcagttcgtccttcctttcaaaggaatcagtcgggttcaagggaagggactatttcagtagatgtttgttttctttttttctaacactttcataaagtgatatgcaggaagctgaggcaggaggatcactagagcccaagaggttgaagcttcagtgagccgtgttcatgccactgcactccagcctgggcaacagaatgagacactgtctccaaaaaaaaaaaaaaaaaaaagttatatgtgtcccaatctgtgtatttaaagagtattaatttttaaaatttgagagtttggtcatgattagcatagtggtagttgaggtagaggaaaaaataaattcaagacatatttagaaagttaaaggaaggaggcttttattggatgtgggatgtgaggaagatggaggagtcaacagtcccagttttttagctgagcatctagacaggtagttcaatagtcattcaacatgtatcaactgtagtcagctctgctgaggaccagggatacagggaagaacaagtcagattagatcccagagcagcagggaagacagatgttaaacaaatagtcacatgaataatgaattgtagtaaaaaggcaaagttcaaggcactctgaaagcagataaactcattttttgttgtgagagggaattaaaagaaataagaggttgaccaggtgcagtggttcatgcctgtaatcccagcactttgagaggccaaggcgggagatgggtttgaggccaagagttccagacaaggctgggcaacatagcaacataacatagagactcctctgtctctacacaaactaaaaaagaattagctgagcatggtggcacacacaggtaatcccagctacttgggaagcagagggaggaaaatcgcttgagtccaggaagtcgactgagccaagataacaccactgcactccctcctgagcaaccaagtaagaccttgtctcaaaaaaaaaaaaaaaaaaaaggaaagaaagaagagaaatgaaggtgccattcatgaatgagagctgggattaagaagtaagatggaggctgggcgcagtggctcacgcctgtaatcctagcactttgggaggccgaggcgggcagatcacgaggtcaagagatcgagacctggccaacatagtgaaaccctgtctctactaaaaatacaaaaattagctgggcgtggtggcgagcgcctgtagtcccagctactcaggaggctgaggcaggagaatcgcttgaacccgggaggcagaggctgcagtgagctgagatagcgccactgcactccaacctggcgacacagtgagactccgtctcaaaaaaaaaaaaaaagtcggttggggtgcggagagctgaattttactgtaattcattttccctcttggactttcatttttcccattcttaaaatgggagagttggtctgtgccctcttggagggcagaggtttgtctgattcacctgtgtcccttggccggcactgagcttggcttggaaaagacactaattagcgttgttttgaatggatgaataaacggatggatggatggatggatggacggatggacgggcaggcgggtttcgccaagtcaggaaatctgaaattctgaggttcaacttcccctggggtcacggagcttagagtcccactgttgtgtaaacttcccgccagctggccgggctcgcgggacttgcgcagcagcttgggcggcgcggtgcatgccgggacttgtagtctttcctctgagttcctcggctttttttcttcctgttttcggaattcctccgcgagaacaacccaccccgcccccccgccccacccctacccattccgcgaggaacacccatccccaaccgattttgaatccctctgctgctttcctccctttttctagggacgataaaagcatctgggtcaggtcgactcctaccttcggtcgcgacataacgcgattccccaggggccagatccaaaccgccaccgcgcgcctcgcgtgcttatgcgtcccgttgccaaggcgacagacaggcgcctggatccgccgctctgattggatgagccaagggcatgctctcggcggagtgcgcaggctctggtccaccagaacctctggaggctattgggcgtcctggcagcctaggtcccccgacttcctcaacctttcttttccagcctcgcctctccgcgaccctggggcagttcgttcagaggctggctccctctgccccacgccgcctccaactgcactttccttaaactgggagcgctgcatctgaaaagttgtcagctttcggtaaatgtaatggtactgagtttccttacttaacgaagttactcactaagtcacctggtcagttggtcagtcggtaacgcggccagtcgcctctgctatcccagccgctttctaatcttaagggctatagcctcaccaacattagatgttgtccatctttttccttttagtgattacagtgatagctcattgtagtttttttgtttgtttgtttgagacggagtctcgctgtgtcgcccaggttggagtgcattggcgcgatctgggctcactgcagcctctgcctcctgggctcaagtgatcctcctgcttcagcctcccgagtagctgggattacaggtgcatgccaccatgcctgagtaatttttgtatttttagtaaagacagggtttcaccatgttggccaggctggtctcgaactcctgacctcatgatccacctgcctcracctccaaaagtgctgggattacaggcgtgagccactgcacccggccagctcattgaagttttaaaagtactgaggggttgactgggaaggacatgaaggaactttctggagtgatggggatttccatctcttaataaagatgtgggttacatgagtatatgcatttgtcaaaattgactaaactgaaaacttaagatctacgcatttcattatttgaatgcatagatcttattagatctatagataatatatatgagatatatataagaaagagacaaagttatcatttgcagatagcatgagagtttaattgttcagagtccttggttacaaaaaactatctttgattaactgaaatagaaatggaattcattggtaggatattgaatgagtcacagagttgttggaaatcagaattaaaaaatggggaaggaattcagggagtctatctgatcaaaattatggtcaaaatcagagtttgcagaaactttgattggggtgccatttctgattattactggacatcccacaccactactggcaagactgctgcaaatagtactggatgctgttgctggtactagcacctctgctcaatagataccactactagtactggaattggccaaatgaatactcaacagacacctgctttgttgtactatttgcttcagatttaaagtccacaaacagctttagctgctaggactagagtacctgcctcttctagcttcatacagtagtagtgtggaagatgctgctagttgcctacacaatatccattcttcccttctgaaatagatgtccatcagaactgtctgcatttaaaaatccaagataatctacagagtattagaacaaataaaagggttttttgttttttaaatcaatccaaaaatgactcactgtatattgaatttctatataccaaccatagctgattggaaactacaataaaaatatatagcaacagaaatataagatatgtagaaacagatctaataaagtatatgaaagacattaaaccacaaattcttatgcttctactctgtgtcctgctctgttcttgactctaaaaatacagcagaaaggaaaactgacaaagcattttccctaatagagtttatattctcatagagaaaattataaaatattattaaaggacatcaaataaatgcaatgatataccatgttcatggatgggaaggctcaatatcagaaagatgtgtattttccccaatccaatcaggatttttgagaaatcttgtcaaaatcaaaagaacaatgtgtatatgttggggcaaggagacacttctctgcctaccaagccaatgaggagtagagcttcaaaacagacacaggagagagtgtgtgtgtatacttgatgtataatagaggtggcattataaatcactggggaaaaaatagaggactcagtaaatggcactgagaatttactttccatagggttgaaaaatagatgcctaattaaatggattaaataaatataacaaatatttaagacatatayatgttatatttattatcttggggtgggaaaggacttcttagataaacaataataataaagcactattcataaaggaaaaagatgatcagtttaaatctgactacctcaaaatttaaactgccaggccgggcgcggtggctcacgcctgtaatctcagcacttcgggaggccaaggcaggcagatcacgaggtcaacagattgagacctggccaccatggtgaaaccccgtctctactaagaatacaaaaattagctgggtgtggtggcacatgcctgtaatcccagttactcgggaggctgaggcaggagaatcacttgaacccaggaggcggaggttgcagtgagccgagatcatgccactgcacaaaagacatggtaaatctgattaaaagataagctacagactgggaggaaacacttacaacatatataacaaaggattggtgctcaaggaactccttcagaccattaaggaaaagataaccccaccctcacccctacaaaagaaaagaaaaatgggcaaaggatataaatagggaattttcagcagaagaaactcaaatggccagtaagccaattgagaaatgtaaataaaaataatcgtatgatttgaaatacatcaactatacaaaaataaaatatgtcaatgtttttcatgaggtcagatgttagtgaggaatgtaaataaaaataatcgtatgatttgaaatacatcagctatacaaaaaatatgtcaatgtttttcatgaggtcagatgttagtgaggacgtggggaaacgggagcctttacatgctattcacaccttgggaggcaatttggcaatatctcataaagttgaaaatgcacacaccttacaacccagatattccactactagacgatatcttataggcccacatctccatggaatacctttcatcttgtagttaatgtgcaaggtgacaaccttcctaaagaaatttttacaccactacataggtcatatgtataaggatgttgtttgcaatgttcttgataacagcagaaaatactagaaacaatctaaatgtccactagtagggtgatagatgaataaaatgggatatattccttttttctttctttttgagacggagttttgctcttgtcacccaggctggagtgcaatggtacgatcttggctcactgcaacctccacattcctgggttcaagtgattctcctgcctcagcctcccgagtagctaggattacagggacccaccaccatgcccagctaatttttgtatttctagtagagacggttttgccatgttggccaggctggtctcgaactcctgacctcaggcaatccactggcctcagcctcccaaagtgctgggattacaggtgtgagccaccacacccggccaagatattctaataataaaataccatacagtgataagaatgatccagatttatatcagtatgtacatatccccaaaacctattgagtgaataaaagaaagttgtagaatgagaaatgttttttaaaggttaccatttgtgttaattataaacacatataaaagtatatttcatattattttgtatgtataggtagtaagagtttaaaaacacagactcaaaagatatgcaccatagccaatcctcgtgagtatagtggtgagtatccctgcgtgtcaaaacatatgcactaaatttatgatactagttggggagagagtgaaggaagtggggagagaaaagggaacttaactacttcaagtttatttagaatgtttttgttttatttaaacaacacaatggaagcaaatagatcaaaatatccttacctggatttaagatttttttccccaatgaaaaacacacaggccataacaataatatgatagaggaagtttagcattctttttgaatgcataatagtaggatctaaacaagtctaataggagtcagtaaagacttccaggaggaaatgagagttagcttggtaaggaggatgggaagagcattccaggcagaaagaagagcattaggcgaagttggaagtcagagaaagcaaagcatgacacggatcagtaactaggaaagagtggagtagaggggagagacgaggtttccaaacctgtttggtcttgtttcctttttcacmgatgtggaaacatagccctaatgaagggagtagagacaagggttcctactctrtcaactgttccatgataatagtaatgccaatggtaataataataataatgtacygtgttccagtctttctactaggtatttgaaacatgtcctctcatttattcttactacagacctacagagggttttttttcctccctatttcatagatgatgaaactgaggcccagagaaatttaaaaacttgctcaaagtcagtggcagaaaccacatcccacaaggcctccttgtgtgccatgctaagcaggttggacattttcctaaaggtgttggtgagtgtatgaatttcctgttgctgcttgtaatcacaacaaacaaagtgacttaaaacaacacaaatgtagtatcttagagttcttgaggtcagagatgtgaaatgggtctcactgggctaaaatgaaggtgwcggcagggttgagtttctttcgtaaactctaggataatctgtttccttgccttttccacttgcatcccttggctgtgggcccccttcgatctgcaaacccagcaattacaccactccgacttctgcttccgtcatctcatcccctctgattcctactctcctgcctccctctttcactaataatgacacttgtgattatgttgggcccctctgaataatccatcataatctccccatctcaagatcagctggctgggcgcggtggctcacgcctgtaatcccagcattttggggggccaaggtgggtggatcacttgaggtcaggagttcaggaccagcctggccaacacggtgaaaccccttctctactaaaaatacaaaaattagccaggcatgggtgggcacctgtagtcccagctgctcttgaggctgaggcaggagaatagcttgaacctgggaagcagaggttgcactgagccgagattgcaccattgcactccagcctgggcgacagagtgagactttgtctcaaaaaaaaaaaaaaaaaaaagatcagctaattagcaactttaattccatctgcagccttaattctaccctttgccatgtaatataacattcacagttacaaggaaatagagtgtaaacacctttggggggaccattattttgtctaccacagtaatccactaaagggctttaagcaagggaatgacagggtgagacccacattttagcatcttcctattattggttttgtaaaatggtcatttcatgatttaagacagattgggctttgtaataactaatacttccaaaggctgaacagtacatagatattaaatatgttaggtctaataacacatatgggcttttaacttgaaagaattctttcctacatgtaatttgtatctttccccttagcactcagtgggaacacaaaggactgttacaattgcccctctatgggtaaattaagggacattggctcacccgcctaggatcgcagagctgctaaggccagggccatggtaaggagctagtcttcaggctcgtttatcagtgttttctttctctttctttctttctttctttctttctttctttctttctttctttctttctttcttyctttcttccttccttccttccttccttccttcctttctttctttttctttctttctttctctttctttctttctttcttccttccttcctttttctytctttctttctttctttctttctttctttctttctttctttctctctctctctttctttctttcttttgtctttttttttgacagggtctcactctgtcatccaagctgaagtacagtgatgtgatcacaggtcactgcagcctcaacctcaagcaatcctcccaccttggcctccaagtagctgggactacaggttcgtgccaccacacccggctaattttttgttttagtttgtttgtttgtagagacgaaatttcgccatgttgcccaggctggtctccaactcctgggctcaagcgatgttcccgcttcagcctcccaaagtgctgggattacaggcatgagccaccacgcccagcatcagcatttctttacagcatccatgggtcgggcatttggggaaacttaagtcagcacatctttggcacaatttcctacatatagctcagtgcccaataaacgtgttgaattggtgaacacccctgctttcatttctgtgacacagatagtgactttcaaggcaggaagcctgggggccatcctaaaattccttccttccccccacatccagtcaatctgcaagtcctttcagctgccctgtgaaaatattcatatatgctgagtccatccccttctttccagcttctcgggtcccactctrtcccaggtcactgtcacctcttacctgagctgctgcagtggcccccataaaggaaagggtcagtgaggggtcgaagtatttgacttaaataaatcagatgacctggcctcccaggttaaattttcctgttggatttttatccgacagaagagaaggaaaactttaactcccaatcatggccatatgtgctcctgcatgctccggccctgaaccgtcctcttaacacctcctgtagctccctctactccagtcccactggctttttacagaggccaagctattcccatcatagggcttttgcccatgctgttccttctgctggaaatactctctccactctttttctttttcgtgtgtgttattttttatttttttgagacaaggtctcgctctgtcacccaggcttgagtgcagtggtgcgctcatggctcactgcagcctccaccgcctgggctcaagtgatcctcctccgcctgggctcaagtggtcctcccacttcagcttcctgagtagcttggactacaggtcccggctaattttttttttttttttgtaaaagcagggtctccctatgtttcccaggctggtctcaaactcctgggctcacacagtcctcctgccttggcctcccaaagttctgggattacagacmtgagccatcatacccagccaaatttattttagagatggggttttagtatattgcttaagctggtctcaaactcctgggctcaattgatcctcccacctcagcatccccatgtgttgggattacaggcatgagccactgcgcctggctttccactctttaaacagctgggtccttcttatatatcacctctcagctcaaatgccacttattcagagaggttctccctgtctgctttgtttccttcatagaaaactgggaccatttgtaaataatttatttgtttgcctatcttgtttgccttccctcctagatctgagatgtctaatatgtagctactagctgcatatggctagtaagcatttggaatgtgacttgtctgaattgagatgtgctgtaaatgtaaaagacaccagattttgaatagttaatacaatttaaaaaggatataaaatatctcatttatagttttaaaatactgactatatgttgaaatgatattttggatatattgagttaaataaaaatattatcaacaattaacttgtttctactttttaaatgtggctgcacatgtggctggcattatatttcatttggacaatgctggtctataccattagctaatgaaggtaggaacaatctctacccactgctgtgtccctagtctctatcatatactagatgctcagtaagtatttactgaataatttggtatttatgagaactctgggcttttatgagagctgagacgggcagccccatgtatgctatgaacttragggaggaagaaacagttttatttttctccaaycactgtatttcaaagggctctgtggattctctctgtcctgctctctatccacaatccccagtcacctactactatagattgaggggtgggggtgatggctgaaggaacaaagctggtgcagctgcttctatttcagtcctataggaagtgtcttgattattttacattctccagctttggtcctagaagccaggaagggctcacctcaacatcctcagaaacacagatagggttagctgggggtcacggggactttcccagggtcatctagcaggtcagaggtgaacagggcctcaaaccttggtctccagaccccttccaggaccctgacctctagctattaatacatcctgatgtagtctccttcagactggaaccctccctcaaacccctctcccaacattcacctgtaatttcttggggcacctaatggcagttgtgcctggtcccagcagagcttccctggatggcaccatccctcctaggggccgaaatggatggaaggaaggagtgagaggatggatgaatggatgggaagatggacgagtgaatgagtgaacaggagggtgggagaatggatgggaaaggaggaaggctggttggtagggtgtctctgcacgggtggagaggatgtatcggaaggaattacccacttatcccgttccaagcagactctgaagagcagagagccctcggcgatcaaagtccagccccgtcacgtttctgctagaagccgaggcgggagaagttgggtgctttcccccggggcccgcagggacgtccaggcagagccggaagggggacgggagtttgtgggccggccggggggctctaggcgacatccccccatccgcccgcgcctgccggtgccagggtggggtaaggcccccgcccccacctccggaggtggcggccccacgcggccccaacaaactgccgttgtcccgcgggccgtgggcccggcacactggggctttgtccggccccccgccgcgacccgaggcgggggccccacatgaccgaaggggtaggaggagcctgcggcggcggcggtggcagcggcggctccaccaccatttccctcccgggccgggggtcggcgggcggtggcggtggctgggcagggctgggcagggccgcggacgccaggccccccgttccccgccaggctgcaggcgtcgggcctgggccgtcagggcagctgtgaccggatcgcttcccgggcggcgagctgggggtgcacccggaccgccgcccccgggatcatgggcaatggcatgaccaaggtagggggcgggccccgcgcagcctccccggtccccgccccggccgccgcggcccggcgctgaccagctcggtccgcccgcctctgaccttctgttctcgccggtctccgtgcggcggcatctccgtgtccctgtgactcgagaccgcggctgtcgggtctccccctctctgaccctgcgtctctgtccccgctgtgtccgccctctctccgtgactctgtgtgtctctcgctgtcttgctgtggctgtcactcccaggctgtctcccagtgagtcctgctctccgtctgcatgtgtccctctcccttgtcgctgactcctcggctctctccggggctgtttctccatcctgtcccgcctctgcctgtcattgcctttctgcctccccagccccagaatttccatccctgcaccctgcaagtctacctctctcctctcctctcctcctaagacctgccttcctcctctcccctctcatacccaagctggcctcccttggttccctcggttggttaactggccccctagcctaccctccccagagccccagacccctctcacagaggactcagggcccacaaaagggaagagagtgctccctgagccctgaggtccatacccttcatgggacagagaggggctgtgggccccccagctgccctgggggtggaagggggtgcagcccctgccccactgacccttgcctgtccttcctctaggtacttcctggactctacctcggaaacttcattggtgagcactgcccactctgtcccgaggccatggcactctgcctgtctcaggcctgtgtccaccattcatgccctggcccatgcatctcaggaatggggttgggggcagggaagcggccccaggctgggagggggaaaaggctgatggaggacaaggggtgcacatgcaggcgagtgtccccaggcttgaagggacatggagggagcatgggggcctgacactgacatccctccccgccattcagccttccccagtgttctaccaccagaccaaagggccagagcaaagggctcggggcctgggctgtggacctgagcaagtctacacctgcgctaagcctcagcctcctcctcagcacaaaaggtccaccagctgctgagcactcttctggccctgaggttctgggttgaggtctgtttgcgggtgctgcttctagcggggaagctgggaactcttccccccataacttcctccttgtcagaggagaggtccctggagatgggctgggccttcttgtgagcagggtcatgagcaccaacactgtcgcaccccagagccctggagcagctgggcagcctagagctggaagttgggggggcggtgagccggcaagctttgcattccccactctctcatccattccttccacaatcttcagtcaggaggaggggacacccatgtatagataccttgttcttcaggggcttccaggctggtggcaggcaggcagagctgaacatagaccttgggtagaaaacatgctgggtagaaaccatgctaagggggctgggcgcagtggctcacgcctttaatcccagcactttgggaggcggaggcgggcagaccacctgaggtcaggagttcgagaccagcctggccaacatagtgaaaccccgtctctactaaaaatacaaaaatcagccaggcacgatggcaggcgcctgtaatcccagctacttgggaggctgaggcaggagaatcacttgaacccgggaggcgggggttgcagtcagccgagatcgtgccactgcactccagtctgggcaacagagcgagactctgtctcaaaaaaaaaaaaaaaaaaaagagaaagaaaaaagaaaagaaaacatgctaaggggcagactgatccagggcttgggtgactcaaagtgggaaaatcatttccatctgcagagtcagaaaaagctttagagagggaggggctcaggtgcttcacccttgtaaatcctggtcccttccttcctgggagctccctcagccgctcatgccaccttgatttctgtgagtatttggccaagtaaggtctgaaccctctgtaagtgtgcaggccccataagggcaggagccacgaagctggccccagacctccagtgcccagccaaagtatacacatggttagcactcggtaaatgctcatcgaatgaggaagtggagatagaggggacatgtgttattcattctgaatataaaagatctgcatatgctgggtatgcagcccctagagagggccactgttgggtacatccttgttcatatatctttgtagataaggacatagtatttaaaacaaaagtggaagcttattctgtatccttaaaaatacattgtgggcatcagccgggcacgatggctcacgcctgtaatcccagcactttgggaggccaaggcgggcggatcacgaggtcaggagatcgagaccatcctggctaacacggtgaaaccccgtctctactaaaaatgcaaaaaaattagccgggtgtggtggcgggagcctgtagtcccagctactccggaggctgaggcaggagaatggcgtgaacccgggaggcagagcttgtggtcagccgagatcgcgccactggactccagcctgggagagagagcaagactccgtctcaaaaaaaaaaaaaaaaaaaaaaaaaaaaaacattgtgggcatcattgcacatcagcatatagaactctttttaatggcggcacactgtgccaaagtatgcctacaccattaatcatccagtccctttttaatgaacaccaggttgttcccatgtttaaactatttgtgatataagcaggactgcagagaacatcatcctccacacacagctttctgtgtgagcaagcgcttctgtagacaagattcctagaagcagaattgctgggtcaaagaatatgcctgggaagggtgttttggatggaaagaacagaatgagcaaggatggggatatgctgtactgttacttgcatgtgccccagaagcaagaggatcagggagccggcagagcgtgggccaaggtggagtggtggggtgagagggagagctgggcaggcagtgagctccctccgcacttggccatcaggacatcccgccagccagattggctcaagcatcctgtttctttcagatgccaaagacctggatcagctgggccgaaataagatcacacacatcatctctatccatgagtcaccccagcctctgctgcaggtacttcttacccccatcccagggctatgcgggggtgggagggtgcagacctgtttatcaaatatctactatgtgctaggtgctatgcttccttcttgactcatgttaactcatttggtctccaccactgggccattttacattatcatccctatttggcagttgaggcccagagaggtcaattaactcacctgaggtcacacatccaggaagctgaggagttggggtatgaacacaggccatctagcaccagaagtctcacactgaaccttaaaatggcccccatatgggcttcccatgacccaactggatggatgaatccaaatggatgactgtgggctctgtatcttgctatgcaaccttgggctgtgacttcacctctctagggctttgatccctcagctctgtctgcccccagaaggctgctgtgaggatgcaaagggactgcaggatggtgaagatgctttgcacactgtaaagcatggtcccctctagggcggttggtgctggtattatcaagtcctgggaaaggggcatgagggtgttaggacccagcagaggaaagtaataaatccagactacacgtgcttatgtcaggaacatcttcactgtttatttgctctatgaccttggggacaggactttgccccctctgagcctcagttgcctgatctgtaaaacgggaactttataacagtacccacttcactgagtggttgggaaccacataaatagatgctcaacaaatcacaactgatactataacaaatttaatcatattcttatcccataaacagagcctcttcacccttatctattagagtctgtatcatccactggagagaaagaaccatgggtgggaaaaggtcctggagatctgaaatgaagacccggttctgccatagacttgctgtgtgatcttggccaaggtccttcccttctctaggcctcagttttcccatatgtcagatttgatattctctaacagcaacctctaataatctatgattttcaatgtcattcagagaagaaatttccaggccattgcagtcttattttgcctcatagggcagcctcgtttgggagtatttggagtaaacagtcactagagtgcatggggaaggttgtcaagtcatgagtgtatttactaatgaaatgacagcctacacaatgagtctctgctcctacggcccttcctgcttctcccaagcatctctccttcccccctccatcagcaaatttaccaggcagggtttgatagtaccacacaaacccaaggccaaatgtgttgcaaagtgaaattgcaaaccttgccaaagatgcaggatgtcatgaccttggggaatgtgagtgagagaagggctggaatctcacacaaagccatggacaaatgagaacctggctggtggtcccttagttactgccagtgacgggcctggcccctgaaaagagccatttgaatataaaaatgttaagacagtttctcgagaaaagcaaggaggtcctcaggaggcgggcaaaaataatcttcatgatattgtgtggctaatcaggaaacaaaggacatcacagcaagtttgctggaaaaaattcctgacaatttattccttgattattctcataatcagcacatcattttataaccatgattcctgaaatgtatacttgttttcatgatttttgtttcttttcaagataatcaaatctgctctaccttttttacgatgtaattttgtaattcccatttggagtggagtccctttaagtagccctttcctagctacttgataaaggttcctgggtccctgttgggagggataggtgacgtcatgcccacgctgctgatggggttaggagacaccatgtgcttagaaggttcaggaatcacaagtggtcacagctgggaggcctcagagatgacaactactttctttggacagagaggaccacagtgggccagagaagggcaggaactgggctggggttatgccctgcctgggcagctcggaccagcatcagggagggttgcaggcaaggtcccctgcctgagtgtattttgtacttgcaggatatcacctaccttcgcatcccggtcgctgatacccctgaggtacccatgtaagttcccctggatggacccatagatggacagacagctgccttctgtggtgggggagggggagggggtttgaaggaggacaaagtactcaggccagagagctatcacaggtgttcaactcaaccagtcccaggtttgactctgtctcaaccatgcccttgtgataggcccttggccaagactctccacctccccgagcctcagtctcatcagctatgaaatgggaaaaggacactctgtaccttgggaccagctacaccagctgatttgaaagggtcatattcagcctgttcctggccttggggttaagacatctgagttccggccaggctc

SEQ ID NO: 98089 - DNA, 57736 bp, Homo sapiens
  misc_feature (1)...(57736): n = A,T,C or G
gccacactaatgactgtggtatgggacaaaccatttaacttctctggtcttcataaatggttcaggcaaacagggttatgctacatcaggggttcctagtccctggagctcatagaggtgttttaggaggttaatgtcatcatccaaggtggtaatctttctttccatgtctttttaaattttttaaataaagtttttaaaatacatttttagaggcgggtctcactatgttgtccaggctagtctttaacttttggcctcaagcgatcctcctgcctcagcctcccaaaatcaggctgggcacagtggtgcacacctgtaatcgcagcactttgggacgttgaagcaggtcgatggcttcagttcaggagttcgagaccagcagggcaacatggtgaaactgtctctacaaaaaatacaaaaaaaattagccgggcatggtggcatgtgtctgtggttccagttactcaggaggctggggtgagaggataacttgagcccaggaagttgaggctgcagtgagctggttcacgccactgcactccagcctgggtgacaaagtgaaccaccccccacaaaaaaaaaaaaaaaaaaaaaaaaaaatctaaaatgggtatttataactttgttcagtttaaaaaagagtttgagaatttctaaatttataccatgtgttaggggaaactaatgtttttactcatgactcagtcactcagctgaccaccactagcgtgttgatggttttaactttaatgcagtttaaattgcttttatttttagccataagttgtttaacttatactcataatggttgctttagcaccataacataaggttataaattactgaggtgcatggtaattctgcaaatttgtctctaaagtggtctttgtcacatctgagaggcagccatcttctgttgagttttataaagaccaccaagatgtctctgataccctaaaacatctttaaaaagaggacacacagtggtaatttaacttgacattttctttattgtgaataaaaattccttaccctgctaattaattatttgaggaatacttaaaattagtaggttgaaatctttactaatcatttagaaacaaaacatagtatgtactttaaaaataataaattgcatttttagatgcaaaatcaaagaattccaaatatcatattatgcaaactttttgtattgttttgatgctatatcatagcctcatttcactgttttaaaataaatttgagcttcaaaataaacttttactttccttctacacaattaattgaacagtggacatcacttgctaaatggaaagtaagcactgccagcattgtctgtctttggtgtttttttttttacctatttattagaaccatagtatttcttcattattaatttgtatgaactattttttaagatattaactcttttctcctatatttttgttttcatttaaacattgttgtgacatattgaaatgtttatctttacttttcattttttttaagttagttttttgtttgttttttagagatggggccttgctattttgcccaggctggattgttgggctcaagcaatcttgagcctcagccttcaaatagctgagactacaggcatgtaacaccatatctgcttttttcctttgtggtttcttctattccttttgagatcagtttccttctgttatgggctgaattgtgtcccctcaaaactcatgttaaagtcctcgccttcagtatctcagactataactatagttggagatagggtctttaaagaggtaattaatttaaaatgagataatatgactggtgtgcttataaaaagacaagatgagacacagacagacatagagggaggaccacgtgaagacacggagaagatgacgatctataagccaagaagagaggcctctgaagatcggttttattccctgctgacaccttgatctatgacttctagactccaagactgtgagaaaataaatttctgttgttgaaaagcctcccagtgtgtactactttgctatggcagccctagcaaactaatactatatcctccaacctccaaaattctgtaaaatgctatacaattctattttcttctgtcttttctatggctttatttttcagttgacttctaaaatttatttgtatttttttcttgaatctaaattgatatatatttcccccaaattgctgaacagctaacccatctacatgtattgtctattttaatgtgggattattttagcctcagagatataattgtctggaacacagggaaaactttttcagatattgctgcagtaaataacttctcttcttaagaagcacctcttctcagggatttaattctttttgtttcacaattatttgtgaactctttcctggaaaaccacagtggctcatgtctgtaatcccagaactttgggaggctgaggtgggcggaccactcgagcccaggagttcaataccagcctgggcaacatggcaaaactccatctctacaaaaaaaaaaaaaaagaaagaaagaaaaagaaaaaccacaagaatcaggaaagtagctgtatctgaacttatctgtatttccccaggcagagctctatgcacattaaggaaggaccgatgaaagtgagtcaaagaatgtcagctcttaaatcctgggtcactatgggtcagtagtagtctgtggggccccgaggggcaggggtggttcctgaggccttttcacagctgtctgcaattttgaaactattttcataacactaagttgtgatttgccatttcactctgctgacatttgcactgatggtaccgaaacaatggtggttaatactgctagtgcttaagcataaatcaaaatagtggctccaaactgtactagtagacaccatattctatataacatgcactgataggaaacaaaaaccatttcatataaaaatgttcttaacgaagcagcaacattgttaatattatctttttttcttttttctttcttctgattcagccctcatttattacatcttaactcttgaatatgtctttttaaatgttctatgtgaggacataagaagtatgtataaaatccttctactgaatactgaaatacattagttgtctcaaggaaaagcacttgtgggattgagctgctagctgaacttcctgcttttttcatgggacactttttatttgaaggaattactcacaaattatgattattcagacttagatatctggcatttactttcttgtgaattcaagaagggaacctatcagttcaaggaaaacaatcgacatttcttgccaatgtgtaaatttcaaactttcaagcacaaatttgaattttggaaaatatgtattcaccatctaagtttgacagatctcccatactcgggactttactgatgagatccatggtgatactaacagatggaattttttgatgttgtgtaacaaagtcacatttcacattgcaactaacctttcaaaaaactactacttgttgagtttggaccaaattttcttcatatacatgaacaaaaacaacatataacaatagattgaatgcagtagcagatttgaagctcctcctgtctactattaaaatggacagaaaatagatttgcgcacagtaccagttattttatttttttattttggaaaatatttttttcattaagatatttgtcataggtttttaaaaaacactaattgttttcagttctaatgtctaatatggtaaaaatcaataggtaactcatataaacaaatggtctttatactttccaaagcaatctacagattcagtgcaattcccatcaaaatatcattactacttttcacagaactaaaaaaaaaattctaaaattcatatggaaccaaaagacagcctgaatagccaaagcaataataagcaaaaagaacaaatctggaggcatcacgttaccacacttcaaattatactgcaaggcaagttaccaaaacagcatggtacaggtaaaataaataaataaataaataaagacacatagaccaatggaacagaatagagaacccagaaataaagccaagtacttacagtcaactgatcttcaacaaagcatacaaaaacataaattgggaaaagggcgccctattcaataaatggtgctgggaaaactagtttagccacaggtagaagaatgaaactggattcccatctctcaccttatacaaaaatcaactcaagatgaatcaaagacttaaatctaagacctgaaaccacaaaaattttagaagataacattggaaaaactcttttggacattagccaaatgcaacaaaaacaaaaataaataaatgggacctaaataaactaaaaagcttctgcacagcaaaagaaataatcagtaaacagcccatagagtaaaagaaaatattttcaaactgtgcatctgataaaggacttgtacctagaatctacaaggaactcaaacaaatcagctagaaaaaaacaatcccatcaaaaagtgggcaaaggacatttttcaaaagaagatatacaaatagccaacaaacatgaaaagatgctcaacatcactaaatcaccagggaaatgcaaattaaaaccacagtgagataccaccttactcctgcaataatggccatgaggcaggcggatcacgaggtcaggagttcgagaccagcctggccaacatggcaaaaccctgtttctactaaaaatacaaaaatcagccaggcgtggtggcgggcacctgtaatcccagctactcgggaggctgaggcaggagaatcacttgaacccgggagccggaggttgcagtgagccgagatagtgccattgcactccagactgggggacaagagcaagactctgtctcaaaaaaaaaaataaacataaaaaataaaatttagaaaatatacgttggtgtcgatatggtgaaaagggaacacttttgcactgcttgggggatgtaaattaataccaccactatggaaaacagtataaagtttccttaaataaataaataaaggtggagctaccattcaatccagcaatcccactactgggtatctacccaaaggaaaaagacacatatacacgcatgtttatagcagcataagtcgcaattgcaaagatatggggccaacctaagtgcccattgactaacgagtggataaagaaaatgtagtatatatacaccattgaatactactcagccataaaaaggaacgaaataatatcttttggcagcaacttggatggaactggaggccattattctaagtgaagtaacttaggaatagaaaaccaaatactgcatgttcagttatgaggatgcaaagacatacagagcgatataatggattctgggaactccaggtagggaggagattgggagcggggtgagggataaaatactacatattgggtacagtgtacactggtgggtgacgggtacactaaaatctcggaattcgccactcaagagctcatccatgtaaccaaaacccgcctgtacacccaaaactattgaaataaaaaaaacattaaaaatgagagaaaacccacaaaaagcaaatggtctttgtgctcctcaacggtttttaagagtcttgtaaataagtcctaaggccaaaagtctaagaaccgctgctgtaagctagcacctataacggtggaacctaattctttgtaggaccctttccaatgtcagagtgaaatcggtcagaatctagcaggcttatctagttttttctacagcgataaggaaagaagtccagtattagccctgggccgcggtgagggtggagccaagactgcgtctggggtctctgtggaaaccgccctgtatgggtctcccggacctcgcctcttttgttcctctccgcctctgattggaacacgctgtcagtgggcggtgcttcgggaaaggggcgggccttcatcttcttccaggagcccctcgcagcagcgtactgacgtcacgcaggacgccactgccctgtcgccccgcctgtgcagcccaggasctaggcgcggtagctggggctggcttttgaggggcgcgggcagccttctgactgggtcggaggcctgcgggcccgaagcctctgtccctcctgttcttgtccggcgctgcttagcccctccgcgtagtcatcatggatctgattttaaaccgaatggattatctgcaggtaaacccaagggatagggcgggcgccgcgctgggcaagcccagcacccggagaggattccttccttccactgacgaaagtctcggtcgccaggagctggtgcggaggcgaaggagccgggctgggtgccgacctctcagcaccccgcctttgggcagctccctttcgtctgtgacggtccgaggggaccggggaaaagcggcacaagcccccacggtactggcttctgccgggtcctgaggatgctctgaaaatgtgacactgtctcatcccggattccccccagggcccttctcctcctccctagccgtggctgcctgagggcctctaatcctcaatctccatctctacccggacccttttgcggagcaccaggcacttgtttcttactgtgagctgtaccgcaccaggcagatcatggtaaaagcaatgaaaaccgggccgggggcagtggctcacgcctgttatcccagcactttgggaggccgaggcgggcggatcacctaaggtcagcagttcgagaccagcctagcctacatggttaaacctcttctctacaaaaagtacaaaaattagcccggtgtggtggcgggcgcctgtaatcccaggtactcgggaggttaaggcaggagaatcgcttgaactcgggaggcggaggctgcagtgagctgacatcatgccactgcactccagctggggcgacagagcgagactgtctcgaaagggggaaaaaaagcaatgacaacagtttaatgtgcatctagcttattctaagaatttagcatacctaccaacatatttaatcctcataagaatttgcaaagtagacaatattataaatgaggatctaaggggttagagaaggcaagtaatttgcttaatagctaaaaattagggagtggctatttgaatcaaagtctcggactccagaactggtgtatttttgttacactacactgcctttcagaatttctttcagacctaaaattctctctaccccaattcctcatcatatttttaggccacctcattttagytaatggtacaaatgtttgcccagtcaattttctaggggtttatgctatgtacttccatatccaactggtcaccacatcttactgcttttaactcccaaatatctcttgaatctgtcccatatcttccatctctattaccctcatttgggttctcatcttctcttgcttgaataattgaaataacctccaaattgggctcctgaactccagcttcatctccctccaagccatccttcacatcacttgctagattgatgtttcagaaatacaaatctaagcagatgactttaatacaattttctggaatgcagaataaagtcatttatactatatgaacgttttatcatgatgtgttgttttcaccaattcctctcccattggtcccatcctcttctcctaactatacaccagcagtgacagttccctgctgctttcatcctctgtatttttttgtaaaataatcttcacctgttagattggatgttatggccattatcatatttggtattttagcataaatcttctttttttttttttttttttttttttttttttgagacagggtcttgttctgtcacgcagccagtctggagtacagtggcatgatcatgactcaccacagcctcaaattcctggactcaagttatcctcctgcctcagccttccaagtagttgggcctgcaggcatgcaccaccatgcctagctaattttttattttttgtagagacagagtctccctgtgttgcctagatggtgttgaacacctgggctcaagtgatcctcccacttcagcctcccaaagtgctgagattacaggcatgagccactgcatgtggtcttccgttgcatttttaataactataatctattttcaaagttcttgaatcactttgctgaacaactgtatgcagttggaaaaraaggcttctaragatattttttagtaaagcatcttgccagtcatcttacacaactatttttggcttgacaactttataggataaattttactattttggttgtttcctatatgtattctgactaatatgacatatctcattagaaaataaattaattactgataatagttatatcactaatttcagtttaacaaaaaggttcactrtaacttattttaatctctgtaataacttcaaattaaattcactaggcatctggtgtttttctttaggtgggagtaacatctcagaagactatgaagctaattcctgcctcaagacacagagctacacaaaaggtactgtatagattctgatttctccactattccctagcagtgacagaggagaggctcctatttccttctttattattaagttattctcttaaaaatsctaatgttaaaatggaartgaattttttaatttgaacagaaactggaataccaagggacatttatagacaataattttcttggacattaaaattattatataccattagtaaacagtgtaggcaaacttaaaaaccatactccattttttctgtgtatcagatgtgtatatgaaaaaagaaatataaagcagaataaggtatcaagaaaatgttctctttaaactttctcatattttaaagtcattaaatattttgatgttaaactgtacttaactaacaatattgattatgtttaaagaaatgttgatcctatgatttccacaaaacaattatagtttcttagtagactagccaaatattttaatagctgcaaaaaaatactttatcctgatatataaacattttagcaagatgaatcaacaattacacatagtactagaagtcctagccagagcaattatacaagaaaaagaaataaagtgcatccagattggaaaggagagtcaaattatctctgtttgccgatgacatgatcctatatatagaaaaacctaaagactctaccaaaaaactcttagaactgacaaatgaattcagtaaagttgcaggatacaaaattaatatactgaaattagtagtgtttctatacacaacaaactagctgaaaaagaaatcaagaacacaatcccaattataatagataaaagataaaatacttaggaataaattaaccaaggaaatgaaagacctctataaaaaaaactataaaacactgatgaaagaaattaaagaggataccaacaaatggaaaaacatcccatgttcatggattggaagaattaattttgttaaaataacaatacaacccaaagcaatctacagattcaatgcaatctctatcgaaataccaatgtcatttttcacaggaagagaaaaaaaatcttaaaatttgtatggaaccacaaagaccccaaatagccaaaacaatcctgagtaaaaggaacaaagctggggcattacactaccagatctcaaaatatactacaaagctgtagtaaccaaaacagcataatactggcataaaaacacagagacacagagaacataaaatggaatagagaactcagaaattaatccacatatctacaaccaactgatttttgacaaaagagccaagaacagcccctggggaaaggacagcctcttcaataaatggtgctgggaaaactgaatattcatatgcagaaggatgaaaccaagacccccacctctcaccccatataaaaatgaacacaaaatggatcagagacctaaatgtggccaggtgtggtggctcacacttgtaatccctgcagtttgggaggccaaggcgagtggatcacttgaggtcaggagttcaagaccagcctggccaacatggtgaaaccctatctctactagaaatacaaaaaaattagcttgtcattgtggcaggcacctgtaatcccagctactcaggagaggaagactccatctcaaaaaaacaaaacaaaacaaaacaaaaaacaaaaaaagacctaaatgttaatgctttaggacattggtctgggaaaatagttaatgaataagacctcaaaaacacaaacaacaaaagcaaaaataaacaagtgggatcatatcaaaccaaaaagcttctacacaggaaaggaaacaatcaacaagagtgaaaagacaatctatagaatgggatttaaaatatttgcaaactactcatccaacaaggaattaatatccagaatatacaaggaactcaaacataccaatagcaaacaaacaagcaatctgattaaaaagtgggcaaatgatctaaacatttctcagaagaatacatacaaatgaccaaaaaaacatgaaaaaatacttaacatcattaatcatcaggaaaatggcaaatcaaaccacaatgaagtatcatcttaccccagttagaatggctgttatcaaaaagacaagaaaacaaaaaaccaaaaaacaacaaatactggcaagaatgtggagaaaggaaactcttctgtgccattggtgggatagtacatccactatagtgaacagtatgtaggatttttcaaaaactacaaatagggcgaccatatgatttagcaaccccactgctgggaatttacccaaaggaaaggaaatcatcatatcaaagagacaactgcagcctcatgttttattgcagcactgttcacaatagccaagatatggaatcagcctgggtgtttaacaacagatgaatgtataaaaaaaagtggtatatatacacaatggaatactattcagcaataaaaaataatgaaatcctggccaggcatggtgactcacgcctgtaatcccagcactttgggaggctgaggcgggcggatcacctgaggtcagcagttggagaccagcctggccaacatggtgaaaccccatctgtactaaaaatacaaaaattagccaggcacgatggcaggcatctgtaattccagctacttggggggctgacatgggagaatcgcttgaacccaggaggcagaggttgcagtgagctgagatggcacctttgcactccagcctggccgacaagggcaaaactctgtctcaaaaaaaaaaaaaagagagagaagaatgaaatcctatcatttgcagtaacatggatggaactggaggacattatgtttagtgaaataagccaggaacagaaagttgaacaccacatgttctcattaatatgtggaagctaaaaaaagttggtcacgttaaagtaaaaagtaggacagagaatactagaggctgcaaagggtagagggaagggagggatagggagatatttattaaaggatataaaattatagctagataggaagaaaaaactcaagtagtctataccactataggatgactatagttaacaatatatagtttcaaatagctaaaaagaaggtattgactgatcctaacccagagaaatgatcagtattttagatgatggatatgctaattatcccagtgtgatcagtatatgttatatgtattgaaacattgctatgtaccccacgaatatgtacaattgttgtcaattaaaaaataaatgaataaaataaaaaagataaaccaacagatttctgattgtcatttactgtattaagtctactagattagcacttctcaaaatttttggtctcagcacccctttacacaattaaatgattgaggatcccaaagaacatttgtttatgtaagttgtatgtatcaatacttactatattaaaatgaaaactaagaaatgcttaaactattttattttaaaaaaattattacatgtttacataacatgtctttatgaaaaataactatttttcaaaacaaagaatttagtgagtatagtgtcattatgttatactttttgcaacttgtttaatgtcctggcataagcatacacacatagattttcatatttgtttactgcattcaatctgctgtgctatgttgttttggctgaaatatttgaagaaaatccagcttacacagatacatagctggaaataaggaggggcatttaaatagctttttcagatgattgtgactctctgtttgatactatgcctaaacttgataagtagtagtttcttaaatcagagctcccagagttttttagcaccaggaaccagtttcgtggaagacagtttttccaccaatggggctgggattgttttgggatgaaactgtgttctacctcagatcatcaggcattagttagattctcataaggagcatacaaccatgcgcagttcacaatagggtttgtgcttctatgagaatctaatgacgctgctgatctgacgggaggcggagctcagtctgtaaatgatcactttcccgctgctcacctcctgctgtgtggcctggtacccagcaggccacgtactggaactggtctaaggttgtttgatatctacttttgaggaagaagtgttaaaatgtccctctatatttatttcaaaacaattcattgtctacatgttggtaattgttgaaactaggtgataggcacatgataattcattataatattttgtgtacattttcatacattaaaatttttcttttaaaaaaggtgtttaaaattattaaatatgtcagtcacaactttatttgataatctgttttaaaagttaatcttaaaatgttcttatgctccagttatgaaaaaaaaattactttgtaggcatttctgtccataactgttgtctggcagtataccttcgtaacaacctgcatgtggactcccagaacctacaataaaagttgaaaaaaagcaaaacaaaatatattgtgttgtcctattaacattataggaacaaaatctatggccaattacttttctaatgactctccatatccttctcttttggctcttgttcttttgaggattattttttgtgggggtgtctttcctagattttctgatctctattaagtcagtatttataaattaagaatcttgctttccctgtatataattattaggtcataatattaataatagtaattttagattatcttccatctattacaggtggttattggagatcatgatggggtagttatgtgctttggcatgaagaaaggagaagcagcagtaagtatagctttgtgaaggggaaaaatggttttctaaaagagaatgcactakttattgaataatactaggttaaaaatttcctaaaatacaggtaatggaaaatgggttctgaggtaagtagttatgtgagatatgagtctgcgggtagcacaaaagtaatttgctagctagttgtaaggcacctttggcatcctgtggtcgtgggttacttttctatgctgtgtaatatattaccccaaatttagggccttaacacaacacacatttattatctaacagtttctgtagcacaggagtttgtgctcaaggtttcacacagctgcaatttagatgtcagctgagctgtgttcctttctagagtgtggggtcttattccaagctcatgtggttgtttgcagaattcagttccttgctattataggactgaggtccccactttattaacatctgtaaaccaggggctgctctcaattccttgaggtctctgcaatttcttgctctgtggttctcttacagtccttctcacaacatggtaatctaattcatcaaagccagcaggaaatttctgtagtctgctaagaaagaatcttatgtagcataatgtaatcatggaagcaactaacccacaaccttttccacttaatttaacctaatcaaggaagttattactattacattatcatatttacagatcataattagaaacttagaatgatgagtctgagatgtgaattctagtattcattatatattatatggaatttccagaaagatgaagagaataaaaactaccagaaactcagtgtttccattattcatattctcccagatatcttattctctgtatataaagtcatggggaggaagtggaggagaagaagctggtgcaaataataaaatggaaaataaccacaaaaaaattaatgaaatgaatattgttttcagttaaatagatatatgattataggtattaagtcatacattcacattttcagtaaattctatagtcctttaactattaaaatttataaaaattgtaaagaagccaggaaagattagttttaaaagatgattgaagtgtaaaaacatgttcattggacctcattaaagaatttgccaaatggacttccctgttcgtaggagtattgttaatccaatgcctctaaaacttcagtaggcataggaaccagctggggaatcttgttaaaatacagattctcattcagttgatctgctgcattttaaataaatttagtgatgctaacattgctgcttagtgaactgtactttgaattacaaggatttagatttcaatgacatcattcaaatatgtgtgggaatatatatttaaaagttaagtatagcaaaaaacctgaagacctgctgaagtatatagattattatctaaaattatttctatatagtggaactataatattttgcaaatttaacatcataacattttctattgtaaaggaaaaaatgctcayaataaagtaatttgtgtacttttttcctgaatgatttttttcaggcagtgttcaagactttaccygggccgaagattgcaaggctggaactgggaggggttatcaacacacctcaggagaaaatttttattgctgcagcatctgagattagaggcttcacaaaaagaggaaaacagttcctctcctttgaaacaaacctcactgaaagcattaaagctatgtatgtcttttgttctcttttgtatttttacatacttatttataatattttggatagatgtgaggcaactaagtatcatatcttaataggctttctggaaaataaaattaactaaaggtattttattagtcagaaactaaatttgacctacaatcaatattaaattggttgttgaaatttttttaaagaactttatagtatttatacaatcatttttgacaacttggttcagtttgattcatgatcaaggtatcaaaaaaattgaaaataaatctagatatttagctttatgttccttggctatttttgatagttctggttttcaggtagcatcattatgttaaaaggctggctgtcaaagttagtgattaccaatagggtataatttcaggtatatcaggtaagactctaagtgaaatatagctccctaaatggctgcctgatatgtgagattttgcaattcagatttgagtttttgaatcacagggagctgaaaagggctttaaaattcatctaattcattatttcttatatttgctacttagaagaatcccttgggccacttaaacaattccttgtcctacctcatacctgccgaatcaaaataaccaggagtaggttttatttttattttttaagttcttcctttgaatctagtgcagccaagttatataatcagccagactcttaggctagaaacaactgattcagcccaaagttttgtataatgcacagcacatctcctgatgtttgggatgtaaaacattggcttggtgaaattagattaaaattaaaccatgataagtggaaatatgtaatttcaaatggtttaacaagaatagtaacacttttgaaatacacttgtatatagacatggccaatgataattatggaatactgaaagtaatgtgttaatagcataactctacattcggacagttatatggatagtagtgtgagaaagatagagagtttctcagtaacagtctcttcaagtggtttcttaaatgtttttactagagtggcaaagatgggatagaaaagttctttactcaatttttgaaaattgattgtctgaatccccacatttgtaaggttttataggaaaacaaaagttataacttgaagatattcagtaaggaaactgaccacttaacattagtcaccacatatcctttcctgcttaatgttgccatgtatccccactcatgtcaacaatagagattgctaaatagtactttggccaatataatgcaratataatacagattggtttcaaaatggaatttaaaattttgaaaaacatagagaatttcatgaaattgataaaaatagtaagaggactattcaatcatatgcagagccacaaagtgaggccacttaataactgaagaagagaaaatcagggaggattattataggataagctcttcagagaataattttaatataaaattttttaatagaacttggaggtagaggaatacatgaaacattcaaataaaattaccctctttatgataaatatggtaataacaacctagaagtgaaaaatatatcacacttaaatataatttttgtcaagacattttagctcacccaagtgaaaactcagttcagtctaagaattagaatatagttatgactattgactaaattttgttaaatgtaatatgaaataaacttgttttcatttcttttttcaagataaagttctaatgaaatctttttttttctgctgtttatcatttagtttgaggtagaatcacttaaaatagactttttcaggcaatttagtgtggtagtaagaaagctaactcgagcaaaaaactgagttgcagtctaatctactacttaatacttaggtgccattaggcaagttattttacattttattattcacctgtaaaaggaataataatggtccttattttatagagttatgatgattaattgatctaatacataaaaatcacttaagatagtgcttggcacatagtacacaaagaagtcattttttgatgtattaattgtctttggatatagacagttaaattatcattatcttgtctttgttttccatttttctgagctcagtttttattgagaagcccgaggccttaacatcctcattttcagctttcaaaatcaaaaacagtgttataccaaaaatactaggaattaactaggagaaagttttaaaaactgtgttctctaagtctataataaaatgttagtaaactgtatacatttttctgtttttatctctgaaaaaaattcagtacctgtgcttatttttaaaaattactattttaatgttctcaggcacatatctggctcagacctctttctcagtgcaagttacatctataaccattattgtgactgcaaagaccaacattattacctttctggggataaaatcaatgatgtgatctgccttccagtggaaagattatctcgtatcacacctgtattggcctgccaggacagagtgctcagagttttacaggttgctgttatttgtatttttctaattttttatattatgtgaaagaatatcaatgaacattatgtacttgagataaattagtggttactgttttaagggcttttataaacatgtggaaacaatttttaaataatttgacatattaatttttttaacttgagtcaaatgtgttsttttgtaagtttttaagagaagcatatttggaagaaaaaggattttttttgcctcaccatacacaatttctgagctattatcagaatggagtactttgactacagagaacctttacctgcctttttgttttgttttcttcttccatcacctttatcttccccaaaaatcaaattaaaggaagaaattgggttggagggaggatgttatataacttgagtttatccagtgtttatggaagtatatggaataagcactcagtaaatatatgttggataagtaaatgagtgatagagggaaaattcattttgatgtccttatatttctggtaaaaaccacgattggctaaaacaactgcttcaggtcattgttatgagtaataatagttaccactatatcttcttgagagtgactttcaataaaatatatgcacacacacacacacacactctataggatgcttaaaataatgtttaaaggtaaatagcatgtaacagttagatgaactgtatcagaaacaggctgatatagttggtgcagttgatgaaaaagttgagctgtgaagtccatgccaccacaggctatctcactctttggaattccatagtcagatggccatttcttggcatcagcccttttgtaaaaggaaaaatccagtgagtctatgaggtttttaccccccagggacaaagtaatgttaaaggttcattttaggccaggcatggtggctcacacctgtaattccagcacttttggaggctgagacgggaagatcatttgaggccaggagtttgagaccagcctggccaacatggtgaaaccctgtctctactaaaaatacaaaattagctgggtgcagtagcacacacctgtaatcccagttactcaggaggctgaagcacaagaatcactcgaacccaggaggcggaggttgcggtgagctgaaattgcatcactgcactccagcctgggcaacagagggagactcyatctcaaaaaaaaaaaaaaaaaagaaaagaaaaaaggttcattttagagttatgaatgattaatttcccccatagcctatgcttttaaatatgaattgttttgaacaaggcttttaacaggagctgtttagcattcaattagaaattgactgaattctaggattctgctttgacaagagatccatatgcttattatttttaaaataattactaaagatctgtagaaaataaagttgaagtctttccctctgcaccgcatgcttttttctcactccccgtctatctctgtgaataatccattactccagaggttgcctctttttaacagttttgtgtatattcttttgtgtttatatagttacgtgtagatatctgtaaattttaatatgatattttaaataaaagataaaacaggctgggcacagcggctcaggcctattaccccagcactttgggaggccgaggttggaggatcacttgactccaggaattcaagaccagcctgggcaacatagcgagacccccatctcttaaaaaaaatttagctgggcatggtggtgcatgccagtagtcccagctactcaggaagctgaggtgggaacatcatttgagcccagaaggtcgaggctgcggtaagctatgatcacaccactgcactgcactccagcctggatgacagagtcagatcctggctcaaaaaaaaaaaaaaaagataaagcatatggctttcttacgttttctaaataaacattaaactttttttagtcctgatgtggtggctcacgcctgtaatcccagcactgtgggaggctgaggcagatggatcacctgaggtcaggagttcaagaccagtctggccaacatggtgaaactttgtctctactaaaaatacaaaacttagccaggcatggtggcctgcacctgtaatccagctactcgggcagctgagacaggagaatcacttaaacccggaaggtggaggttgcagcgagctgaggtcacagcattgcatttcagcctgggcaacaaagcaagattccatctcaaaaaaaaaaaaacattaaaacaaaaatgtcataccatattaactataattttgcaaattgtgttttcttttttttttgannnnnnnnnnnnnnnnnnnnnnnnnnnnnnnnnnnnnnnnnnnnnnnnnnnnnnnnnnnnnnnnnnnnnnnnnnnnnnnnnnnnnnnnnnnnnnnnnnnnnnnnnnnnnnnnnnnnnnnnnnnnnnnntgagtagctgggattacaggcatgcaccaccacacctggctaattttgtatttttagtaaaacggtttcaccatgttggtcaggctggtcttgaactcctggcctgatgatccaaccgtcttggcctccggaagtgctgggattacaggcataagccaccacaccccattttgcaaattttgtattcattgaattatagatcatggatattttttccatgtgagtataagtacttctaactcattctttaacagcatcacaaatactgtgcccaaaatgacaagcattacaagtagcaaaattgaaaaactgataaatatataaggacctaacttgtttttttatctaagtagcaggtcattcagcctctgactggagcagattttgggaatacccaaaggcaaggccaaaattttccttaggaagtaactttgtgtctgttaaaatatttggatgtattccaagttaaagacttccagttaacctagagagggcagagggaataatttgttcctagagacttgataggaaaatctgccagtgtcaagttttcaggcaaacaatgtatttaaaatgtattaaaggtagagaatattttaaatgttttcttcttggtctttacattttatatatatatacacacatatatatgtacatatacatatacacatgtacatgtacacatatatacatatatacacatacatgtatgtacatatatgtacatatacatatatacacatacatgtgcatatatgtatacatatgtgtatatatgtatacatgtgtgtacatatctgtatatatacgtatatatgtatatatttatacgtatatatgtgtatatatgttgttttcaaatcagttgatatatgcaaaattgctaacaaatgcaagttgtattcgtaacctaatttttaaagcaattttattctaggtgttactaagagtactgtatttgaatattgatgttattcatgaatgcctctattattttcagtttgtattctgtttcagtttttaaatacttctccttcagggatctgatgtgatgtatgcagttgaagttcctggaccccctactgtcttagcactacacaatggaaatggcggtaatcaggattttatttttcacaaatcaactatgtgttttaatagtaagtgaaaatgggaaattgtagaaaggacataaactagaattgagacagttgtctttctggtaacttgccagtaactaacagcacgagttattgaacttttaattctccgtttttttcttttttggggggctggggggcagggtctcactctgtctcccaggctggcgtgcagtggtacaatctcagctcaccacggcctcgacctcccaggctcaagggatcctcccacctcagcctccctagtactacaggcgcacaccaccatgcccggctaggtttttggtattttttatagagacagggtttcgccatgttgcccaggttagtctggaactcctgggctcaagggatcctctcacctcagtctcccaaagtgctgggattacaggcatgagccacggcacccaacctagtttcttcatcttaaaattatataatggggaaatgtcttatctcttatagctataaaattgtgtgaatatataaccattctcaacaattaagttttatatctttttatagtactttytaaaatgatatttttacataacaacattttaattttaaagagattactaattgtaggataaatataatatgttgactttaattataagtaggtgactctggagaagaccttttgtttgggacatcagacggaaaacttgcgcttatacagattactacatccaaaccagtacgcaagtgggaaattcaaaatgagaaaaagagaggaggtatgcttttcatgtagttcagattctgaggtgtcaatgattattaagtatcttaaattatataatttattctattttatctatttatactacatagcagayttagcaattcacaccttgatttatctactatttgtttatttgtcaggtctattatactattggcataattttttaaaagtaagaaatgctgatagtaatttggtattgatacgtttttataggctaatatcattttatgctaaaatccaattttaattggattttaattgtctgaggtaatttagttgtttgaggtacagaattaattggaatctgrgagtctttgttatgaggcaaagaagaagtgcagtgggtcagagaatattcctgttttctaaggaatttatacctttctaaggagaatttataactgattaggtagatagtgagatgcctatgtatatgttcaggatgttcatatattcatttattccttcaacaaatacttattaggagagacagagtaaaaacaaataaatacataagacagctttacctagtcacctgaagaaaataaaacagggctgtgtattagagagtgatggtagaaggaggagggtcacttttagaccacgtagtcaaagatagcctcttagaagaggtgaaatttgaactgagatctgattgataagaaaaagagttagcaatatgaagatttggggaaaaaaatgtttcaggaagaggaaaaagtaagtgtgaaagatttgaggtggaggtagatttgattcatttgaggaacagtaggaaggtcagtcagtttggctaaatgcgttaacatggcaggagatggagtcagagaggtagagtagagccaaattgtgtaagccttggaaaacagtttgaattttaatctaggtgctgtaggaagtcattagaaaattgtcagtgggagtgtgacatttaatttactaagcctaaacaaaacaaaggacactggagaatggattggagggggcggggggcaacaggtcaaaactggaagcatggagaccagttagaagagttattataatttattctagtctaggctagcttagtctaggctatcagtagctggaaacatagacaatttcagtatatattgtggaggtagagaagatggaatttgctagcagttttgatatgaggggtggtgagaaaaagaaagaaatcagatgtggcccagaatttttgtctgagcagctaggtagaataatttatggagatgggggaagacagagggaggagcagtattgagggggtatggtaaagaggggaataaagagttttgtttggggtatggaaagttttagatgcagatgtctgtgagaagataccaaattgaatatataagtctggagctttggccagagctggagggagatataaatgtaggggccgttctcacacagattatatttaaagacctggaaatagatgaatgtggatggacaagagaagagcacttgattttggtcaaagtttttttgctcaccattctgagtcggtatgtgtgtttttttcattcytacttggcatatacttgaccataactattagtcttcttaataacttatcacatatctctttttaaaggtattttgtgtattgacagctttgacattgtgggtgatggggttaaagatttacttgttgggagagatgacggaatggtggaagtgtatagttttgataatgcaaatgaacctgttctacgatttgatcaggtaagttcattaaaaaagactatatgcttattatttgtcaaattattatagagatgacagatggtttgaattttattaagtgaaaatatattaaaatcttgtgtktggtttaaaatattgctattttgatgttatcagaatcttctctagacttctcttgtgtttgaataatagactcttgcctttaagcaggataacaaattactttttcattatactttaaaatattattataagtctctaaagtattaaatattttgccttagtttataacatataatgacactttatgggagtaatatttatatgtttggttaatataagtaagtctgttgttttaaaataataagattttaggaataaacttcatattgttaggacagtatcagaaataaccttaagcaaaatgaaaaaagtagcagtttcactcctacccactcaagggctgcctgtattagaagaaatactagataaaagtaattttaattcacaaattttaaatgtaattaaactcatttatgccaagctataaagttacatagagaagcattctggcataaattgaatctttaattttcatgaactagtgttcaccaatccagggcttccctatcctgcctaatataggacacactgaggctattaaacttaaagaaaaaaaagagttcacaactcagtgtcaactgagtctaatttttggtctaatttatctactagtggtacctctcaatcctaactttaactgcagttcagaaaatacaagtggtttgaagcacaggtaaagtatatcatttagaaaatatagggataaaaatgttacacagttgagtttattttatagattggtttcaaatttgttcatcttgttttggtgtaaaaagtcatcctgctaatgatgcaggtaatagtttaggcttagaaataataatccattgttgatgatctcctgctttttctcatcagccctttgagaaactttcctattcagaccccaagtctcctctttgacttttattccaaaccccagaaatgtcatagcatttacctgttctgccaggtctggcactaagaaatcctatcctcttcctatttcttctgtctaatgacagaggtcctgctttcaggttatgcttaggttgggaatactctgcctcatcttggattcacatcgtcactttctatgttgcttttctaatcaggagaagacgtactgtctgacacagtctggactggtagatggttgattaatcaaaaaaggtagttaaggggtgaatcataaaaagagaaaatatgtatactttaaacattgcattttaacttaaacttgtatattcatttgccaatattttgaggaaggaccaagttcttttttttgtaagtttagttccatgttttcttacataaaacttatccatactatattgcccaggatctctaatttcatggttataggatcatttctttctttctttcttcctttctccctttcttccctttcttttcccctccctccctcccttccctccttccctccttccctccttccttccttttttcctttcttttttttttttttcctgctccttgcagaacagggctaccccataggcagtgtgcagagtagccccgatttttttatataagtacataagataaatgaatttcattaaaatgttctattagcaaaaaagggtatagaaatgaacagttaggaaatgaacagtttgtaaaaaatttttgtartgttttccaagtatattgcattaaatatactctttaaagttgtaattaatagttycctgataaaccactcagaaagtgagaatgtgcgtgtttctattggataagtaaaacattcttctgcaagtcaggtgatttccagtgttttgtgttcagtaaattaaaggaagatctaatcaatctctcagatcaataataaacaattttttgaagactttattatacacaacaactggacacttgttaaaaatgcggatatttgaccccacctgtaaatctaactttatgtgatttattataatcaaacctttgttacttgaattttcaggtaattagcctcaggaacaactatcatagcctaatttgcaggatagctcagaggtttgcccccatagggtaggtgaagagtactagaattttgttgattgtccggtttaatgctagtgtcccttccttccactccctcctttaaaacaaaagttctcagccttgcctgctaagaactacctaccagagtttttcaaactgctagtcaaaaccaattagtgtgttgccagtgccgtttttaaaaaacaaaatagaatagattagaacatatcagagtatgacacaaatcttttaagttagatacattgctgtatatgtttatgtgtgaatgtataccagattgtaatataaaatttatattgcttgctttccaaatagcttgaaagccgcttacctagagtgttagttaaaaacacagtttctggcctggcacagtggctcacacctgtaatcccagcactttgggaggccaaggcaggaggtttgcttgagcccaggagttcaacaccagcctgggcaacagagggagaccccatctctgcaaaaaatttaaaaaattagctaggcatggtggtgtacacctgtagtcccagctacttggaaggccaaggtgggagggtcacttgaacctgtgaggtccaggctgcagtgagccatgatcatgcactgcattccagcctgggcaacagatcaatgtcctgtctaaaaaaaaaaacaaacaaaaacaaaaaaccagctccctacaattattttaaaagaaataaataaataaaaaaaaatacagattcctagttgagttacctaagtggttgtcagacaagtttggaaagtactgcttaaaagatggttattataaaccctgagtcatctgaaaaaacttggtttctctccacaatagcagatttcctaaagattccatataggttaccatattctttctttatctaaaaaactattttgagaatacacataagagatggtgtatggaattcagataatagactaaacttaacggggtattttgctttttgctttatgtaatttttttttatttttattttttagacagtctcgctctgtcgccagactggagtacagtgggacgatctcagctcactgcaacctccgccttccgggtcgaagtgattctcttgcctcagtctcccgagtagctgggagtacaggcacgcgccaccacgcccggctaattttttttgtatttttagtagagatggggtttcaccatgttggacaggacggtctcaatctcttcacctcgtgatccgcccacctcggcttcccaaagtgctgggattacaggtgtgagccaccgcgcccagccttgcttatgtaagtttttaaaaaagctttctttataaaaataaactggcggggcgctgtggttcacgcctataatcctagcagtttgggaggccaaggtggcagattgcttgagcccacgatttgaagaccagcctggaaaacatggcaacaccccatgtctacaaaaaaatacaaaaattagcccagcgttgtggcgcgcacctctggtcccagctactctggggcctaaggagggaggatcgtttgagcccaggaggtcaaggctgcagtgagctgtgattgcaccactgcgctccagcctgggtgacggagggagactttgtctctaaataaataaataaactatttttgctcattaggtgagtatatcgttagctgagtggtacccacaaatatactagggtcgttttgaatcttctttcccaaatttaaaaacactgaagtttcctgccatttgttcaagatattttgtctttctaatctgagtgtctgcacataaacattcagtaaatatatgttgaatgtctggagccagggaaaacgttgtgtggcttattttaatatatctgtggattttttagttactaatgaagtgcttggtcttaaacttttttagatgttgtctgaaagcgtcacatctatccagggtggttgtgtaggaaaagacagctatgatgaaatcgtggtgtccacatattcaggtaaagtaaatgataataggtaattgaagaaagagtcaacaacaaaaaaaattaaatttaataaactgcttttgatgactctttttaaaaaacagttatagtagtccccccttattcatggggaatccattccaagacccccagtggaagcctcaaacctcaaatagtgctgaactctatatatattatattttttcctatacctacatgcctatgataaaatttaacttataaattaggcatagtaaaagattaacaataacgaataataaaatagagcaattataacaatatgcttacatcactactcttgtgctttcgggtccttattaaataaagtgaggttacttgaacataagcactgtgatactacaacagttgatctgataactgatttggcttctaagtgaacagtagataggctggtagcaggtatcatatacagcaggtgatatgttggacaaagggatgattcacatcatgggcagaatggagcaggatggcatgagattttatcaccctattcagaatgttgtacaatttaaaacttaggacttatttctggaattttccatttaatatgttcagcctaccattgactatgggttactaaaatgtagaaagtggaatcgtggataaggggaggctgctgtattagtcaatcactcttacttacagcattaaaaactttatggttaaaaaataaggagaaaatgtaggcttcttgatttataaaatagttgatatttgaataatactttttaagagtgtttagcatgtcactcttacctttaagtattaaattatattctttgatttaaagagaagtacttattgagatttattttatgttttggactatgtacatgtcttataaaaactttttttttgagacagggtctcaaaaacttgccaaaacttgcttttgagttggtaatttttgcattctcatagtagtcatgtgagagtttaaatttccatgaaagtaatttttaaaaggcaattcttatttttcagctatttttgaaattgctagactatgttgacttattccatactttaaatctgttaagtaaaagattcccttcattatagtattacagtatttcaggcaaaaaaaaaatgatatcgtgaaatgcttaagtaatttctctgtagtctgaatattttccagcttgattttatgttttgtttttgaatgaagtcctagggttaagttaggctgatattggtggacaaaggggcatgtacattggagtttctgctatacaatgcataatttatctttttaacactagcagtactaagtggtgcgtgattgtaattcatctctacaggctgggttacaggtctgacaacagagcccattcataaggaaagtggaccaggagaagaactaaaaattaatcaggagatgcagaataaaatttcttccttacggtaactttgagttttttatttgcttttttaaaaatctcatgaagtgtgtggttgttgctttttattacttatagatgcagtatattttattggaaggaattatgtaattaattagtttatcaccttttaaaatggaagtttacagtttygagaaaattagcgtaagtgctgattaatattttggagatagaaatatacttttttgtgtgccttattctatattgacattttcttaggtcaagggttgtgtttttcttttttgtgtgtgtgtgtcatagacacttgtgttttattttttatttttcacagacattagaaatcaacacagatggctgtattatttctcattaactctaacgtttgctgttcctgtggacccttctgaatctgtaatgttggcttgtaaattttcttaaccggaactgagtaattttgactcccctagacacaggaattgcttttatggtctgctcaatttgacgtgtgctgtgaaaagggggacctcaaactccaataaaggtgcttcatacaacgaagacgtgggagttgctgaaacttttaatgactgctctccccatttcaacccatgctgaccttttgtggagtgaaggatgatttttttctggtggtagttgaaggctacagaaacttttaaggcagcaaatgccacaagtactagtagcacaagccgtttcaccaaagccaccagagagcaaactgtaatgttcatgcaaacaagtataccagattcattcaggatatcctacttcatgcaacaaggatacaagtatagttaatgactactctctcacatcctcaatacattaccttttttttataaccaagtctaccatttcttgattccactggaatgtaagctttatgagaagcttatatctgatttgttcatttgatacccaaacactgctaggtacataggagtaaatatgtaatatttagcagtaaatatttctttgatgaatgaatcttttcctttgttcattacacagatcccttctaagctcctccctagacttttcctcctaaactgtggctagttaagcctcatgttgttctatcccaatgactgtttactccatttgcatgtggcccttccccttaactggagctctaagcaatgctgtagttcagtctcagcagaatcctctctaactcttggtagttaagccataccactggctcatgatcatccttgtggtccccaaaatgctaatgctctgcagcttcctttttattttttatgtctcccctaatgtcttactgaaagttacgtgtttactggcttcacacattttgtctcttttcattaagactaatatgttctgcaatattagtttctcttctcattagtataagaagtttctcttctgattagtactttatgtaactgtaacaagattcctgtgttaagattattttgtagcctaccatgatatttaaaactctctattaatattgctagtatgggaatgagtagatattttaattttggggttaaggataaataatgtggaatcatttagtcagtcatagaagcaaaaattttgctccctttgtttttattttattaactcaaccaataaaaacccattttgtaaaagcaaatgtctcaaatttttgtaaacatcctaacgacctcaaatgtttatacttatatttgacaaatttgtatgtgtttttctccaggaatgagttggaacatttgcagtataaggtattgcaggaaagagagaattatcaacagtcttctcaatcaagcaaagcaaaatcagcagtaccttcctttggtataaatgataaatttacactaaataaagatgatgccagttacagccttatcttagaggtacagactgcaatagataatgtcttaatacaggtaagcaaaatgtctaatttcttagttttatgactggatctattttgcaaaccagtcatatgtactaattattattgaacatttttagttttagacagtaattttattttatttttatttttatttttatttttttgagacagagttttactctgtcacctagactggagtgcagtggtgcgatctcagctcactgtaacctccgactcccaggttcaagtgattctcctgcctcagcctcccgagtagctgggactacaggtatgtgccaccacacctggctaattttgtatttttagtagagacggggtttcaccatgttggccaggctggtcttgaactcctgacctctggtgatccacccgcctcggcctcacaaagtgctgggattgcaagcgtgaaccaccccacccagtcatagacagtaattttaaatgtttatggccttttattcttcctttagataattggtttgctcacagattatttgaattatatttttactttttatttatgtacttaacaaacaaaagatgggcttcagttttaagaagagttagaaaagacagtaaggtttttcttctttggctaccctctgggagaatcttaacagagatgtgacttagaaaactaccatatttaatgcccttgctagaacatttttttttaaagccccaaacattaaagtacagcttgctcattaacccaacagtttctggtaggtcaacaggcaaagtagagaatactaaagggtgaaatttagggataataatatatgactccattcatcaatgtatatatttactgacttatttaaattagaaggtattcaggaagtagaaaagaataataggatgaatagaaaacaaacaaaaggtagtaaaccaatcacaaaatgagaacataacaaattggaggaagaaaaggtttaaaaagatgtaatggagagatcagattattaaaaaaaaaaacctaaaggcagaaaactctcttaagtaatgctagctcacrggctgttgcattgaacaactctaggaatgccattcacataggacagtgcaacagctttgtcctacaaactgcctctccagaggagaccaaaaattatcttctttctgtgttacaggtaaaattaaaactgataaaaatgaactgatacaatcagaatggccatgtgattatttatagctcatggtaacatttttagcactttataaaaataagtgggatgattggacttttaagggggtggtgagagatgttattctgtgatttttataatccaagttagaaaaaagcaggtgattgtaaaataacatttattctttattatatttattttctggaagtatatactatcaagtataagttaagagaattcatactctcaaatttaaagatgaatataaactagaactaaggagaactcttagagaaaacataatttatgaacatttttaggttttccatctcaaccttctttttttttaatattgactatagagtgatgttccaatagatttacttgatgtggataaaaattctgctgttgttagctttagcagctgtgattctgaggtgagtaaaaatataaaagaattcttcacatgctttcatttctattatgccattttgattaaagtctatagatgctgctaggttttgatgtttctttttcaattatttcttatgtaacctttccttcaaaatctgtgtcggttctctttccctgtcctcagtcgagaaacctgatgtcctagattccttcttttctgtgatctgttacaggttgatatcccttatgtgaaatgcttgggaccaagaagtattttggattttggatttttttcaggttttggaatatttgttttgtatttactggttcagcaccccaaatttgaaaatctgaaatctgaaatgctccaatgagcgtttccttaaagtattatcttggcactcaaaaagtttagagttttggaacattttagatactcagtttgggaatgttcagcctatatatccaattagtcactagtttctgtcagttctacctccatggctttcatacttccacttggcttcattcctacccctgttaacttagtccaggcccttatcatgtcttgcttgaactactttataagkttctctgcctctagtcttgcctctgacttctaggatatgctgtatgtacactaccaccagagacgtcttccttcctaaaacacgaacatcactgtatctttcttttctcaaaaccttttcaatattcctgatttcctgctagatataaatatagattccttattgtggcatagaaaactttccatgattcagctcttgattacatctctaacttctctctcaccggctgctaccacccctcccatgcacattatttctgccaaactgaagttcttaaaattcctgaaaatgctatatagtttcacacatccctgcattggaacatgatctgttgcttcccccgctcttcctgccctgccccactttttctaggcttgttgaatgcatactaaacttcattcaacagacttttattgagcacttaacgtgcacagtacctgagatgatcacgtcagtgcttttggacatgcttactgtatcacttctttctgcttagtactagccgataagcagtctcagagctaggtgtgactcctgaagagaagtcaaggtatagataaggtttggattaattgcattgtagaaggcaagccagagcaggaggagatggtaactggagttggtggttagttatattaatatatattttattttatttatatgcattggcactgttgcagaatatattttatttatttggtttttgttatttatttacttttttaagacatggtctcgctctgttgcccaggctggagtgcagtggcgtgatcatggctcgctgcagcctcgacctccttggctcaagcagatcctcccacctcagccttccaagtagctgggactacaggcacaagccaccatgcctggctgatttttaaattttttgtagagacagggtcttcctatgttgcccaggctggtctcaaactcctgggcctaagtgatcctcccacctcagcctcccaaagtgctgggattataagcatgagccaccacgtctggccttatatatatatttttaaaaaggaggaataaaagagtagataaagtaaaatattgatagataaaagaataattttctttttctttttttttttttttttttgagatggagtctcactcctcacccaggctggagtgcagtggcacaatctcagctcactgcaacctccgcctcccaggttcaagcaattctcctgtctcaagactcccaagtagctgggactacacgcacacgccaccacacccggctaatttttgtatttttagtagagatgggtttttgccatgttggtcaggctagtcttgaactcctgacctcaggtgatccactggccttggcctcccaaagtgctgggattacaggtgtgagccactgtgcccagcctgtttttcaatataacttcatagtaaaaattttatttttaataagcgattttataacagttgtattatattatcaatatgtggtttgtcgttcctgtttgagaacaaaacacaaaagatatggcctacatttttatgattatttagaaaatcagtaaacttaaaacaaacttaaaatctttgattcttaagttactatgaaagattaatctgttttaattacatcactgaaggattctttgaaatgactatttgatactaatttaaaatatattttctaggacaatggctttaaaaaaacgtatggaggtttcaagtatacacaaaagtagaaagactagtataataacttgcatgtacccatcactaattttcaacatatggttagtcttttttttttwaaaaagatgggggtcttactgtgtcacccaggctggagtgcagtggcgtgatcatagcttattgcagcctgaaacttctgggcttaagcttatcttcttgtctcagtctcctgagtacgtaggaccataggcatatgccatgatgcccagctaattttttttattttttattttttgtagaaatggggcctcactttgttgcccaggctggtcttgaactcctagcttcaagctgtccttccaccttccagcctcccaaagtgctgggattacaggtgtgagccaccatgcccagcccagtcattttttcatgctcttcaccctctccttcccactcccaaacctcatcccaaacatgttatctgtatcatttattgataaacactgtagtatataacgtttgcttttaatcatacaagaacacatttacggcttggcaccgtggctcatacgtgtaatcccagcactttgggagcccaaggcaggtggatcacttgaggccaggaattcaagaccagcctggccaacatggtaaaacaccctctttactaaaaatacataacaagtagctgggtgtggtggcatgcacctgtagtcccagctatttgggaggctgaggtatgagagtcagttgagcccaggaggcagaggttacattgagctgagatcacaccactgcactctagcctgggcaacacagcaagactctgtctcaaaaaaaaaaaaaaagaatatatttacttttaaattgatcagtcctctctgttgagtttaaatgatttgaaattgaaatgtttgagttttatattttatattaccatcctttttatttctttgattatttaataaaaatagagaaatagcagtctcraaaattacatataaattatcttatgttgctgtgtctctttttgtaatccatgaacctagctacatttctctatttctagtagtttaatattcaatttcaagaagttataatatttgaaaaaactcctctaggttagttcaacaaacatgtattaagcacttacagtatgccaggcactgtgccatttgctgggaatacagagaagagatatttctctttcctgtataagtatttgtgaaaaatctaagagattcaatattaaactctggtgtatgtgcctttacagtataaacattttgtattagtccattttcacactgctgataaagacatatccaagatgggacaatttacaaaagaaagaggtttattggactcacagttccacctggctggggaggcctcacaatcatggcggaaggtgaaaggcacatctcacatggcggcagacaagagaaaatgagagccaagagaaaggggtttccccttataaaaccatcagatcttattcactaccatgagagcagtatgggagaaaatggccccatgattcaattatctcccactgagtccctcccacaacacatgggaattatggcagtacaattcaagatgagatttgaatggggacagagccaaaccatatcacatttggtgtttgcattgtcagatttttagaagaattcttaatgtttaaaaatgttattgtaaaaactcaagatggaaagagcatgagctttcgataggaatttgaattccagtttcatcacttaatggcttttatttaactcctcataacctcagtttcttcatctgttaaaatttaattagtaaaacttartgcatagagtttttgtaagtgtaagttagaacatgtttgaaaagygctgagcaccaatgacaggtgcttaagcaaatggtaaccattattattattgatgtcttttttttgttgctaaaaacatggattcattcttttcctccactttgtattcttcccagtcaaacgacaacttccttcttgccacttatcggtgccaggcagatactacaaggctggaactcaaggtaaaaatattagaaattacctttacttgaatgtttgaatttcctttttcctgctggtatgtcttacaacatatgatattatttgtttgcatttaatttctccctgaaatgaattgtttggagtaatgaattttgaatgaccagttaggatgtaatttagcccacaccacaatctctgctattacttcttaatcaccttctctaaaattattgattttattttttaaatagaaactggattttgccatgttgcccaggttggtctcaaactcctgagctgaagcaatccacatgcctcagcctcccaaagtgctgggattacaggggtgagccaccatgcccggcctaaaattattggtcttaaagtttcctctaactgaaaaatttttttcaaattttctattatagaaagtttcaaacatttataaaagtaattaatccccatgtattaatcacacagcttcagcaatgatcaactcatggccactttatttatgctattcatttactaccctaaaatattttgaagcaaatacaagatattcataatttcatttaatgtgtctaagataggtactctctttttttaaaacataactacaacactattatcacacctaagaaaaatcaacaataattttttaatattataaaatatttaatgttcagattttactgatttttgttttacagcttgtttaatccagtcatcttttttttttttttgagatggagtctcgctcttgtgctcttgtcacccaggctggagtgcagtggcatgatctgggttcacygcatcctccacttcccaggttcaagtgattctcctgcctcagcctcctgagtagctgggattacaggtgcccaccaccayacctggctaatttttgtactttttttttttttagggacrgggttttgccacgttggccaggctggtcctgacagtcatcttctaaattaacttagttattaaagtatctgggcattcaccatatattttcctaccatctgaattttgctgattgcattccagtgatatcatttattaccatacattctagagaaaaccttttaaagttttctctagcaatttaatgacatagtcattttcataattaaatacttaccatagcacacaaatctgttttagttatttatagtgggattagttttgatagacctattatctaaaaattaagcactataacttttttcctggtgttgctgatgttttgaaactcaaaggtttttttttttttttttcaagagagatgctgttacacaatatttgtttcacatctggttaaggaagttccagttaaatatgatttttcccctaaacaattcattttggtctgcatacattcccttttatgtactttgaaagaaaaatggaaaactaggataaatttatttctaaaagaaaaaacacatttaaacattttacattgagcaagtttctgctaataaattcaaaagtcaagtaaaaattgattaaaagcaatgtttctctttttttttttttagatggagtcttgctctgtcgcccagactggaatgcagtggcacaatcttgactcactgcaacctccacctccctggtacaagtgattttcrtgcctcagcctccctagtagctgggattacaggcgtgtaccaccatgcctggctaatttttgtattttagtagagacagggtttcaccatgttggacaggttggtctcgaactcctgacctcagttgatccacctgccttggcctcccaaagtgctgggattataggtgtgagccaccacgcccaaccgtcttcctctttttttaattggatatactaattttaatgtatagaagaaagacaaaatgcctgaaaagagccaagaaaattatgaaaaagaagaaaagtaaggtggaacttgctttgccatatgataaaacataccataaaactaccataataaaaataatggaggatatttccaagcctaaataaataggccatgcaacagaataatctggaaatagaacccagaatatatttcacatttatgggaatttagtgcatgacatttctattttaatagaagagaacacttctattaaatcactatttctatttaaaaattgctgttggcacaactggcatccatctagaagaaaattaaatgaattattatcttaagccatatataaaaaataaattcagatgaattaagtacctacttatttaaagaaagaagacttcattgtctaaccgataataggtaattgtcaataacatataaacagcctactgttacaataaaaaccaccgagtaaggaaaataggcaaaggatatggataggcaagtcacagaagagaagattgggcacagtggctcacgcctgcaatcttagcactttgggaggccaaggcaggcggatcacttgaggtcaggagttcaagaacagcctggccaacatggtgaaaccctatctctactaaaagaaacaataaaaaaaattagctgggcagggtggcacacatctgtaatcccagctacttgggaggccgaggcatgataatcgcttgaacccaggagacggaggttgcagtgagctgagattgtgccactgtacttcagcttgggcaatggagtgagactctatctcaaaaaaaaacaaaaaaaacccaaaacacagaagagggaatcaaaatagctaacaaacaaaaaagttctacctcatctttagccagagaaattcaaattcaaataacaaaaagcagtttcttcttatccaacagattggcaaraaatgttaaagaacaacatcactagggggcaaggatgaagaaaatgacactgtcagtcatagctggtggaaatataagttgttacagccacttaggaaaatagatattagctcctttgggggaatctattaatggcaataaaatagcagtaatatacataacagacatgaatataattaattgcagcattgcttgtagaagcagaaaagtagaactaaggtgaatactcattaatgattgaagggttgaataaatagctatttatccatatcttggaatattatacagctactataaagaatgagttgatttatacatgttaacatggagggaattccataaaacacacaaaatgctgataaaacctctatgtataatttgaatatatttttatctataatgatataaatatgaagaaatgtatgaaaagaaacacacctgtctgatatagccagttatacaatatgaggaggcataagtgggatgggaggagcagggaggtgatggtaataggagaggcagagataagggggaaaatgtgaatattggaaatgaaagcaaagatgtctgatatccagtagaacttagtcatgtgaaatgatatattaaactaggtccttctcttaaattagatcttcctagcttagtgaattactatttcctgttaagtatgttgaattctcaggatatccggccagtcatattcaaaatagcccaaaagaatttccagtccaaatatgccatagattataggtatgcatctctattttcacagaatgtcaacaattaagttatttgaaacaatttttctgtcaatagatttttataataacagctatatgctaaatactctctttttttgtacatgtacgtagagagacgtatggaagcataactaccaaagtagtaatagtgatcatctggggtgggaggattgcaggtgacttacatgtttctccagatttttctttattgtttgaatttgtgaataaggaatattaattgttatactgattattacaaaataatttttcatataaaattgttatgtcctatattaaagctttttttcttatggaaaaaaatctctgccaatatgagcttattactgtttaaaaatcaacaccaaaatataagtttatcagatctattttttgttttctttctgtacttattatcttttcttatcctcttccttgtcagcaatattcacagtgcaacatttgcaaaaaatcttgcttaaacttttaaaatatttcccacttaggtcaaatgttgatattttccccctcatgccatgaaaagtatgagttaaagtattaattagattagagaagttacctttgtgtagtacaagatgtactacagtctgtcccatgaattggaacagagtgggacaggagaaagaagctggacagctttccaactcctcttaaattaggtcttcacatattagtgaattttaagtacttgataacttatgytgaacattctaaagatatgttttgttgctaaatattcttattttatttcctcttttgtgttgaatcagattcgctcaattgaaggccagtatggcacactacaagcatatgtgactccaagaattcaacccaaaacctgtcaggtccgccagtaccacatcaaacctctttcactccatcaaagaactcactttattgatcatgacaggtaggacaaaggaaagagcaaattmtttttaggatattacacaattcaaatagacctgttttttatttttatagtgtaaattctgttagcaatttctacttttaaaaattaaataaacagtttaaatattatagatttaatatttccaataaatataagattctttgtcttattttagaggctggtttgagttggactttcccatctttctcatatattactattctgggattattagaatagcagttctctttctcagatacttaatgtgagagcaaatactgtttaacctttagatagtataatagttctctgtgaataggacctcattgtatcagcctcaaatattatatttcctttatatttcttctcaggataaagaaaaatcagataaagcaattggttgtgatagtgccttttatttccatgccaacttaggcatccacttctttgtagtttttcagaacatgagcttaaagagaagggaaagagatgaacaattactgattactttctttgtgccatgtattatgctaggagcttatgtagtatttaattcttacagcaagacaggtaataatgtctccattttacaaatgagaaatggaggcttagaaaagttaagtaacttgctgataaaaggactaaagctatgaattgaagccaaaacccatattctttatattgctgcctataatttaaaatatataatttmaataagatgtaagacagactattcctaaagaagattttttggaaacatttaagagaacagactctttctgtcttgcttaaaagtcaaggttgtactaatggaggcagcatggtatgctagaaagaacagcaaattgggaatcaagagacttggattacaatctgttcctgtctgactttggggggataatttaatttagcctctaggttttagttttttcatctgcaaatgacaggattggtccgaacttttcatttcataaactgcattttcttaactctttataattatccatctgatttattttaaattagatttattttacagtttttttaatgytactttagggtgtgcttttgcaagatagaaagtatgatcccatatttcaggaagatagaaggtattattctataagttgtccratggcacagagctagtaaataatggaacaacccatgcctgtcttactcaaaagcccaattctttgccttcacactatactgattatttccctaatgagatccttgtataagtatgttttgtagtttatgtagtagaaatactagataagcttttttaaaatgagggctggacgtggtggctcacacctgtaatcccagcactttgggaagctgaaagaaaaattgcttgagccctggagttygagaccagcctgggcaacatagtaagacctcgtctctataaaaataaaaaaataaaaaaataaactttttaaaaatgaaatatacccaaataaatgaaattttatttgaaaagcatgttataatgaataaaacctgtttacatatatcacttaactgatacttagcacaggtgcaggtataggtaagtgttcgattttttttcatgaaattgaaatgttcatttatttgacgtataagattaatctgagaaaattgaatgttttcatttatatttaacaactattacaaaattctgcttattaacgtgtacatataatactttcatgtattcccacacataaatgtgcgcctctactattatattacagacccatgaatacactgaccctaacaggccagttcagttttgctgaagttcactcctgggtggttttttgtctgcctgaagttccagaaaaacctccagcaggagaatgtgtgacattttactttcagaacacctttctagatacacaacttgaaagtacctacaggtaaatctaacttattactggttcacaagtgttgttttatataaatgtagcttctaagttttcctttaagttaggagttatttgtgagtaatctgattgaaaatctatactgttcaagataatctattgaaaaatcaaattagtaagtttagaaaagtgattgagtaaagatgtatatgcaaagatcaatatatttcctaagttcccaacaataacaataacaataactagtgagaaaataaattatttaaaaagagcccttcagagtagcaataacaataacaaaatagccagataaaatctgtaggaatattcttaattagaaatatgtagaagttacatgaagaaaactgtaagattttattgacataaacgacttgattaaatggagtaatatattctatagtcatcaatatgaagacattgtaaaagatgacagtcctacccaaattgatttgaatatttatcctaattccaataaaaactccagttgaatttctttatgcacaaatataacatggcttagaacttcagggcttagaaaatgcaggctttttgtagctatcctgatatggtgcggaggtcattatattgttctatacgcttctcaagcttctagttgcacccctcgctcctccaccatcacttctaactcatcttctataagctccaataattcctctcaacttctcaatatagtagaaactaaacttttccttcctttttttaacctgtctctgaatgtgaaatggcctacttcttgggcaaggccaatatctctacctctacccattaagcttggatcctcctgcttcttcaaagtctttgcattctcattctcacatctgtaggttgttttttgtttttgtttttttgttgttgttgctgtttgttttgtttgtttgttttgagacaggatctcactctgtcacccaggttagagtgcagtggcatgatctcggcttactgcagccttgacctcccacctcagcctcctgagtagctgggaccacaggcatgcaccaccatgcccagctaatttttttattttctgtagacagggtttcaccatgttggtcaagctggtctcaaactcctgagctcaagcaatcctcctgcgttggcctcctaaagtgctgggattataggcgtgagccaccacacctggcctgtaggttgtttgttttgtgtgtgtgtgtgtgtgtgtgtgtgtgtgtgtgtttttgttttttttgctttgtgttatttgtctgggagagagctcattattctttctctgcctctgcctcttaaggttctttccctaagcagattattgtggttttctcctaagttctaaaaacttagcatggtaaagtctcaactagagagcaagaagtagaatacctcttgcttctcttgttattttaggataataacagtattattctaaaaacataattttacctcagaattcagccttttagaaccaagaactcttcagaaatctaattggtttttaacatccattctgtggaggtttttcactgtaccgtccaaggaagcttatctgtgtctaaacctgtaataattactcccattttgaagtaccacaatgaacctcacacattaatcatagcagacaattcaacatgcccctagcatattatatacttttataatagcagacctttgctcttttatcattctgtgtctttgagtattttttcttaagattcaaaactgtttatcctttaaggtccaacttaatagctacttttttttttttaagagagtctcactgtgttgcccaagctggtctcaaactcctggcttcaagcaatcctcctgcctcagcctccccagtagctgggattataggtgcaagctactgcatcctgcagtagctacatttttgaagccttctttgattctcccttgattctcttctctgtttccatagcattttttcttacttgtctgtgatatttattgttatctgcttaaagtatataataattttttattttttattttattctttttttgagacagagtcttgctttgttgccattctggagtgcagtggcacgatcttggctcactgcaaccgccacctcctgggttcaagtgattctcctgcctcaacctcccgagtagttgggactacaggcatgtgccaccacgcccagctaatttttgtatttttagtagagactagtttcaccgtgttggccaggatggtcttgatctcttgacctcgtgatctgcctgcctcagcctcccaaagtactggtattacaggcatgagccaccaagcccggcctctaataatttttatacaaacttatttctctaagttaaactttattttcatggacagtctaattttaaatatctttgtatgtagcctgcaaggacctaaaacatagttttgcacataataggtactcaacagatgtttttcggatgcctgaataaaatatatgtgtatggaggtagtgtagaagtatgtgctttggaggcagatgtactaatgtttcaatcctggctctgtgacttaccagctgtgtgaccctagctggttgcttaactctctgaacttcagttttcttttctgaggaatgaaaataatagcacttactttattgaattgttatgatgattaaaagaagataaccatttgagtcattctatagtacctggcactatgtgtttactaaatatcatctgttaagattaaagactaatagaaatgtcatgatttctaaaacataattgagatcaaagtagtaagggtgtattatttatctttctagaaaaaaaaattatctttttttttatttgttttgagacagggtctcactcatcagcccaggctggagtgcagtgtctcaatctcagctcactgcaacctcctcctcccaggcccaagtgattctaatgccttagcctcctgagtagctggaattttaggagtgtgctaccacgcctggctaatttttgtattttcagtagagacgggtctcaccatgttggccaggttagtctcgaactcctgacctcaagtgatctgcccgccttggcctcccaaagtgctgggattacaggcgtgagccaccacaacggaccaaagcaattatcatttgcatatagctagttggtatacatcatttgtgtgtgtgtgaaaaccaaatgaaaaggtaacattaactatatgaaagatgatatatattaattaggaaacttggtcatcgtaaaaaggaaccaaatgcaagcagcttaaccaaataaaataaatttatcggctcacataacttaaaagtctagcagtaatctgcctcacgcacaactggatcagtggcttaattgatgtcatcaagattttatcccttgttcagttctgcttttatcttttcttggctttaccatgcagtgttatggccaccagcagttcctagaatccagtcttacatattttcagctgctatagagcttctcttgcccactggctccaataaaagtcccaggattgagtatcattgttaagccatgaaccactgtggtcaggggtatggaatgtactgctcaatgcttcctcctgaagtcccagaaatagactgagaccattgccactgaaactgaagagggcaagagaaagaggagtggtaccctaaagaaaaataacgatcctggccgggcgtggtggctyacgcctgtaatctcagtagctcatgcctgtaatcccagcactttgggaggccaaggtgggcggatcacaaggtcaggagatcgagaccatcctggccaacatggtgagacccccatctctactcaaaatacgaaaacattagctgggtgtagtggcatgtgcctgtaatcccagctacttgggaggctgaggcaggagaatcgcttgaacccagaaagtggaggttgtagtgagtggagatcacgccactgcactccagcctggcaacagaatgagactccgtctcaaaaaaaaaaaaaaaagaaaaataatggtcctctgaccataagcagtggcattggatgctgagcatgaaaaacagcagatgtcactctttcatatttgatatcagatttcttttaaggataaagcatatagtcacactgtaatttgtgtgattacatgaaagaaaaacatacttatgtaagtaagcaattctaagtgcattttatatatgtctatatatgagactagctgttggaaatattagtgaaaaatgaagataaaagttgttttaaatgaagtttttatataaattgtcacatctttaggaggcatatatcttgtttagttttacragtatattcagaagctgaattaatataacagtaaaggattacatgtttaaatttgctttatattaatgatataygtatacagaagaaatctacagtcaaatgaaatctatactctaagtactaatcataaaatatatatgtactggacaatttccttctacagctattcttttaaaaaatatattaattttatagaaaaggagagggagtttttaaatctgacaacatttctactatctccatcctaaaagatgtgctttctaaagaagctacaaaaaggaaaattaacctcaacatatcatacggtaaacaaacaaaattaataattctttctgatgtttattttgtgttgttgttacattattaatgtttctgatcaaagtgatttatctaactgcatctggtcaactccttctagagataaatgaagtatcagtcaaacacactttaaagctaatccacccaaagctggagtaccagttgcttttggctaagaaagtgcagttaattgatgctttaaaagtaagtacatgtgtcrtcgtggactggtgattattatttgaagtcataggatttctaaaattatcaatactttaacattacattggattgaattttgaatattaaggtgcttctgtttttmattttaaataggaattacagattcatgagggaaatacgaactttctgataccagaatatcactgtattctagaagaggcagatcacctacaggaagaatacaaaaagcaacctgcacatcttgaaagactctatggttagtggaccattctagaataccttgccatatttcttttcaactggctatttcccaaggatcatgtaagagaagctgggcagaaagataaaaagattacatcagtcatgattcatgaaccagtcatgaatcagttgacaacaaatttattgcacagaatatttctgtattttgtcaagctacttttaatatttaattcttttacttgataaaatgcaagtatattaagaaataagtatactgtgatgaattaatctatatatatgaacaaacctggtataaaatgaatgtaatctatgaacctktagagcttagactgtatttcacacaaataattgtcatgttttgttgctattgtgaattataaaaatgcagcatttaaaatttttaaggcaaaatttaataaaggatatacagtatttgtgttgtgtcaatttatagttcaaaactttggtggtgagaagctgaatgtttcacaaattgtattgaaacagagtaagggaggtgaggagagggaaagaaggagtgaggaaggaagaaacagcttaagaaaaacaattttgttagcaatctttacataagacctgttgtatatagcacactatttacactgtcttcataatcaggtgagatatttaatccttacaatagctctgcaaggtaggtggtattatcttcatttttcatatgctttaactgaaatctgagtctaaggaatttgttgtcacctagcaagttagtgatcatgcctgcattagaatcttctcaccccaaaatgcatgccttttacactatgccaagccttccatagtcactgtagagccaattggtatcactagtacacatggatccttaagcctgcctactgaattttttattacatatccagagactttctcacaaactgtagctatatttaatgtcttaacctttattacatgacaagcacatgatctcttttatccttataataacttatgagattggctgtayataatatcactgattgcaaaatccagacagctttgtaaaccaaagtttttttcataaataatttgacagcaaaatcttgacttaatctgaattaatttaataacaaaatctgacttaaactgacatgaggttttatatatattttttgtttgtttgtttgtttgttttttgagacagagtctcgcttggtctcccaggctggagtcagtggcgcgatctcggcttactgcagcctctgccccctgggttcaagcaattctcctgcctcagcctcctgagtagctgcgattacaggtgtgcgccaccatgcccagctaatttttttgtacttttagtagagacagggtttcaccatattggccaggctggtctccaacccctgacttcgtgatctgcccacctcagcctcccaaagtgctgggattacaggcatgagccaccgtgcccagcccaaggttatatcttttttattccacttagtgcaaatattcatccgtatattttgtgccagaaatagtactatgttttgctattggatgctgctactcagtccccttggggttaataccatagtatattcctttcattatcttcctaaaataggaaaaattctgaaatacatcttgcatcaagctttttggataaargattgacagcttgaattattcctgttttacatatgagaaaactcaaggtgaaatgatttgcccagatctttgaacctaggactatttgccttcaagtcaaatcccaagaatggtcaacatataggtggaatattttaattcagataagctgttaaaaatagaatctgcctagactatgtcaaaatggtcagcttggtggaaaaaatataccacttgttgtgatgttatatatactgatagcagttcaaaaatggccagtagttgattgtctgaattaatagcttgtaatcaattgttaagagggttattaggcagatgatttatatcttgaaacttgttttaaaatccccccaaaatgactatttttaaaaacatggcttttaggtttgtgtatgttaaatcatggaattacaggtgcttaaaaatagattatcaagcaattactttagtgaaatactgtgtcattaaatataactaatcactgacaggaaatttatgttttttctttaaaggcatgatcactgatcttttcatagataaatttaagtttaaaggcaccaatgtaaaaactaaagtaccccttctattggaaattctggacagttatgaccaaaatgcattgatttcattcttcgatgcagcatgacatacaaataaggtaaagtcccaaagaagtggtctgtttaaatgaaaaatgttaaaagagaattagaagttaactgtgtatgtactttaatttcaaatgcttttttatatctaaaaatatttgagatataatggctttttaaagtaatgcttctatttcttttgacaaattgaactttctaaaactaaaagagtctttttatttttaaaacacaagtagaatgatttaaataggattttaatgaatttttggcaagtggctgttttaatttttaaattgagaagtaatatgtggaaaattaaaatatattcaaatgtattacaaggtacataaacacataaacatgtagaccgctttataggcttcaaaatgtatttttatatattaccttatttgatcttcacaactgttgtaaaatwtgtcaaatcatataagaaaactgattctcagtgaaattttgtgattaagaggacatgctaatattttgtaaagctgggaccagaacccaagtactggtacttgctttgtgtcctggttactatgtatgttgccagctagtggaaataacctaccaattgttttttctaggagataggattgatttgcaactgatattccttttgcttggtagtgttttatgactctgctgcagtttgtggaaatgctggacttggctcagtgctataaatygtagccaggaaataagaagagcttacacagagtcgggggatcttaattagacatgctgtaaccagtggagctattcagcgtgcttcaagtgaagagtgcagaaatagtgatgccatcttagattttcctacactagtatcttctagatctctttttatcatatatgacattaaggctacagaagttttgtgcattaatcttaattcatatttattaatttcaagggaatattgaaaggytttaaaatggcatacagataatggaaaataagctttatgtttcaagaagggcagactcacgaattttttagaaaacagtgcttcttaatgatatgctattatacttattagttatgtgcaagctttgtatattcttatatttatatataaatataaaaatttgttaaaggcacgtatagttaagagagttttattttaataaggtcatattgtttttactatgtttaaaaaactttacttctgaaaggaacataattatatctaggtcactagaacgtcattgtgttttttgttggttgccacagcttggggaaaaatagaaaaaaattaatgactgtatttgaatattttgtaatgcactgctatttattatatatatcaacagtagttcaaggtgccatcttaaattaattgcatcttcattaggaaaaataaaaagcataaaacacaatttctggttactatgaataaacgcctaaatgttaagatgacattacagtcttgacacttgagtactgtattactatgtgagctccgtgttaaataatttatgcacattatttaatcctaacaaccatatgactgtagttattagtccctattaacacataagaaaacggagaatcggagatactgaaaaacgtgccccagattttagacctttggaaaaagtcacttaagctaactagacgtcccagagctaaaggctgggcaacccaaatgatagtcgccaaagtttaattccgtttaattccctaaaaggcttagagtcagccttcggacagcctcgctcactaggtggctcagcttaaaataatcggaagcgtcgggccctaaatcctacctctccccgccccgcgcaggcgttttctcccgccccagccagtttgtttctccctcctgccccgcccctgctcagtttcctttggtttacccttcactcgcctgcgaccctgtcgccttgaatgacgtcaaggccgcgagcgctttcattggtccatttcaatagtcgcgggatacttgaactgcaagaacagccgccgctccagcgggctgctcgctgcatctctgggcgtctttggctcgccacgctgggcagtgcctgcctgcgcctttcgcaacctcctcggccctgcgtggtctcgagctgggtgagcgagcgggcgggctggtaggctggcctgggctgcgaccggcggctacgactattctttggccgggtcggtgcgagtggtcggctgggcagagtgcacgctgcttggcgccgcaggctgatcccgccgtccactcccgggagcagtgatgttgggcaactctgcgccggggcctgcgacccgcgaggcgggctcggcgctgctagcattgcagcagacggcgctccaagaggaccaggagaatatcaacccggaaaaggcagcgcccgtccaacaaccgcggacccgggccgcgctggcggtactgaagtccgggaacccgcggggtctagcgcagcagcagaggccgaagacgagacgggtaaagggatgcgggatatctgcaggagggtgggtcgagcagggtttggcattggcttagcaggcagagaagagtggcgagaaggcatgtcctgggcttttggaagggggccagggtctggagtgcagttggtgctggtgtgtggtttgccacagtaggagttctcccatattagcatcaggaccccgccaacactgtgtgtatgctgccggtctgctctctatagggggcatctgcctgtacataatggggtcaaaccaagctctaaaacgtgtagtcttcgctcagctccgcgcctttctctccacttttaaaccccaggcactgctgtaggactctgacccctatcctcctcacgcttaagagatgacctctactttagaaaagcgtgtacaaaatactttgcttttggcaaattccgccattttagccggatttgctctgttgctccaccctcgggcgacagtggtgaaccaacaatttttttgctgtctttcctaaacttgtcacgtattggcctgtcacccgacccttcttgtggccctgataagttttgcataattccacctagtgttatctattgatagcctttgtgggaatgcctgtgacaaatgggaacatcccttctcttttgaatactgaaactcttctttgtcccagaaagtttaattcctgatagagtatttgggagaaaaagcaaaggccaacacccataagagaaagaatgcaagactagtaggctcaaagccagttattaatttttttttaggttgcaccccttaaggatcttcctgtaaatgatgagcatgtcaccgttcctccttggaaagcaaacagtaaacagcctgcgttcaccattcatgtggatgaagcagaaaaagaagctcagaagaagccagctgaatctcaaaaaatagagcgtgaagatgccctggcttttaattcagccattagtttacctggacccagaaaaccattggtccctcttgattatccaatggatggtagttttggtaagttttaaggaaaatctgtgtggaattacggtaattataattattagatgatattaatgatttgcattttaagatgtcttatgtagtcattttgactatagtgagttaggtttaatgtaacaaggcttagaaaggatgtgacttatctcagatctcacagctaacacttgacttggtgacatacaaaaagatccttatccagtgctctttcaggttcactgccagtcacatcaatctaattataattagatcttaaatgcttattttaatctgatcccataaatgtgttcttggttgggagaatagatttcagttttatttaactcacttatatatcacttagtgctatttgaagatgcagtcttaaatattgtgattacataacgtctcttccagttttataattttgtttctataaaaccagtctggattagcatctgataccagaaagtgacacttttcctcctacaagtaaatagttgtaccatggctgtttactcttacccatgtattaaagtagcttctgtaaacagctctttgcagtttgtactatttctttgccctagggatattgagtcactggacagctcactaaatccaatctcattttagttttagttgtattgattgtgaggaaggaggggtgagcaggaaaagtcctttggaaataataatttgtgtgtttttatcaaaattttgcagaaaatgtttaatctcaaggtgatctttgaagtgaaaggaataatggatgatactctttgcttcaaaataatttatactacaaaaaataaattatttatagtgttaatccatttgcccataacaaacctaatttcttaataacacttgttaatagaggccatttaactgatgctagctattgcctacttgtgctttatatatgtcagactctgggatctgcagtttctcttgggacaaatcttagatattatctcaaaacttggattttaaaagtgttctgtcctaacagaaccaccatgccatttgctcctttctgttgtggaagatggatactttaagataatacctgattctcattttcctgttaggggcctaccaatatgtttttttttttttccctcattaactaaaatcattccaaagttctatgtacagagatactgagactagggtaaaatattctacatattttgtcatgagaagctctttttagtttgaagaaataagtgctttgttaatatgagattccttccatggcagtcatttttagctattaaactaaataggcaaacaattaatttaatcatatcttttgaattgtcccagagtcaccacatactatggacatgtcaattgtattagaagatgaaaagccagtgagtgttaatgaagtaccagactaccatgaggatattcacacataccttagggaaatggaggtaaaggttctctgaatccagtttgtataatgtatttgttaaatgtggctaaatgaaattgagaggataatgtttaaatttttaaactaatgaattattctaatgctacagttaagtttatagcatgtagcctctcgtaattaatggtaaaataatctaattgcagtttttacactagaataattttaacactataaataattttctcaataggttaaatgtaaacctaaagtgggttacatgaagaaacagccagacatcactaacagtatgagagctatcctcgtggactggttagttgaagtaggagaagaatataaactacagaatgagaccctgcatttggctgtgaactacattgataggttcctgtcttccatgtcagtgctgagaggaaaacttcagcttgtgggcactgctgctatgctgttagcctcgtaagtctaccttggtttgtttaaaagtgatcacgaccttttgtctagggaagaaattgatttttttaatggtgaccttttaacatacaccaggcagagtcagtgactactttagggatggcaatgtgctggggcttagggcagtggaggaggatgaaactgttctaatctagaacactaattttcccccaactggattccttgaacatgatatagtacactaggttacaaattttaaaacattttccttccaatattactttctggcatataagcagtgtctcttttattaagaagtaaaggctgggtgcggtggctcgcgcctgtaatcccagcactttgggaggccgaggtgggcggatcacttgaggtcaggagtttgagaccagcctggccatcatggcgaaaccctgtctctactaaaaatacaaaaattagctgggcatggtgatgcatgcctgtaatctcagctactagggaggctgaggcaagagaatcgcttgaacccaggaggtggaagttgcagcgagctaagattgcaccactgcactctggcctgggcgacagagcaagactcttgtctcaaaaaaaaaaaaaaaaaagaaagaaaaactaaatttaaaaatgaaaacatgaaacatgttttcctaagacttgtatttcctaaattttcagctacttggtgaactctggcattgttcccatctcgagaagtctcatgcctttcatttacttcctttgactgaactggggaaaatatctcaaaagtcctttattgatttgggccttttaattagcaattagctatccagtctctactagaaatgatgatcaagtgtctggaaatgcagttggtgtggattttggattcattccatattctgctaatgggatttcagaactgggataaggaagcttgcttctcttttaggactgattacttaaaacttttttcattgtagaaagtttgaagaaatataccccccagaagtagcagagtttgtgtacattacagatgatacctacaccaagaaacaagttctgagaatggagcatctagttttgaaagtccttacttttgacttagctgctccaacagtaaatcagtttcttacccaatactttctgcatcagcagcctgcaaactgcaaagttgaaagtttagcaatggtgagttaactttcattttgttgaatggtgattctttggtaataattaggggtaagccctaattcctttgtaaaggaacctagttcctttgtacagcagtggtgaagagatttagtattcagagggagattaatgctgcagtatggaagaaagcctactgctggcaaaagataatctatatcaggaaagcactagaagcagaggtctaaggatgacatcttggggatgggtagtcagaagagttgttttttaaaagttaataaaggagggaaaatacaggatgaggatggaacaaaacactaaaatgattgatatgtttaaagatgaggctgtgagatattttttctagagttgctacagagccgttatcaaaggcaggaaaaaattaggttagaaggcagaggtttgacatttgaattctaaacgctcttgtgatcataaagtattttttattccagtttttgggagaattaagtttgatagatgctgacccatacctcaagtatttgccatcagttattgctggagctgcctttcatttagcactctacacagtcacgggacaaagctgggtatgtattacggtcttcacac

SEQ ID NO: 98090 - DNA, 65762 bp, Homo sapiens
ctcggccactctccttctgactcctggatggtctccacagttcctgccgcatgggaggcatggccccggggtcctggtggccactcgtgcctggtggagagcgagggcagcctgacggagaacatctgggccttcgctggcatctccaggtaggaagggcctggcctggcctgacgcccagtcccttggggtgggcagagaaatatgggcttcccaggcccctgaggcacacactcccgtgcacgggcagagcgctcccaacctcagtgacctcaggcctgggacttcaccaccctgggcctccattttctctaaggtaaaatggggttaatgaaaggagcttcatcttaaggctgtggagagggtcaaatgaggtgatttgagtagagccctcagcacctggcctgaacagggcgaggcccctaagcgtcagctctttaagcctctctcctgagagagtcttgacattgctaacaattacagactctggagaaaccttctaagcttctaaaagcttctttctgttgagccagactctgagtcagaccccatgttgggtttttgctgttgcttttgttttgaaatttcattttagagacagggtctcattctgtcacccgtgctgaagtgcagtagcatggtcatggctcactgcagcctcaaactcctgtgctcaagggatcctcctgcctgggcctcccaaagtgctgggattacaggcatgagccactgagcccggccaacgcaccgtgtgtttaagggcatttaatccgcaggctgcctcgatgctgctggggtcctcatgaccattgcccaggagagcagtccagcctttactctctcccctctgtgctcctaggccctgtgccctggccctgttgcggagagacgtgctgggggccttcctgctgtggcctgagctgggtgctagcggccagtggtgtctgtccgtgcgcacgcagtgcggcgtggtgccccaccaggtcttccggaaccacctgggccgctactgcttggaggtaagagcgcagcagccagaggggcctgggccctgccgcatcattggctccatccctggcccttcctgcctgcccttttctaactgctgaggtcctgaatgtgcctcacccccatccctgtctcccattggctctccctggcctcgcccctcatccaattccatcctgcctctactgtcctgctccttcctcattggccctgctggcctcacccccagctggcccacttggccccacctctgttgactccgctctgctctgacctgaaggctcttggaggggaagggaggtgcctggtcaccgaggacccttctctccagaggtggcttcaaagggtacctctaatagagtcttgagctggggtcatgtctaacatttctacaggaatcctggctttcccacaccctagcccatcttagcagaggaggaaactgactcagagagggcagggggtgcctaagctcaacagcctgagtctccagtgtgatgtcttgtcctgccccccagtttctagggatgggagggggtggcgaggcttttcacatgtgtacccttacttccaagctaaacatctcattcctatccaggctgggaagagagagagggaatggtgtttggctctgccacgatagcacatgtgaagcctctgggctccgttccctgctctccaaaatgtgcaggctcctgtgggagcgggtggctggtgcctggcgtgagccctggggaaggggactggagctgaagtcccttcctcccctagcacctgccggcagagttccccagcctggaggctctggtggagaaccacgcggttactgaacgtagcctcttctgtcccctcgacatgggccgcctgaaccccacctacgaggagcaggactgtgggcccccaggcaggccgccccggactctccggcccctcagccatgccaagtccgaggcagagctgcagggcctgggctaagaggtagggccccggtcccacaggccccgcctcaccccggctcctgggccccagcagcatctctgcccgtcctgcacccctctggttgccagttccatccagtcaccctgcccttggagcagtcttccatcgcgtcactgtccgtgggaggggagccctgagggtgggtatcgccaatggcttcttggagaacatgtggcctgctgagattccaggagggcaggtggagttgcaggcttcggataaccctttgggtggcttcggatgacctgctgtgtggcttcggatgctttgggacttctgggcttctgctttactcctggggcaggagcttgttcacggcaaagctgcagccctctcctaaggaggctaggccttggggcgctgactgggagtctccagaaagagggttttggggaggcaggagtgagcttttactctgggcaaagacctggagtgagccaccctgtctatgagagcagagatgactccatggagcttgtgggcaggaggctggggatgagccccatctaggctgacagagcagggctgtttctcacatgtatctgagagtgaaggaggggtgggaaggtgcagagagggcaggagggacagagggctgtacctaacgctcacgcacggtggactcctgtgtgcagaaagggatgcgcaccagcagacagggccaagaatctccatgctgtctccactcaaaacctcagggctgtgactcccgctttctcagaagggatgcgcaggctcaccccttccccctaggaatcaccagggcacccccacccccagctcatctcctttagccatttgacagggaggggccagcagtgagctgcaggcttagaggggtgaccagggcccttcctaactcgaccgcatgtggtttggtggctgccttgggagggaggctgtccgatgctgacattccccttagcatggccctgaccgtggctgtcaggggccaccttgcctcaccaggccagccccactgggaatggggtcagtcacagcagaaccgtcgaaaggtggacctgatgtgggccctgccgggggcgcttggcctcagcgggccatgggagacccagggaaacgactctagtgtgaggcagtggtcctgccagtgactgacaaaccctctttgtaagcaaacttgacaaataatgaatctactgaactcagttatagaacaagttcattttgcatgaacttctcttattgaagcagaagccacgtcatgagcctgggggctgccctctccccgtctgggagtgggacagaactgttcagtgccttgaaagtcacagatttctgactcctggaaggaactgggcagtcccaccagagcagaaagaaaggaggcaaacttggggagtgagaagccagcctcccagaggcccaggcctcgtgttccccacctccaaccctcccgtgaggagaggggcttggcctgggaccttgtaacttccttgcaagttaagtgagctatcctgtcacaaaagatagaaggaactgccctttgggacttcttttcactggaaacccagcactggttttatgttgagtgagtgggaagctgggactctgttttacagccatctgtactggagcctggacaaaccactggtctctatgggaggccccagcctcacatttccctggcaaggagagagaggtttagccatgtcctgggtctaggattacagcccagagatgggcacttaagaagacctggtcattggtccagacttgggccaaggctctcctctgtgagggatgggttttactggtgaattacctgtgtggagaagctatcagggccatgtttagcacactgaagggaccagtctccaccaagcactttaacatccctccagccagcatagattgatctcgtgttacagagagggcaaggtttttggcccctgtttgcagactccatgtcttaatcagagaccacagttttctctttgttccaatctgcgccacctcggtagccccactttccttgctgtgtggacttgaaacaaaataaaatgtgttgcttcagattgtctgctacagacttttctttccttcgaaaggtgaggtttttgtcgtttccctatttcgtttttgccaaacgtatcttcagctggtgctgaatggtgaaccagaggtcctgtcctcaagggctcagaaggaattgcgcagggagactcaatcaatttacgttcctcttctgctgcaactttcagtggatatatctataggaaaaagactcaagtccttctgcactggcaacctgggcttgctttctgcttctgcaatgtgccacaggacctccgcacagcccagaccggcgtcctcctcctcctcccttcccttcaccttgttaaccactcagccatcatatttcagctccagtcaatctcaggatgcctgccctacaccctgggctgagtgaggttccttttttagatgttccataggctgggtgcagtgattcgtgctagtaatcccagcacttttggaggccgaggtgagaggatcgtttgagtccagaaattggagaccagcctgggcaacaaaatgagatcccatctctacaaaaaattagccactcgggaggctgagttaggaggatcgcttgagacctcctgaggttgaggcagcagtgagctatgattgcactccagcctcagtgacagggcaagaccctgtctcaaaaaaagatatgttgcatggaactgattattcagcttgtaattacattttcgttttcgggattttgtttgtgggattttgtttcctgtgtctgtctctccagctagatcatgcaggagggctgtctccctaacatctgtcacggtgcctgacatgtagccgacactcagtgtttcagtgcaaggaagagcccagcgcccagaggtgtgacggaggtgctcttttggctggggaacttgcactgagccaggagggataggccaggcagccttccatccaaaagacttgtttttgtttgtttgtttgttttagatggaattttgctcttgttgcccaggctggagtgcaatgatgcaatctcagctcactgcaacctctgcctcccgggttcaagtgattctcccgccttagcctcctgagtagctgggattacaggtgcccaccaccagagacgcgggtttcaccatgttagccaggctggtctcgaactcctgatgtcaggtgatccacccgccttggcctcccaaagtgctgggattacagacgtgagccaccgcgcccggcccaaaagacttgctcccaaagtgtttgttttacaatctcgggtcttagaaataacacgggtggcatgagaggaagctgtccaggggctgtgggtggtgggcagcctttccctgagccagtacggggacgtggataaggggcaacaggtccttgccgcttttcctaggtccctggcccgtgcctgaggcctgggatctctgtagccccgaggtggagtcaagcctggggccccgggccccagtcttagccgcagcctcgggcaagctgcgtaacatctctgaactgggactgtgcggattcgagaaggcagcggacgcgaaaggagcccagccagggctggcgcttcccgcaagcggccgcgcgtggctgcccggggatcactcgggcgaagctcgcgggccaggcggggcgttcccggggccgctcttgtgacgccacgggcgttgcccagcaaccgcgaacgccgcggcggtgagcttgcgggcaggcggctggggcggctccgggctcgggttctgcggcggcgcctgcagcgcggatcccccacgtccccgctcgggccgggcctcagaaacgggcgagcccgggcgcgggaggaagcggcggccccggctcgggtcctgcgacgcccagctcccctcggggcgccccccgaggggtccccgccccccgccgcggccccgcccctgcctcaaggccccgccccccgtggccggcgctggccccgccccttggcccgggctgctgggagtccccggcggggcgggggtcagctctggtcccgktggtcctgggcgcggcgccatggcctccgaggcggtgaaggttgtcgtgcgctgccgycccatgaaccagcgggagcgagagctgcgctgccagcccgtggtgactgtggactgcgcgcgcgcccagtgctgcatccagaacccgggcgccgccgacgagccgcccaagcagttcaccttcgacggcgcctaccacgtggaccacgtcaccgagcagatctacaacgagatcgcctatccgctggtggaggtgagggcgcccggcaggccgccctgcaggcggcagggcatgrggccgccccgagrgtccccagggggctgcgctgccccccagccaggaggaaaggccctcgaggggcgcaggcggacgggaacaggtaggtccggaggcttttgtccaggcgggacacaaccagagcctgcctctartgtcgcctccgggtctgcactatccccagcgtctccgcctcccgggttcaagcgattctcctgcctcagcctcccaagtagctgggattacaggtgcctgccaccacgcccgtctaatttttgtgtttttagtacagatggggtttcaccatgttggccaggctggtctcgaactcctgacctcaagtgatccgcccgccaagtgctgggatcacaggcatgaggcaccgcgtccggccgaatggtgactttttatcttccctcactggcaagatggggcacacctagccctgttttggttacagcatgggtctttgcagtggaaccgggcatagatgccatgtgggcccttggggtctcagaacaattctctgggccaatctacccatacaggatccaccccaagcccacactaaggtctagaatttgcaagctcatgagctctgcaagggcaggaactgtgtctgcctcgttcaccactttgtccrtaggctgagcatagtccctgtcgaatgaatagaaacagcgatgaatgaagaatgactttgggaatgactttgggaacagcaccgggtttgcctcctctcttccttccaggcctcatcttccacccctcccctagtccctcctgctctccacacctcatctgtgtggctttactcaagctgacccctcagcctggaatgccttcctcttcctgtcacctggcaaagtacgagccccactcccagctcccccagttctccctgtctttgccgcctggaaagctgtgcttcgttcttcctgtgccatcctgttttcgcttctttgtactccctgtccctgccggctggctgcctggactcttgtcgctgtgtgccccgccccatagcccgccacgagaatcacctgtacgtgtccagctccctgcattgcaggcagacattgggccatcacctgtgtatggcagtgcttcctgtgcccatgcacgaaagaagccctgtatgcaccctgtgagagccccgcaggtgctgctcttaccctttaagatattgattttttttttttttttttttgagacggagtctcgcgctgtcgcccaggctggggtgcagtggcacgacctcggctcactgcaatctcctgggttcaataaattctcctgcctcagcctcccgagtagctgggactgcaggagctcaccaccacacccggctaatttttcgtatttttagtagagacagggtttcaccgtgttgccaaggctggttttgaactcctgacctcaggtaatctgcccacctcagccttccaaagtgctgggattacaggcatgagccaccccgccyggcccaaggtgtttttcttatcatcttatcaatttgcctcagtaaggccagcccaagggcacacggtcagtaaagtggagatggatgtgagcccagggggccaagcccacagctcaggctcttccccatccacacacagggacagctcctaccccaccagasagtcaactccttgaggacagagctgcgccttgtttatctccacagtccagtgccattgttggtggggggaccaggaagggccctgagtctgtgggttagggagccctgtcccgagccctgctgtgcctgctccactgagcacrgggtcctgccttcctcccatgcagggcgtcactgagggctayaatggcaccatctttgcctayggccagacaggcagcgggaagtccttcaccatgcagggcctgccggatccgccctcccagrgaggcatcatccccagggccttcgagcacgtgttcgagagcgtccaggtacgggcctcgcagagggaaggggcagggccagagctgcagctgggcccagagcacttctgacaggtggcagagacacgggaagtctttggagcccggcctgacccgtgcagatcagcagagaaggctctgggttctgaaaaggtggtgggaaaaaaacttagaacagagaaaattctgtccatgcttttctctcaccatttttgccttctaacccttagttgagcatttcccatggatctgctgaccctgtgcactgggccaggaagtggttgtaacaatcacagcttccctctttattgagcaattgttatggaccaagtcatatgtgaagcccttggcatccttatctcactgaatctccagcctgacccaggaggtagctgataaccccatttttgagatagggaggttgagactgagcctttatyggccaagttgagactggactctgaattcatcccggcatccaggctgcaggtgagaattacctggcgaccatttgtggcagtgcacggggaatggcggatggggacaaccctgatcagctgcagaacccactgtgccactctcaggactcatcatggtggccacagcaacatgtagggccttggagagctgccagggaccagcccagagccagtgcttggcccaggccttccctgtggcctcaggtgtttttttttttttttttttgagacggagtcttgctctgtcacccaggctggagtacaatggcatgaccttggctcactgcaacctctgcctcccagattcaagcaattctcctgcctcagcttcccgagtagctgggattacaggcgcccatcaccacacctggctaatttttgtacttttagtagagatggrgtttcgccatgttggcyaggttggtcttgaactcctggtctyaggtgattcattggcctcggcctcccaaagtgttgggattacaggtgtcagccaccgcactttttctttgtttgtttttgtttttgtttttgagacggagtcttgctctttcgcccaggctggagtgcaatggcgcgatcttggctcactgcaacctctgcctcccgggttcgagcaattctcatgcctcagcctcctgagtagctgggattacaggtgtccaccaccatgcgcagctaattttttttttttttgagacggagtctcgctctgttgtccaggctggagtgcagtggcgtgatctcagctcactgcaagctccgcctcctgggttcacgccattctcctgcctcagcctcctgagtagctgggactacaggcacccaccaccatgcctggctaattttttgtatttttagtagcgacagggtttcaccgtgttagccaggatgatctcgatctcctgaccttgtgatgtgcctgccttggcctcccaaagtgctgggattgcaggcgtgagccaccgcgcttggcctagctaatttttgtatttttagtagagacgggggtttcaccttgttggtcaggctggtctcgaactcctgacctcaggtgatccaaccacctaggcctccgaaagtgctgggattacaggcatgagcagcgccccgccctgttttttttgttttgttttgtttgttttttgtttgtttttgtttttgtttttaacctgaataacgaggaggcctctgtttcctttcccatgaggcttgtagacagagcattagacagcaatatgaagattatgcaactcaaagaggcctgagcgcccaccaagctggagacaggagagagcttgccaggaaggccagcagggcgggttgggttggagactcctcttgccccgatgtcccttctcctcycatgatgtcctggtggcagagggcccaggccccagggtcagacctggcagcaggtggacttcragctctgakgtctaggttctttctgtgtactccctgcagtgtgcagagaacactaagttcctggtccgggcctcctacctggagatctacaatgaagatgtccgggacctccttggggctgacaccaagcagaagctggaggtgggtgcagacccattgtgggcaggtggggctggtaggggggaggttggcattggtgctgctccctcagaaatatgggaaagtgtcctgagggtgccggcactgggaggctagagtcgggacttttttttttttttttaattaaaaaaaacttttttaggcaggtgcagtggctcttgcccgtaatcctaacactttgggaggccaaggtgggcagatcacttgaggtcaggagttcgaaaccagcctggccaacatggtgaaaacccatctctactaaaaatacaaaaactagctgggcgtggtggtgcatgcctacagtcccagctactggggaggctaaggcaggagaatcacttgaacccaggaggtagaggttgcagtgagctgagattgtgccactgcactccagcctgggcaacacagtgagactccgtctcaaaatatatatatctatattatatatagtatctatatatagataatatatatataatatagataatatagataatattatagataatatagatatattatatatataatatagataatattatctatattatatatagataatatctataatatagataatattatctatatctataatatagataatatctatattatatatatagatattatctatttatatatagatattatctatattatatatagatataatataattttatatatataatatatatagatataatataattttatatatagataatattatctatattatatatagataatattatctatattatatatagataatattatctatattatatatatagatattatctatattatatatatatagatatatatagatatatatatagataatattatctatatatataatatagataatatctataatatagatatatatatgacaaggtctcgctgcgttgcccaagctggcttcgaactcctggccttgagccttccacctcagcgcccccggtagctgggactacaggcatgcaccaccacatgcacccagccacttggtgttttttatgcaggagcctccagcctcccacctagagtttttctactgcgttccctctcctagtgcagctgaatcatagctcagcccccagacagggaagcagagacaggaggcaacagagggtgttgctcccacatgtcagccccagaaggccagcctgtggagttagggcactctggccccctgcaaaccttctgctaacccgcactggagcagcagggagccctcctccccttcgtcactaccctggaccctagaaaggcctcagttacccgggcctagaggggccraaggctggcagctgctcacacttgctgcagctgagccatgggtctcaggcctattgaaccagctgccttgggggctgcagtgacagatgcgcttgctgaaacacactccagaggtcaccgggctttagacacgctccctcgtggaggatgtgcagatggctctcatgtaaacctcctggcagtccaggaggaggcaccgttcctattccttgtaacaacagatgaggaaactgaggctccatgtgcctaagtaagaccaacccaaggacacacagtcagtaaagagtggcgatgggatttgaacccgggggctccacagcacacactcttaacccgtgcttaacacaggcccgatcgtggttgtaatcagaggttattacatcacctaaggccagcaagaggtttggggaagcagagttctatcccctccccctagccactgtaaactaccatcacagaacccagccctgaactgcctgatctggtgaggcctgagggggcctctccagcgggttcttcccacccatgtccaggcaaagtgtcaagggctcccctccccgtggcagcgatggacacattcctgccatgctcccctctctcatccttgccgcatcccagctggttgccatggtgacccggctctggcctctccgcagcagagatgagcagttaccaaggaacctggtgcgcggctgagggctgtcactcagcgcctccccaggcgtcgggggtggagtggggttgggagcgcggtggagggggacccctgaggccatcacaagtgtgggagcagagagccttcctaggctggaaaatatcgtggcgggagacccctcgggtgaggtgttgtctcctggggttgctcaggcccgagatggcgacctcatcctctttgtaactgagcccccactgagtacccgcagaaccgttttttagatctgttctcttcctaatcctcataataatcttgtagaaataggagttatcatccccattttatggaagagaaaattgaggcttagagaggcatattaacctccccaaccagcaagtcacagaacaaggtgccctcaggccacacgcggctccgtcctctgggctccctcctcacagctgccgcctgggccgagacctgccctctgtcatctcaagcttcagctcctgcaggatgctctggcctctctctgtgccctgaaccctggagccttccatcggctgtgaccccactaacagctatgaccccactaacaaacagctgtgaccttcaccttctcctttctgggtgtcagttactcctctattccatgaagcccagtcccttggtggggcttggctgtttctccacgcttcagcagataggaccagctgtgcctcgccccgacccccacccacgcctctcccacagcaggggcctgagcccacctgggacccccctagagctgctgggagcaaagcagctgagcctcctgtggctctgacccacaggaccacttggcagacaaatgccttttgtcctcattcattctgctctggtgccagagtggttttatttcctctcacacttgaaaaataccgtgtttcacagctccgtgtccgcagcaaaatgactttgctgcctggaaagccagcagggagccatcagataaattaatttactgctgccatcgccctgagggctgggggcctctgggctgtgagcctgcggggttctggggagcaagtgggctcacctgtgatctgagggtttggggatattcctgttgttctagagccacggcagaggggatctggagccttagcaacgggcaaagggagacagcactcagggctcatgggtgacgacaggctcagcccctgggatctgaagctccctaaaggaaacccacctttgtaatcatagcactaacaacaacagcacagacagtggctggcatctatggggcacttaggtgctggcaccatgctaagcattgtgtgtgccttattttacggattcctccccatatcctatgagatagctgtctcatgcccattttacagatgtggaaactgagtcttaggttgtcattggctgaaggtcccatagcaagtaggaggcaggggtaggtctgaggctggctgggcctggaacacacccctccctgtgacaggcatgtgaggtgccagcctgcattacaggagggcgagggcggtctggatggggcccttctctctggttccttgaccatccctggtcctaacccttggcggctggaggttccgcccctgactgttcctcctccctcagctgaaggagcacccagagaagggcgtgtacgtgaaggggctgtccatgcacacggtrcacagcgtggcccagtgtgagcacatcatggagactggctggaagaaccgttcggtcggctacacgctgatgaacaaggattcctcacgctcgcactccatcttcaccatcagcatcgagatgtctgccgtgggtatgcgaggccattgttgggggcagggggacagatgacccagccactcccactagccaaggcacgccacctctcggggcygcaggagcccctggaaagtgggaagagatgctctaacagcctggaggaaacccaagaggacccttgggatgctgggacccgtgttcccaggataaacagcagcaaacacagtaacactgggagccaacattgagcgctcactgtgtgccagacaatttttatttatttatttgttttttgagacaaagtgtcaccctgtcacccaggctggagtgcagtggtgatctcggctcactgcaacctctgcctcccaggctcgggcgagcctcccacctcagcctcctgagcagctgggactacatgcacaccaccatgcctggctaattttttgtagagacggggtcttgctgtgttgcccaggttggtcttgaactcctgagctcaagcaatactcccgccttggcctcccaaagtgttaggattacaggcttgagccactgcgcccggccagtgtgccaggcaatgtgtgtgccttatctcacttactcctacagcactcccatgaggtggatactgaatcatccccattttacagaggaagaaattgaggccacacaactaggaactagtgtcagagcctggcttctatcccagggtcttcctctggagtgtgtgtcactccaaccttgtggattctcctctccctctgtaacgttctctactcctcagtcatctcattattatttttttctggaaatgctgccgagaaagcaaagaggaaggaaagaaatccatgtttatttgggggccccattggccatctgcagtgccaaaccctttatacccttcattccatttaaatctcacgacagtcttagagacaggcactagaatcctcattttatagacgaggaaacagaggctctgagaggtaaagtgatttgcttgttcaaggtctcacygccgctaattggtggagctgggatttgaacccgggtctccgtgatgtctgggttttcccatgaatgctgcagctgcctccaagctgtggtccatcatgactagaactccaaagagcagtggagcaggaggtggcctcagcccaactgggaacataattctggagagatccctgacccagggatcagggtcaggaattagctgggtgtgatggtacatgcctgtagtcccagctacttgggaggctgaggtgagaggattggttgagcccgggagaccgagggtgcagtgatctgagatcgcaccactgcactacccagggtcaaggcctgagtagatggaacctcctggacgcattgcccagctggtgtggtgacctggccttgggccaagccccagtgcttgcttaggtatgaggccatgagtctgagtgtcccggggatgctgatatagggagggttgagaccagagtggtcacagcctcaatactgcagctcagggaggggcagagaccagggcaactgaggacagatcaggagggaggaggagggagcgggtttagggggcacctcttggtctttgcaggaggatttgaaggatgaggcaggctggttgcacattcaccttataaaataatgtgagctcagtgatgatggtaaagtagggaatggtagggaacagttactcatagttctgacacctaaataccactaacatttaagcattatattaatatctaataattatttatatttataattctttatatgtttatttatatataaatgtatatattatatatatacatatatattttttatacacacacacacacacacacacacacacacacacacacacacacacacatacacattggtttgtttttttttttgagacagctctgttgcccaggctggagtgcagtggtgcaatctcagatcactgcaaccttggtctcccaggctcaaccaatcctcccacctcagcctcccaagtagcttggaactacaggcatgcaccaccacacccagctaatttttatgttttgtagcgacaggatctcgccatgttgcccaggctggtctcgaactcctggattcaagcaatccacctcagcctcccaaactgctgggattacagacatgagccactgcgcccagcccatattttcttttgatcctttttttcctgtgaatgttttaaacataactgaaatcttacgccatgtaggtttcccctggttccatctcccttgctgtcactaagcatttctgcactttactgtcaccgtgtcttcatgaccatgtgtggtggcctggctcatgccattttccaaccggtccttgacaattggtttccagtttcccagygctgcaagtcatgccacgatggacatctgtgtgcacaaagctttttctcatctgagagtcatttcctcagactcggttccctgcaatggagtcctggagcaaagataacaaacgtggttaaggcttctggtccgttctgsaaagagcttcccaaagaggcagcaccaagttccttcctgtccttttttgagaggcagagtctcactctgccacctaggctggagtgcagtggtgcaatcatagctcattgtagccttgaacttctgggctcaagcatccctcccacctcagcctcctgagtagctgggacaacaggcacacgacactacacacccagctgtttttggtggtgtttttgtttgtttgttttcttttacttttctttctttttttttttgagacaggattttattttgctgcccaggctagaatgyggtggcatgatcacagctcactgcaaccttaacctcctaggctcaggtgatcatcccacctcagcctctgaagtagctgagaccacaggcatgcaccaccacaccctgctaatttttatacttttttttgtagagacggggttttgccatgttttccaggctggtctcgaactcctggggtcaagcaatcctcccatctcccaaagtgctgggattacaggtgtgagctactgcccctggcctgttgttgttgttgttgttgagacagaatcttgctctgtcgcccaggctgaagtgcagtgttgcaatctcggctcactgcaacctttgtctcccaggttcaagcaattcttgtgcctcagcctcctgagtagctgggattacaggcatgtgccaccacgcccggctaatttttgtatttttagtagatacaaggtttcaccatgttggccaggctggtcttgaactcctgacctcaggtgatccgcctgccttggcctcccaaagtgctgggattacaggcatgagccaccgcacccagcctgttgttttttaatagcctaaagaaccagctggctacgaatgcgctgtctgtttaccttacttctccagaccaccaacctgtcaactaaagaaaaatcaacaagtctgggcacagtggctcatgcctgtaatcccagcacgttgggaggccaaggcaggatgatcacttgaggccagcagttygagaccagcctgggcaacatagggacaccgtatctctaaaaagaaagaaattagccaggcgtggtgatgtacgccttcagtcccagctactcgggagactgaagcaggaggattgcttgagcctgggagttcgaggctgtattgagctaggattgcaccactgcactccagcctgggcgacagagtgagaccctgtcccaaaggcaaaaaaaaaaaaaaaaaaaaaaaaaargagacatcctactgaggattatagactgaggcctacagcccagagcggctctgtcagtatttcagttcacagtttatatacaggtggtgaagactcagcacctgcagaatcacatctgacttgctcagaatcacatcaaggtttgggtgcaagagcacatctggtgatagattccagaggcttccgcacgaaccccggcagacattatctcatgtgtaggaaaaggcatggcctaggctctgtctttaagtgatgtggtgactcagcgacagacatgggggaccgtagactccatcctgttttgtcttcaaagcgtgtctgtggagctctgcacagttctgcgcgycggcacagaggcagcggctttgtgagctgattatgctggcaagcggaaaagagcaaatgtggcttctaacatctgccgctttgtctcacaaaccctaatggggaaccatgggtagtctcattttgttgatgtggggaattgagaatctgggaggtaggtggctctgctaatgccacactgcaaggagaagacacgactgggttgggaaccgggtctgggagtctccaaagcagatgttttctgttttgaatgacatcactccctggtgatccagcccacacccctgcccttctctaccttgaccttgcaggaagccttcgggagctgctgtggcagccagaggccctattgcactcagaatggtctgcaactccaggccctgctcctggagacagcctgccctgggttctgatggtggctatagctcttagcagctgtgtgaccttggacaagttccatgccctctctgaacctcagtctacccatctgtaagatgaacccaataatagcacctgcttcctggkgctcctgtgcagctgaggggaaccctcggtgggtgggcattgagcacccagtgcctggcactgattgccctcgatacatagggctcacccgaggcyctcgccactttgcctggtctgtgtgcagatgagcggggcaaggaccacctccgggcgggcaagctgaacctggtggacctggcgggcagcgagcggcagtccaagaccggggccacgggcgagcggctcaaggaggccaccaagatcaacctgtcrctctcggcactgggcaatgtcatctcggcgctggtggacgggcgctgtaagcacgtcccctaccgtgactcgaagctgacgcggctgctgcaggactcactgggcggcaacaccaagacgctcatggtggcctgcctgtcgcctgcggacaacaactacgatgagacactcagcacgctgcgctacgccaaccgggccaagaacatcaggaacaagccrcgcrtcaatgaggaccccaaggatgcgctgcttcgcgagtaccaggaggagatcaagaagctcaaggccatcctgacacagcagatgagmcccagcagcctgtcaggtgggaccacgttggggtagtggygggagggccaggtmcccaggagaaagcttccttccctctgtcttctcgcctccaacttcccacctaaaagacagtgggagcagcatcctcccacccctcagccccatgtgagcgcagggccctggttggagacggcccagatggtatctgcttgtcagtgtcctgggaggagggcagtccgtctggcctgtcccatctgacgcaggctgttgcccactccccgcctctcatctgctcatccattatcccccccacccccaccacaccccccaccacacccccgtctgctgctgtctgtggcattgtcgcaatgcgtgttcgctgctcagcagctggcaactcactccccacggccacacctgctcctcgcaggcaccttgttactgcagcttttgcgccctggcatttgcctgtcacctggcaggtggaaatccacacttggagcattggcctgaaggggctttggaactgaaggactctttttttttttttgagacggagtctcgctctgtcgcccaggctggagggcagtggcatgatctcggctcattgcaacctctgcctcccgggttcacgccattctcctgcctcagccttctgagtagctgtgaaggactcttaagattttcttatctcagaagctcttggggaagggaacacaaaatacttgggtctgtctgtccattcatccccctcgcacccaccttcctctccatctattcattctacacacacccattcacctacccgctcatccacccatctgtccatcctcccacttacccattcatccacccaccttttcttycacctacccaccttcccacccaccccattacttatccatctgcacactcatccatccatccacccactcacccacctatacatctatccatccatccatccatccatccatccatgcatccatccatctatccatctatccatcctcccatctacccatctctccctccattccatcaatccatttcttccttccatccatccatctacacagccacccacccacccatccatactgacccttccttcctttcttccatccattcatctgtcatccatccatgcatccattcatccactgatcctttcttccatccatttgtccatgcatccatctattcatcgatcttcctttcatccactcatctattcatccagagatcctttcttccttttttccttccatccttccatctcccatccatccgtccatccattcatccattcatccatccatctccatccttccttctatctacccacctacccatcttccattcattttatctacccatccattcacccattctaatcacccaccccatccaccctaccatccatatacccacccattcattcactccatcctatcatccattcttttatctatttttccactcacctacccatctatccactgaaggttccctgagctgctcctctgtgtggacacgtgctgggtactggatacacagagatgaatcagatgcaggctgtgcctcgtggggtacctaatctcctgaggaagaaggacactccaatggaccatcacatgcaacgagacacactctagggcagacagctgtacagggcagagaggagtgcatggtcagccaggtctatctgtgggtgggataaggtcagtgagggaaagcttcccggaggaggcagtaattgagcagtcttggaagaggagaaatttccctgttaggatgagagtgtccagtgtgtgcagagatgcataaaactctaaggtgcatttggggaactacaaagccctctgctggctgccttgggcataggggtgatgggaggtggtcaggcaggactggggtggagagggccttgaacaccattgcaaggcattccacctcagccatctgccttcctcctctttccctactcttcaccccaaccctactcacccccaagattggtaagggggaagacaagaatggtgagggtaccaggagggagtgggggaggctcggcccgcggcccccgcacccagcagctaacacctgtgcagtccttccagtggtgatggaggcagcccccaggatagctgttagcatcccttctccctggattaggagcaaggagcccagccagcagcatgactgaggtggtgctgggtggatagctgagcactgagcagttatcaccagctccctcccagctcctcagacaagcaactcagccactgagaacctcagtctcttcatctgtaaaggggacatcatagcgacmcctgccttgtgtgtgctgtgaggcaactgggaarattgcctgaggtcatgcatgtgtgggctcagcacgaggcctggcacggtgggctccagagacaatgcatgcggccttcactttggagctgggccttcagaccaggcgtgcctgacccaaagctccctgtgtttgcccctccctggactcactttagacatttcccccttagccctggttctccctctagcatatccctctttttccctttcaacaaaacttgaaacatctgtctacttttactggtcccactctctctccctctgctctctcttgcccctacccaggcaggccctgtcctggcccattgacgttgtccttgtcaccgatggcctcctgtcgtggagcccggtgactgtcctggggcaggcctcaccttgccgtctcagcaccagttggctcagcagatcccctcccttcatgagacctttgcttcctacatgccctctgccctggctcccttcctgcctccccacccacctctcctcagttcccaagggygagtcgtccctgctccctggcctcttaaccctgggctgtcccaggctggtcctctgctgtcctctctctgcactcgctgctcrggtggcttcgcctgggtccctggtgttatcaccacctctgcattcctgacttcccaaatgcaccctgcagcctggccatgcaatttgtgtttgtgtctttttttttgagacggagtcttgctctgycgcccaggctggagtgcagtgkcgcratctccgctcactgcaacctccacctcccgggttcaagcgattctcctgcctcagcctcccaagtagctgggactacaggcacgcaccaccatgcccagctaattttttgtatttttagtagagatggggttttaccgtgttagccaggatggtctcaatcaggacctcgtgattsgcccgcctcagcctcccaaagtgctgagattacaggcatgagccacctcgcctggcctcgtgtcttaatttataaaggtgactgggtgacagcacagagatccgcgccactgaaaggaaagcccatcgtgactcacagtgctcctggaaacccggggtcaggcacacacacatggggaagcaccagcatcggtctggagggagaagggagtgggggcccgggccacagcctttactgggcttcctgtgggaaacacacagcaaggcctgggaggcaggttgggaccagctgatctgaataattctggtgggcgttggggttgaggggctgttcctggttgtctctgcctggccctgggcctgttcagggcagggggaatcttggcttsgtgtgagagttacatacagcaggtggcttggggtgtggactcgggttcggctggtttatataccaaagatggactcactgactcgtggtttacggtttctaggaattcgctcgccctgaagggcagtctaaccctgcccagcaagtccctcaagataatagaacataaagcaatgtagaaaagaagtaaaacatactataccatgtcctctgaattccggacttgaatctgtagctgtgtaataagcatttcaaacccaacatatcccactgtcaactcgatgggcccccaaatctgctaggctgcagctccccccaacagctgacagaggcaactcaggtgttcaaaccagrcacttggggtcgcccctggcttctcacgttctctcaaatctacatccagttggtcagcagatcctgccatctccaccttcaaaactggctacagcctggccgggcgcagtggttcacgcctgtaatcctagtactttgggaggccgaggtgggcagatcacttgaggtcaggagttggagaccagcctggccaacatagtgaaaccccatctctactaaaatagaaaatattagccaggcgtagtggcgcacacctgtagtcgcagctactcgggaggctgaggcaggagaatcacttgaacctgggagagggaggttgcagtgagcygagatcacacgattgcatctagcctaggcgacagagcaaagaccccgtctcaaaaaacaaaacaaaacaaaacaaaaactggctacagccagttcactgctgccctccagactgagtttctgcacgcccccscaacgggtctcctcgtgcctaaccctggttcccctcagtgcactctccacgcagcagccagggagagcctgttcaaatgcaaggcctgtgactgccctgtgcacacctgcctcgttcaacccagagtcacagccaaagccctcacccggccctccacagctgtcacaatctggcattatccctcttggacttctccacctgtcctgcccatcactccctcccctccagccacactggcctcctggctgggccaggaacagtgcagtctcacaaccgcctcagggccctcgcactcaccgctccccctgtctagcaagctccccctgtctagcaagcgcctcctgtctagcaagctcctcctgtgcccgccctctcctcgctgcttccttcatgccttgactaaaaggccttcaataaataagctatttatttatttatttttgagacggagtcttgctctttcgcccaggctggagtgcagtggcgccatctcagctcactgcaacctccgcccatctggttcaagcaatcctcctgcctcagcctcctgagtagctgggattacaggctcccrccaccatgcctagctaatttttgtatttttttggtagagacggggttttactatgttggctgttggctgggcttttcttgaactcctgacctcaagtgatccacccgcctaggcctcccaaagtgctggggttacagacatgagacactgtgcccagcctaacacactatttaaatggcaacttgggcygggcaaggcagctcacmcctgtaatcccagcactttcgcaggccgagatgagaagattgcttgaycccaggagtttgagaccagcctggacaacatggcgagaccccatctctacaaaaaataaaagattagctgggtgtggtggtgtgtgtctgtagtcccagctactcaggaggctcaggtgggaggatcatttgagcccaggaatttgaggcctcagtgagttataatcccaccactgcactccggcttgggtggcagagcaagaccctgtctcgataaatatataagtaaaaaaattgcawcccttctaactgcttctgactcccaagcaccctccctacttgctttttcttctcagtacacatcgccttgtaaygtgttacccattttgcttatttattttgatgggaggtgcttaggcagggctggagtggagagggcctcgaacaccaccacgaggcatttcaccttgtccatctgcttttctcctctttttcccagtggaaaactcagcgtgggtgtggagtttttgtctttgttcaatgccgcatcctcagagtctggaacatcgaggtgctccataaatatttgttggrtgactaacagccttttacatggagatgtgtttgaaataagctgaatactttaaagtcttcttgaatgaccatgaggtcrtctttttatagatttctgcttagttcctgcacacaatgtgcccctcatcctggctgctaatttctgtttctcccccagccctgctgtccaggcaggtgcccccagaccctgtgcaggtggaggagaagctgttgccccaacctgtgatccagcatgacrtggaggccgagaagcagctgatccgggaggtgagacccaakcgggtgggaacatggagaagggacaggcaggtggggcccagcgggaagggcagggctgccgctggggtccaacgcgatatcaccgtaccttcaccgtgggtttggtcctgagaaagytgaagctcaaagagatgccaggacttgcccaaggtcacacagcaaagagtctgagccaggatttgaacttgagttcttgactccagactgcattcaatgccgccttagggcctgcgtggtgagaacagaggggtgtggaggtgtctccaggggcgtggtctcccctccgttttgaaggaaggggtggctgtgcattgatggaagcagaaaaggcatccctggctgtggaaatggcctgtgcagaggcgaggcagtcagggtggggaggagtctgtcccccagcagccgacgacaagtctgagagccaggcagcccgtttgaccagcgggtgagtgtggtgttggcctcctggaaaaagctgtcacctggggcacctctcatctgagtgcctcccaacayccctgggaagcagcgggtcagacgatgcctgatttccagaggcggagctgatccccagagcgggacttccacagccaggcatggcgggggcccccccactcctgcctttggctccatccctgactccacgctctgttggtttccagagattcccgcctaaatgctgcatcctgagacctgagcatgccgtggagtttgacatgtggcagtccctttattcatttatttatttacttacttatttttgagacagcgtcttgttgtcacccaggctggagtgcagtggtgcaatctcaactcactgcaccttcaaactccctggctcaggtgctcctcccacctcagcttcccaagtagctgggaccacaggtgcatgtcataacgcctggctaatttttaaatttttttgtagagatagggtctctatgttgcctaggctggtcttgaactcctgggctcaagcgatcctcccacctcaacctcccaaagtgttgggattacaggcgtgagccactgtgccgggcctgatagtccctttagaaccctggcttttcctgatgtgaaacctgatgccaggcaggacgagctatcccgggkctaggcctggatgtatccgctgctggacccctgccactcacctmccacctyccactggggtccgtcctcaggccccagaagcccctgttgggctgtgggtacctggggcccagcctctggggcagacaggagaaggactgtggrgatctctgtcctgtgggccggaggcgtgggagaaatccatccaagagcctcgggcgctgcacgtgacgggcggggcctgtgctgtttggggagaggctcgatggtgcccccagtgaacgccgtccgcccctgcaggctctggagctcggcagcgggcactgcctttctccctccactgccgtttccagcccgggtgtcaggtcccttcctgtagctctggggaggctcccggggaggctttagcaaggaggggccctgggggatggctgagctcagacaagcccgcagaaaccagagaagtcagcctgctgttgttcggagtgggcatggagtcacacagcggggctcggaggctgggagtcacacacggagtcacagcccggggggctctggtcacagatggaggggtggggcgggctgtgcaggacggggacggaggcttccttcccgggaagccyggtggggccggcgscccccgctgtccagtaagtagggcactgcctccccctggtggtcaccagggagtagcgacgccgttcctggcgggtccctggagtgccacggatgggggtgccttctgccctggggatggrgtcgcctgcctccttctcgtggggcggcctagtggacactgcgtcagagtggtgctggctgacgccaccgccaccaggattccaagaaaccctgaggtttcttctgtgagccatgcttggaggaagcgttgaagatgtctgtgcccctcccccaccccgctatccctgcgtccctcctgcctgccatttgttctttttctcaactctcatatttattgagcacctgctatgctcctgggaccgtgtttccctttgtattccagaaccattcagggaaagggaggagccccctctgtgtagggaagaggrcacgggccaggagccgggttccggtccccagtctgaaccaggggtttrgaccagaagattcctagggtccgtccagccttctgcaagtccatccttatgggctctgtgaccttgggcaggttgtttgagctctctgagcctctgtctcatctgcagaacaggcatcatagcggatttcctgctgcttcttagggatgtaagaggatgaaatgaagggccatcatctccttggcgggctgtgtatcatgtaccaagcaagagctgggggtcagctccgccattcagtccttaacaggcatattgtgagcgcgtgctgggtgctggacactctagccggagggggatgtggggccaaggaagggtttttcatgctttaaatgttggaagtaagagagcatgtgttgtagactgtcgggaattatccagcacagaaggagaagtcgaggttataggaaggagggggcggattgcaagcacaaggtcctggagctgggtggcgtgrgttcagaggaggtggagcttccgggtagatctccaggtgggtgggaaggtgagggagtcctgtacctccctgttctctgtgacttaccaggcaggggatgtggggggagaggagggttgggaagacagagctaaagggtaggactggggctgtgggctcagccatgtcgaaacccgcctgcctgagattcaggtcccatgtttaaaagtgagaatggggttgggtgcagtggctcatgcctgtaatcccagcactttgggaggccgaggcgggcggatcactggaggtcaggagttcaagaccaagcctggccaacatggcgaaaccccgtctctactacaaatacaaaaattagtcgggagtgatggcacgtgcctgtgatcccagctacttgggcgactgaggcaggagaatcggttgaacccgggaggtggaggttgcagtgagccgagatggcgccactgcactccagcctgggcgacagagtgagactctgactcaaaaaaaaaattaaaaattaaaaaaagaatggagattggtggtgctgtgcacatgcrtgtgtgtgtgcgtgtgtgtgtgcgtgtgtgtatgcgtgtgcgtgcatgtgcatgtgtgcctgagggtgcatgtgtgtctgtgggtgcatgtgtatgcatgtgygcacatgtgtgcctgcatgtgtgtgcctgcatgtgtgtgtgcgcatatatgtgtgtttccatccacgtattgctaaggtgaggcctgggtttaaccagggtcagggctgtgctgggagaaaacaatagaggggctgggtgagggagtcagggatgtttgctgactcgagtcatgggccctgggatgccagctggtgaggagggcagtgagagcagggggcagtggaggagagggctgcagggctctgaggagctgcctggtcatggaacctccctgggcctcagtaacactgtgggcattgctttgaggttcaartgtatctaaaaatgtactaaagaatgcrtggttacatctgaattattctcygtccccttctctccctccctaggagcctaaatcagtgctgtccatgccagtttctatttgccaaagggatctggagaggtgggagtatgacatggtgcttgcccacgccatccctgtccttgtcccctctctctggcttactacagtggcaggcacctctgtcagcagtggctccaggagacaaaggatcccagactatctttaattcataaatgccttgcccttctcttgagccatgtgtgtcagaggcctgaatatgttgcatgcccattaacctgcagttctgctctgccatttactggctccgcaggtgtttcttgaatccctcctctggcaggatctgaggttacaagacaggatggtccttccagcctggccaagatggtgaaaccctgtttctaccaaaaatataaaaaattagctgggtgtggtggtgtgcacctgtagtcccagctactcaggaggctgaggcaggagaatcgcttgaacctgggaggtggaggttacagtgagccgagatcatgccactgcactctagcctggggaacagagcgagactctgtctgaaaaaaaaaaaaggacaggatggtccttgctctttggagggtgccttctgataggggagaccaaggagaccaacaataaactgtaatcaaataagtagagactatcatgaaggaagcaatggttcagaaagaaaaagcagctcctgagattactaggaagctggagagacagaagagacccaaggaaggaaaagaagcaactggcggcccttgccctggtgtcagaagacagcagctgtagagggctgtgaggaaggagggtgctgctgagagagctcacacaccattcacacccrttcacacccattcacacccttccctgggcaagtgtgtcctgcccttggctgtctcccaggagtcctcatcctggagtagtgaaatggttgaaaacccccaaaagaagcaaaagccaaagccccaggggtctcctcaggagaataaaatgggagactcgtctctccaaacccaagaagaagaaatmtttcccaaggaggagcaggctagtggtgatcctggggagacagctggcagcatgtcttcccaaggtggaggctgggtgcggtggctcactcctgtaatcccagcgctttgggaggctgaggtggtggattgcttgaggtcaggagttagagaccagcctgggcaacatggcgagacccccatctttaccaaaaatacaaaaaattagccgagtgtggtggtgggtgcctgtggtcccagcttctcgggaggctgaggtgggagaattgcttgagccggggttggggttcgggttcactggaacttgaggtggcaatgagctgagactgcgtcactgcactccagcctgggtgacagagtgacaccttgtctaaaaaaaaaaaaaaaaagatgaggacgtaatcatccaaggaggaaacagttagtgaccctgagggagaggcaataggagcattgccaagaaaaagaggagattctcttccaaggagaaaccatcagcaatgggcctggagaggccactggtagcaagatcagctccaagaagaagaaaaagacccacaaacaggccaggcgtgatggctcatgcctgtaatcccagaactttgggaggccaaggagggtggatcacgaggtcaggagtttgagaccagcctggccaacatagtgaaaccccgtctctactaaaaatacaaaaattagccaggcgtggtggcatgcgcctgtagtcccagctactcaggaggctgaggcaggagaattgctgcaacctgggaggtggaggttgcagtgagctgagatcacaccactgcactacagcttgggtgacagagtgagactttgtctcaaaaaaaaaaaaaagaaagagtcccacaaaccatcccaggaagatcagaatgaacatttcctgggggagaagcatgcccccaaggtggcattttccaaccctacaccccagtaaaaacaaattcatgagcacacacacagaaaataaatagcataatagaagctcaggaagtgtgttaagaagaaatagaagccgggcacagtggctcacgcctctaatcccatcactttgcaagaccgacaaggcgaaaccccatctctgccaaaaatacgaaaattagccaggcatggtggcatgcacatgtaataggctacttgggaggcagaggcaggagaatcaggagaatcacttgaacctgggaagtrgaggttgcagtgagctgaaattgagccactgcactccagcccaggtgacagagcgatactctgtctccagaggaaaaaaaaaaagcaatagaggaagggacagggagcagtgcaggaggccttctgcttctgagagtatggtcagggaaggcctctctgagggatgttactaagctgaggcctgggaaggtgcttgccagggagcagggcaaaggccttggggcagggaggaagtgggtgtgtctaggagtccccaaatgtgcatcatagcagttgagggggaggcagggccaaatcacttgggtctcaggtcaagttgaggagcttagatttcatccatgaacatgggataccattagcagatcctaagcaggggagacacctggrtgggcacyatggctgtgtcagagagaggttggggccagagtgagaayagaggtgagaaccaggtggctgtttggacgagagctggcagtgatagcaaagatggagagaagtgggtgaataaaaacatattttgtcattgatgggttgaggaccattaggcagaaaggtatttgccaacatggaaaggtgttcatgatatattgctgtgtggataaaatagattgcaaacaaatgcatatattattcgtctgttaaaaaatgcactgagcaggctgggcatggtggctcatgcctgtaatcccagcactttgggaggctgaggctggtggatcacctgaggtcaggagttygagaccagcctagccaacatggtgaaactccgtctctactaaaaaaaaaaaatagccagaygtggtggtggacaactgaactgtaatcccagctacttgggaggctgaggcaggagaatcgcttgaacctgggagttggaggttgcagtgagccaagatcatgccattgcactccaacctgggcaacaacagtgaaactccatctcaaaaaaaaaaaagaagcactgagaggctgggtgtggtggcttatgcctgtaatcccaacactctgggaggctggggtgggaggatcacttgaggccaggagtttaagaccaagctgggcaacacagtgagacccctactctataaattttttatttatttctgttttatttttatttttgagacggagtatcactctgtcacccaggctggagtgcagtggtgtgatctcggctcactgcaacctccacttcccaggttcaagtggtctcatgcctcagcctccccagtaacagattacaggcaagccaccacgcttggctaatttttgcatttttagtagaggcggggtttcgccatgttggccaggctggtcttgaactcctggcctcaagcgatctgcctcagcttcccaaagtgctggggttacaggcatgagccaccacgcccggcctacaaaatttttttaaaaaattagctgatggtggccgggcgtggtgtctcacgcctgtaatcccagcactttgggaggccaaggygggtggatcacgaggtcaggagatcgaraccatcctggctaacacagtgaaamcccgtctctactaaaaatacaaaaaaattagctgagcgtggtggcggatgcttgtagtcccagctacttgggaggctgaggcaggagaatggtgtgaacctgggaggcagagcttgcagtgagccgagatggcgccactgcactccagcctgggcgacagagcgagactccgtctcaaaaaaaaaaaaawtttttttttgctgatggtggcatgcccatagtcccagctatttgggaggctgaggcaggaggatcacttgagcctgggagttcgaggctggaatgagccatgattatgccattgcactccagcctgggggacagagtgagaccctgtctcaaaaacaamacaaaacaaaaaagcattgagaacagtttggaaaggtcttcaccggcaagtaattatcacagtgttgtaccattggattctcttggcttacttataggttctgtattgtttgaataacmaaaaaggaatactgaaagctgggtttcaaaatgatgataaaatgctgcctgccctctggtycctcccacccccccaggagtatgaagagcgcctggcccggctgaaagccgactataaggccgagcaggagtctcgggccaggctggaggaagacatcactgccatgcgcaactcatatgacgtcaggctgtccacgctggaggagaacctgcggaaggagacaggtgggcaccccttgccccccgaggctgtctccagggaaggtggcctcctttccgcctcactgcagtaactgcatcacagagcattttctacacccgaggatcaggtctgttttatcctcacaatggtccagtaaggtaggtaccacaattatgctcgctatatagatgaggaaactgaggcacagagagggtargtaacttgcccatggtcacacagctggtaaaggagagccaggatttgaacccaagcagtctggccccagagccagtgttctcacccacagcactgcactgggatggcttagccatggactgggccccagctcaaggctgactgtgagctgtgaagtgccaccctttctttagaggccagyccctgccccgaattgctgtgttttccggtctcctcttacttttgagcctctctgttagcaaagcaaacacattccataataaggatttaatccttagccacagctgtttacctatctggaggtttttgtgttctttttttttaaaaaaaatttctttgttttgagatggagtcttgctccatcgcccaggctggagtgcagtggcatgaccttggcttactgcaacctccccatccmggatttaagcaattctcgtgcctcagtctcctgagtagctgggattacaggtgcacacyaccacacccggctaatttttgtgttttcagtagagacgggatttcgtcatgttggccaggctggtctcgaactcctgggctcaagcgatccacctgccttggcctcccaaagtgctgggcttacaggcatgagccactgcactcagcctttagtttttgtcttctttttgccaccctaggatattctgccataccagtgtcagtcaaacacgcatgctgcctggaggtccagacttcctagcactcatgaatagtgtagaatccaggcctggaatgatgatgatactgatcgcaccgtcggtaccgcttgttggcacattaccaygtgccgggtactgtgtgggtgctttacctgcacctcctcactgagcctctggtctccccagtccagcgaggtaggactccctgaatcctcccataactgtgtggaaaccaaggctgagagagatccaggccatttagctagggagtgggtgccatatttcagcaaagggaaaaatcaagaccctcttacaggagtctgggacataacgataaagaaatgggtgggaggtatgagaggcgccgggagccccctgaactggagyactaaggggcccatgtgaatgcagccctgtctccgctgcaagggagaygcgctcctggaggagacccaggggaaggggagggagcagattctagcattttatgccctttggagtgttccctccagtccagattgaatatgaggcctccagcagatcttcgtctggcttctggagctctgacattcatccacagcattcatttagctcccgtggatctagcatatccagtggacaagagccctgggctggccactccagtgagggctccgagggcacccgggcatgaaatctgctgagctctcagccttggaaggcaacaaggccccaggaagcctgccagtgtgcgaagagtggtcccaaggctgggtgtgacttaagagcccagcactcagtggctgtggaggtcagaaaatggaggaatcccagcgttggtcagggaaggcttcctggaagaggtggaaggtggtagggtttgggttctgataaaagcagagatgggaaggcaggcaggctgtagccagcctctggagggtctgggaggctctgactcttaagctggtcttttagaaacagtgggcttgggccaggcgcggtggctcatgcctgtaatcccagcactttgggaggccgagtgggggcggatcacgaggtcaggagatcgagaccatcctggctaacatggtgaaaccctgtctctactaaaaatacaaaaaaaattagccaggcatggtggygggtgcctgtactcccagctactcgggaggccgaggcaggagaatggcatgaacctgggaggcagagctttcagtgagctgagatcgcaccactgcactccagcccgggcgacagagcaagactctgtctcaaaaaaaaacaaaaaaaaaacaaacaaaaaaaacaacacactgggcttggagccaccttctagggaagggtctctcattctgaccctttaaaaacctgaaggaagttctccattttgcagaggctgtcctgcaggtgggagtcctctacaaggctgaggtcatgtccagggctgagtttgccagcagcgctgagtacccgcctgcttttcagtatgagacagtggtgaaacccaaggtcttctccacgactgacactctgcccagtgacgatgtctccaagactcaggtttcctccaggtttgcggagctgcccaaggtggaaccctccaaatctgagatttctctgggctccagtgagtcatcctcgctcgaagaaacctctgtgtccgaggctttccctgggcctgaggagccctccaacgtggaggtctccatgcccactgaggagtccaggagcagatacttcctggatgagtgcctcgggcaggaggccgctgggcacctgctgggggaacagaactacctcccgcaagaggagccgcaggaggtgcccctgcaggggttactaggcctgcaggacccgtttgccgaggtggaagccaagctggccagactctcctccaccgtggccaggacagatgcaccccaggcagacgtccccaaggtccctgtgcaggtagctgatgtcacgcatggtgccatgtgaacactgagcaggcagagcttgcccagggcccggagctcactgtgcacacactgttcacacacatggcctccgacactcaggccgtggctccactgtgtctgctgcggctctggcactggtggctggctcagkggcactggtgtccaggggttagggaaggagaagctctgtctcatgctctgtaattcaataagaaagttggggtcgcgatgcaaggttatgccaggtgggctcccgttctgcagatggagggacagctgtacagggcgtttgcccagttgccatggttacagtgagtgtccagkcctgacggagccctgggcgacgctcactggctcgtgagctctgtagtgagctgggtggggggtctgtgggaatccagccacctttcagtgaccacgaggcttctgggatactgctcttcctccatctggccccctgaccaacatcttctcccttttcaacaaccctcttgtttttaaaacaatgttcctcttggccaggcacattggctcacgcctgtaatcccagaactttgggagaccgaggtgggtggatcacctgaggccaggagttcaagaccggcctggccaacatggtgaagtgaaaccccatttctacctaaaatataaaaattagccaggtgtggtggcgtgcacctgtaatcccagctactcaggaggctgaggcaggaggatcacttgaacccgggagacggaggttgcagtgagccaagatcgcaccactgtgctccagcctgggcgacagagcgagactccatctcaaagaaaaaaaaagtcctattttctcctctctttgttctctgctttcctttcctctgtgtgtgtgtgtgtgtattttgtgtgtgtgtgtctgtgtgtgtgtatttagagagagagatcccaggtctaccacttccttggttgtgtgacctttctgggctgggtttcctcatctgtaaaatgaggttgcttcagaggagtggatgcaggcaacgctcctggcacacagcaggtgcccaccacacgcctgtcttccgtttcctctcttccctgttctctccctcatctcttccctcctttgtgctccttctctcgggagtgacaggcaggggaggttggggggtggtgggaggccttggggagttgaagtgaggccaggggtgagggagtaaaggatggttctggcccaaatcagccttctttctcctccatcccctctttcctcccaggtccctgcgccgacagacctgctggagcccagtgatgccaggccygaagccgaggcggctgatgacttcccgcccaggcctgtgagtacctccccgggcctccatgtgggggacggggttctcttcaacttcctgggaaactccagcttgtcttctccctccctgagcttcagtttcctcatccatgagctgagaacaacaactccagccttccccgggcttgtggcccgtggccaggcagtgtgcagtgggaggaaccatcatcttcttcttatggagtgaaagtggcctgttgttctagatggtggctttcaaaccttccttagccttgtcgccctttgtgtaaaggaattgaggcccagtgtgtgcaaaggacgagggctgcaggtcagggctggtggcccctatgacaccatcggggaacccaatttgaacaccccaggggagcaaaaggagaggaagctttaaatctccctacatttatagaggaagaagacagtttggactcaagtgtgggctgggcacsgggcctgcagcaggctctcagcagggcgtagatggagcagccggggcagccctggctaggaagtgactctggggtgggacccaggcgtgaaggagggacggggggaagcagcaagcagaggggatagcaagtgccaaggtcctatggctggaaagaccttgactttcttagcaatggaaaaggaggccacggtggcgggggaggccgtggaggcagggagccggcagggaggaaagtggactttcctgcgaacgtgacgggaagtcacatggggctcatygggaacgggatgtgatcggtttctattttaagatggccctggctgcctgtggagactggattgtgggaggtgagagaggaagctgggagccttcctcctagcgtgggggtgtcagtgggaatagcggcagtaagaactcaacagggcgtgtttttgtgtcactggtgtccctgagctggaggtgatctgtcggggctgcagcaggcggaatggccccgtctgggattgagccacctgggagctgtcggcgggggttggggcrgccttcccacctccacctgggtttctcttcacactcaggagrtagatctggcctcggaagtggccttagaggtggtgcggacagcagagcctggcgtgtggttggaggctcaggccccggtggccctggtggctcagcctgagcccctgccggccacagctggtgtgaagagggagagcgtgggcatggaggtggcrgtgctgacygatgacccgctgcccgttgtggaccagcagcaggtgctggcccggtaagcagcagagcatggggctggcgggaccccacggtgaggtgggaaggggctgccttccaggatggaggcgggggtgccatagcttcctcccagctctcccttctaacttggcagggyggccctgatcctctctccaggcgcagtggggactaggcgggcagggctctgctccagacacaggctgccaccagcatcccttgtcaggcctgctggccttcaggtttcaggagtcccagggcagagtgtcgcaggcttttctcccatcccagccaagcccccagccccctggcctccagtgccctcctgaatgtgagacccactcacccacaggacaagccatccccaggcactctctgggaccgccgggggagctgggctttcctcacttgccgtgtggctttgttaggttacttaacttttctgagcctcggttctcacttccgttaatgatgatgtcagcccgacctccatgtcrtggtcatccaggggttcaacaggcggagacccagtcccagaggccacagttcaaacactgagcgacccctgagtgctgggcccaggacacaaggatgagcaagctgctgcctcagccccaagggcccacaggccagggcggaggacaggcagggccaagagggtcctgttctctagcagttcccagcctgcctcctccactagctctgccacctcgggccaacttgcaacctctctgtgccttcactgcccatcttcagaatgggcgatatcagtagtcccagtgtgagaagcttgtggtgagggtcaaaatgggcattgcctgcagcgtggcagccccgcgctgggcacgcagtaaacacttggcacatgtcctggctgttttcacagtgtggtgtggagggaaggctggrgggccttcacagaagtggagacagctgaaaaaggtttgctgcaggggtggcatcctagagaaagggcacagcacctgcaaaggtgtggaggtgggacccggcccgggcatttggagacgtgccagccgtgagtgaaagctggagtgaaccgcagagtggggtgcaggggagatagagggaagaccctatgtgccctcctcgggtgcttgggctccatcctgatggagacccacagcaggatgtttttttctttcttttttttttgagatgaagccttgctctgttgctcaggctggagtgcagtggtgcgatctcggctcactgcaacctctgcctcctgggttcaagcaattctcgtgcctcagcctcccaagtagctgggattacaggtgtgcaccatcacgcccggctaatttttgtatttttagtagagatggggtttaaccatgttggtcargctagtctcaaactcctgacctcaaatgatttgcctgcctaggcctcccaaagtgctgggattacaggcgtgagccactgcacccagccaaaaatttgtacctctaaaggacaaaactctaaacgtttttgagcattttggacataaatagtctyaacaatgtattgtgcatgtccctgcctgattaaatattgtgcgctgagtgtattgaacatttttcacaacccagggttcttctcatcatgccagtggccttagacacagaactagcctgctcagctgcagggagcaccagcgtgggaagtccacgggtcaggggtgggttagctgagcccacaggaagwttcccgccctgacctgccactgtgrtcaagtgcacaggcagggagttgggcaggaatcctggttgtgaccctgagcaagcagcgtcctgtcgccgagcctcrgtttccctccctgtgaagtggggttgttggaaggatctggggggcccacgcatagcctggagcctgctggatggcacgtgctcggtgatgggcagatattgtcttgtttgctttctcctccacgccggcagtctgcagctgttggagcagcaggttgtgggtggagagcaggccaagaacaaggacctgaaggagaagcacaagcggcgcaagcgctacgcagacgagcgcaggaagcagctggtggctgccctgcagaactcggatgaggacagcggggactgggtgctgcttaacgtctacgactccatccaggaggaagtgcgggccaagagcaagctgctggagaagatgcagaggaaggtgaggcccagatgcagccccccatgcccagctgcccagagatgggtgagaccccccgatccaggcatccctacaccttgtaggaagccaggcagccctctactctttacacagcaggcatgcatgcatttattatttatttttagagacagggtctctctgtcgcccaggctgcagtgcagtggtacaatcagctcacctcccagaatcaagccatcttcctgtctcagtctcccgagtagctgagactacagatgtgcaccaccacacctggctactttattaaattttttggacaggcagggtctcaccatattgcccaggctggaaagcacttattaagtgcctgcagtgtgacacaccctgttctgatgctggcaggcagagcagtcacagtgacagatgtgtccctgtcgctgtggagcttgcctcccagtgtgtgtgttgtgtgtgtgcacgcatgcgggtatgttgtatgtgtgtgcacgcatgcgggtatgttgtatgtgtgtgcatgcatgcgggtatgtgttgtgtgtgtgtgtgggtgtgcgtgtgtgtaagaaataacacaggagagaaataagtaagagaatattgaggagtggtcagtactgtgaagagaataccagggcgagacaactccgtttttatgttctcatttttgttgatggttaagtgcacaaattacaaacgcacaacttgattcatttctacgaagtgctttccacaaagcatgcccatgaaacgagcacccagactgggaacctcagaaggacctgggctaccacaggtgggggacagggacattctcctggaggtagagacttctgggggaactgagagagagaaccagtgctgggtggcatgaggaggagcattgggatggagcctgaagcaggagtgaggtcagcatcttctaggagcagagaatgggcagatgtggctggagaaagggagtgaggcctgagtcagggagagcgtgattctgcccacggtgagggtcatgtgcactgcctttggagctttctctgtgctgtcygggtctcctgatcctcatgatggctccttggccatctgcagggtcctccccaccccctcgcccccaccaccgtcctggcatcctaaggatcttgccaagcataaaactttgcctcttttggctgggcgcggtggctctcgcctgtaatcccagcactttgggaggctgagatgggagggtcactggaggtcaggagttcaagaccagcctggccaacatggtgaaatgccgtctctactaaaaaaaatacaaaaattagtcyggcgtggtggcgcatgctgtaatcccagctactcaggaggctgaggcaggagaatcccttgaacctgggaggtggaggttgcagtgagctgacatcacgccactgcacttcagcctgggtgacagtgcgagactctgtctcaaaaacaaaacaaaacaaaacaaaacctttttgcctctttaacctctttagttttttattttcctggattttttttttttttgagacagagtcttgctctgtcacccaggctggagtgcagtggcgagatctcagctcactgcaagctccgcctcctgggttcatgccattctcctgcctcagcctcccgagtagctgggactacaggcgcccgccaccacacccagctaatttttttgtatttttttagtagagacggggtttcactgtattagccaggatggtctcaatctcctgacctcatgattcgcccacctcagcctcccaaagtgctgggattacaggtgtgagccaccatgcctggcctttcttggctatttttatatcttttcttaatgctccttgttatatttccagttgaattcattctcccgtagatatcttgaattaggtctacatttctaatattttttcctttcttttcattgatgtcctatttcatatcttcttgatttttttgtccctttctaagtttttcaattttggattagaaatgttcatacctgtgaatgcctgtttaagaacgttttattcaaatgtattctaattggagttattttttatttcttatttttaagagtctcactctgtcacccaggctgaagtgcagtggcacgatcatagctcaccataaccttgaacccttgggctcaaacaatcctcccgcctcggccttccaaactgctgggattacaggtgtgagccactgcacttggccttgtgttacatttttatctgctggcttggttctgtgagcttgtgctttcggggagaattttcttcactgaaatgttttgatttttattttctgtttcttctggtagctttggttagacacatctgttcttttctgtttactttgtaaacagtcatgtttttctggactatcaataacagctgaaggcagagatgaagtttgaggtggtatcttagttttcttcattcgatagcacactcttctctttgtatagtgaagtgtagttttaaatagaactctaggccaagcacggtggcttatgcctgtaatctcagcactttgggaggctgaggtgggcgaatcgcttgagcctgggaggtggaggttgcagtgagcggagatcgtgacattgcactccagcctggatagcagcatgagaccctgtctcaaatcaatcaatcaatcgatctctgatttgtttcctattgctgtgttaacaaattactataaatttacttacttaatatacacaaacatatcatctcacagttctgtaggtcagagtccaggtacagtggggctggcttctctgcttagaattccacaaggctgaaatcaaggtgttagcagggctggacttctttcaggaggttctaggggaagaatccttgtccacactcatttcaggtgttggcacaatttagtccaatgaggttggttgcgggactgaagtccccatctttttgctgactgtcgrctgtgggtcactcttggcttctagacaccgcctgcattcctgggctcctggatccctgcaaagacagccagagtgggaagcagtccctctcacgcgtggaatgtctctgactccactcctgcctcatctttcagaagcatctcttctaccacatctctcctgcctgcctctctgccttctctgttgcttttatttttatttttcattttattttgagatagggtctcactctgtcgcccaggctggagtgcagtggcacaatcatagctcactgcagccttgacctcctgggctcaagaaatcctcctgcctcagcctcctgagtagctgggactacaggtatgcaccaccacgcctggctaatttttttattattattattttttgtagcggaggggtcttgctatgttacccaggctggtctcaaactcctgggggtcttgctgtgttacgctggctgtcccaggctcaaacgattctcttgcctcagcctcccaggtagctgggactgcaggcgcatgccactgcacccagctaattgttttgtagagaaggggttttgccatgttgcccaggctggtctcgaactcctgagttcaaatgatctgccggcctcagcctcccaaagtgccgggattacaggcatcagccactgcacctggctgcaaagtcctttttttttttttttttttgccaaggaagataccatattcacaggcacaaaaacagggggcaaaaatcttgggggtgaaagcttatttttttggtggtggttgtcttttgtggttttctcttgtttctgcaggactttcagtttccacctcaagggcgcttcccacttctaaatgcagcaccttccggagactaactcctctggtcctgcacacgtactggtctcttccatcagtttctcattttcaggtttcagatccgtttttaggattgtcttgctccttgtggagggactgcaccctgccttccatcayctcattcctcctcgccccatgctgtcctggatgctctctgcttacctccccatggggtggctccggggctgtctgctgcacttgggggtttatctctgtacttccatgtaattcaaaggttccagcgttctctgtcttcaggtcatgctgtaggctggttaagggtggctttatttttctctcctggttcttctgcatgtttttttggaggtcttgttggagagattcaggcttagatggatgttttcatcctcaggtacctaggatgctgtttattttattttatttttaaattttttttgtataaggaaatatgtacgtatktgtgtatacacactgttatggtttggctgtgtccccacccaaatcttatcttgaattatagctcccataattctcatgtgttgtgggagggacccagtgggagataattcagtcatggggtcggtttcccccatactgttcttgtggtagtgaataagtttcatgagatctgatggttttataaggggaaacccctttctcttggttctgattttccttttgcctgccaccatgtaagatgtgcctttcaccttccaccatgattgtgaggccgccccagccatgtggaactgtgagtccattaaacttctttttctttataaattacccagtgtcgggtatgtctttatgagcattgtaaaaacagaccaatatacacacacacaagaacacacgtgccatctytttcttagataaaagtagctctagtgcaygctttcttctacctagcttttctcacacaacaatgtatagtatcctgaaggtcacagcagtatggagagatactcctcattcttttctgtttttgagacggagtctcgctctgttgctcaggctggagtgcagtggcctgagctcggctcactgcaatctccacctcctgggttcaagagattctcccacctcagcctcccgagtagctgggactacaggcgtgcaccacccatgcccggctaatttttgtattttttagtagagatgaggtttcactgtggtggccaggctggtcttgaactcctgatctcaggtgatccacccayctcggcctctcaaagtgctgggattacagacgtgagccactacgcctggcctcctcattctttgacaactacatagctctccattgtgaggctggatcattgcttattgagtcagtcctctcttgataaacacttggggtgtttccaatatcttgtaataataaaggctgctgtagtaaacagcctgtgcatatgacttctgtattcttggtaggtttctttggaatctattcctccaactagggatgctgggacaaagggtaatgcaagtgtgattttgctcgatgtcactagacatgccaacttctcctccataaggattgtattgtttggcatttccactagcatgtatccatgtgtttctcaccaacagagtatatttacaaaaacctggattttccttttctttattgagacgaggtctcaccctgttgctcatgctagagtgcagtggcacgatcacagctcactgcaacttcaacctcctgggctcaggtgatcctcctacctcagcctcccgaatagctgggactacaggcatgcaccaccatgcctggctaatttttgtattttttgtagmgacggggtttcaccatgttgcgcaggctggtcccaaactcctgggctcaagtgatcctcctgccttggcttcccaaagtgctgggattacaggcatgagccactgcatacagcccctaaaacttggatttttaccactttgttaggtgagaaataatatctcagtgtagttttttgttgttgttgttgttgtttattttattttatttttctgagatggagtttcgttcttttgcccaggctggagtgcaatggtgcaatctcgactcactgcaaccttcgccccccaggttcaagtgattctcctgcctcagcctcccaagtagctggcattacaggcatgtgccaccacgcctggctaattttttgtatttagtagagataaggtttcaccatgttggccaggctggtctcgaactcctgacctcaagtgatccgccccaccttggcctcccaaagtgctgggattacaggcgtgagccactgtgcccagcatcaattttaatttgcatttttcttattgtgagcagtgttgaatagtttttcatatgttttgtggccatttgcagtttttctccaaattatttttatttcttttgctcatttctctattagcatgkttgttctttttcttttctacatgtagaaactctttatacattaggaatattagctcttggtctgtgatataaattgtaaatttttttccagtttgtcttttactgtgctttatgatatttttgccatatgaaaattttcaatttttagattttgtcaaattgaccaactgttaaaaaattattgcatattaattttcaatcatgggaaaattccctcatgttttttttctagaacttctatggtttcgtcttttttacatttaaatctctgatccttaatctgtcacaggggtagagaaaaaagagtaaattaatgatctagttagagtttatcttggtacatgtgtgaggagctgcttcgatattgtcttttctttttttctttttcctttttttgagacagagtctcaggctggagtgcagtggcacaatttccgctcactgcaacctccatctcctgggttcaagtgattctcatgcctcagcctcctgagtagctgggattacagatgtgcaccaccacgcccagctatacaaaaagaagtacaaaacttacattccaaaaacaatgaaaaaatgtgaaagtaattaagaagaccaaaataaatggaaagacatctcatgttcatatgaattggcagactcatattggtgagaggtcagtactcctcaaattgatctacagattcaaggcaatacccattagagttcccgctggtttctttgcagaaattgataagctgatcctaaagtttacaatgaaattcaagggactcaaaatagccaaaacaatcttgaaaagaacaaagtgaggggaatcacacttcctggttgcaaagctttgctacaaagctaccgtaatcaagactgtgtggtactggcatgaggacagacacacagatcaaaggaatacaaatgagcatccggaaataaaccctcatatttacagtcatcaattaattttttttttttttttgagacagagtctcgctttgtcgcccaggctggagtgcaatggcgtgatctcagctcactgcaagctccgcctccggggttcacgccattctcctgcttcagcctcccgagtagctgggactacaggcacccaccaagatgcccggctaattttttgtattttttagtagagacggggtttcattgtgttagccaggatggtcttgatctcctggccttgtgatccgccctcctcagcctcccaaagtgctgggattataggcatgagccaccgcacccggcccttttttttttttttgagatggagtcttgctctgtcacccaggctggagtgcagtggcgtgatcttggctcactgcaacctctgcctcccaggttcaagcaattctcctgtctcagcctcccaagtagctgggactacaggcacatgccaccatgtccggctaattttagtattttttagtagagatgggatttcaccatattggtcaggctggtctcgaactcctgacctcaggtgatccatccacctcggcctcccaaagtgctgggattacaggagtgagacaccacgcccagcctgtcaattgatttttgataaggatgccaagataattcagtggtgaaaggacagtcttgtcaataaatggtgcggggacaactggatattcacatgccaatgaataatgttggacacctacctcacactccatacaaaaattaactcaaaatggatccaaacctaaatgtaagagccaaaactgtaaaactcttggaagaaaacgtaggtgtaaatctttgctaccttggattaggcagtggtttcttaggtatgacaccaaaagcacaagttacttaaaaaaaaaaaaaaaagagggataaattggatggtgcagtggctcatgcctataatcccagcactttgggaggccgaagtgggaggatcrcttgaacccaggagttcaagaccagcctggacaacatgggggaaaccctgcctctacaacaaattttaaaaatattagccagatgtggtggcatgcacctggagtccctgctactcaggaggctgaggactggaagagagggaggactgggaggtcgaggctacagtgaaccaagatcaygccactgcactccagcttggtgacagagtgagaattttatggcatatgaattatatgaattatgtctcaagaaaactgtcacaaaaattatcgtgctgggtgcagtggctcacacctgtaatcccaggactttgaggggccgaggcagaaagactgcttgaggccaggaactccagacaagcctgggcaacacagggagatcctgtctttacagtaaattaaaaaattagctaggcgtggtggctcacacctgtagtcccagctatttgggaggctgaggtgggaagattgcttgagcccagaacgtcgaggccacagtgagctgagaaggtgccgctgcactccagcctgggcaacagagtgagaccctgtctctaaaaaaataacaacaaacaaaaattattgttagtgattccagatgtacaaaaacatataatgattattatacccactaacaccacgtgcttactacccagtctaagaaatggagcagggccgggcgcggtggctcacctgtaatcccaacactttgggaggccgaggtgggtggatcacctgaggtcaggagtttgagatcagcctggccaacatggtgaaaccccgtctctgctaaaaatacaaaaaatgagctgagcgtggtgactcaaacctgtaatcccagcttcttgggagttgaggcataacaatcgctcaaaccctggagtcagaagttgtagtgagctgagatcatgccaccgcactccagcctgggcgacagagtgaatctgtctcaaaaaaaaaaaaaaaaatggagcaggctgggccactgtagctcacacctgtaatcccagcacttcagaaagctgagatgggagaactgcttgagtccaggagtttgagaccagcctggtcaacaaagtgagcctcgtatctatttaaaacaaacaaacaaacaaacaaacaaaagaaatggaacattgttaatccagttgaaacccctgtgcaccagcctctctgtggctgtcctgcccrcccatgtcctgccagctgttctcaaatgggtatcagtgcatgaattcaaacatccttcttttatttttatttatctatttatttatttatttattttgagacagagtctcactctgtcgcccakgctggagtgcactggtgtgatcttcaccttcacctcccgggttcacgtaattctacctcagcctcctgaacagctgggattacaggcgtgtgccagcagacctggctaatttttttgtatttttagtagagatggggtttcaccatgttggccaggctggtttcaaactcctgacctcaagtgatccgcccgcttcggccttccaaagtgctgggattacaggtgtgagccaccacgccctgcctcaaacatccttctttactaatcagactgtacctgctctttgaggaaacagactgtgcaccaggtagtcttggggctcagggagagggtggttatggctggggctggcagtcacctgtgctcaggagggaccgggggaccggtctggcagacttgagcaggagaccaaaagaatctggaacccttgatcagatcaaggtgggtcttactcttaggtccattgtttaggtccagtgtttgtcacaccgtcacacagggctgtggcagtgggagagtgaggattgtcaagtcggagagtttgtgcctgttgtcctccttagagatgtcacttgtgcaattctctgatatcctttagaacggtggtgttggatgtggggacttctcaaaggctcctgaataaaatgtacaatgggagatagtgactgaggggctggctgttgggattgctgatcaacttttcccctacattttgcagggctggggggacacattaggtgctcatttaaatgctgggtggagagacagcagggtgattggatagacggaaggatcagtgggtgtgagaggaggtggatggatggatggagggaaggatggctggatggatggtggggatgagaatggatggctgatcaggccaatgaacagacgatgcgtggctgctggcaggacagtgagtggacagggtggttagatggaaggggaggtatctttccctgctcactgcttgtcatcctttgctttcagcttcgggcagcagaggtggagatcaaagatctgcagtccgagtttcagctggagaagatcgattacttggccaccatccgccggcaggagcgtgactccatgctcttgcagcagctyctggagcaggtgcagcccctgattcgcagggactgtaactacagcaacctggagaagattctgcrtgagtcctgctgggacgaagataacggcttctggaagatcccacatcccgtcatcacaaaaaccagcctcccagtaggtcaggagcttggctggcccttgccctcccctccctccttcacggcttaccatcctgcagactggcagggagtgtgggcctctccttgcaggctgtgggtgtagaagacacgtgaccctgggtacctgatgcgtcaggactctgagaaagtggtgtgttctggaggcagacagatgtgggttggaattctggcagcaccgttccctgtgtgccctttttgggactcggtgtcttcatctgtgaaatggggatgaataacagcacctttcttaaagttgctgtaaggtttgaaatgtgttaataggccaggtatggtggctcacgcctgtaatcccagcactttgggaggctaaggctggcagattgcttgagtccaggagttcgagaccagcctggccaacatggtgaaaccctgtctctaaaaaaaaaaaatagaaaaattagccaggcatggcagcatgtacctgtagtcccagctactwtgggggctgaggcgagaggatcgcttgagcctgggaagtcaaggctgcagtgagccaagatcgtgccactgcactccagcctgggtaacaaagtgcgaccctgtctcaaaacaaaccccgaaaaaacaaaaaccagaaatgtgttaatacacagaaaacccttacagcagtgcctggcacatagtgatgctcgctgcatgtcattgttatcctaatcagcattgtcactggttcatccttacgacagccctgagaagacaggttttctacccatttcacataggaggacacaatctcagagggtccaaagtcacagtcacagcagtgagtgggaggaccatggatcaaaacccacagttcagagtttcaggcctggttccacttccgctcttgctgctgacctcccgtatggccttccgaagatcactgtccctctctgggcttctttacaaagaaggggttggatcagatgaccttgaaagcctcctcacctctgatgagtctcagagtaaagccagacatgctgtggctctttctccagccgtggacctgactctgcccatttggggagcccgcagtgccccccaggagtcctccctcttgctcagcgtgttcatccaggtccaacatctctgatgtttattgacaccatccctgctgagaccccagcccgcctccatttcccacatgctctgggatgcagcagccttcctgtctgtccccaccctcgcctgctgtcttgcctggaagccccttggctgctgtcttgcctgcaagcagatgagggtcttctctggtgcctgagcccctcctgctgtctgtttcttaaaattatcccttggcttgggctgggaagtgtcctcccctgtttaagccygagccaggcctgacccccacctccacctgtgccctcctctaggccttgcaccaggcagcagtgacttcagcttttgttttctcatagcagtttcaactgggccacagaacaaaccagcccgcaaaacctctgcagcagacaatggcgagccgaacatggtgaggacygcgggagagggagtggggtgtcgggggctgggagggctttgcccccagtgctgtgggtcagtgttactgtggagagctggttttccactttcctcccrcctaaggattaaagaaggggccaaggctggatccttttcatgcccctccmttggcacctagaccctcaaccccctctggccctcattcaaaggtactcacagtcataaataccaagggaaagtagatggttcggtggcccatcttgccggtgaaggacagagacttcagcctcaaactcagaggacaagcagcacattctggtttcctgctggtaatcctcagaccaagagggtcctcacagggttcatrargcagtaattgggattcctaagtcactttattttcccgtctctcatattctgtctttttttttttttttctttttctaagctcagtggcaagacctatctcctatattttatagtgcaacagaaatgcatgttcttaaagcatgggtggtggtggttgttttttttttttttttttttttttttttttttttttttttgagatggagtctcgctctgtcaccaggccggagtgcagtggtgcgatcttggctcactgcaacctctgcctcccaggttcaagcaattctcctgccttggcctcagctgggactacaggcgcgcaccaccatgcccagctaatttttgtatttttagtagagacagagtttcaccgggttggccaggatggtctcgatctcttgaccttgtgatcctcctgcctcagcctcccagagtgctgggatttcaggcatgagccaccacgcccggcctctattttattttattttattttatttattattattattattattattattattatttcgagacagagtctcgctctgtcgcccatgctagagtgcagtggtgcgatctcggctcactgaaagctctgcctcccrggttcagccattctcckgcctcagcctcccaagtagctgggactacaggcacccgccaccaagcccggctaattttttgtatttttagtagagacggggtttcactgtgttagccaggatggtctcgatctcctgacctcgtgatctgcccgcttcagccttccaaagtgctgggattataggcgtgagccactgtgcccagctaagcggggtgttttcaacgaaactcttccagttttttaagttagctgggagctactgtccccagcagccaccagaggcccagacagaagggcaccagcgggagtccaccagtcccttggggtggcctggtcagcaggcacagcttccatgacacaactccatgaacaatgatatgaaagttgttattatttacagatcctcaggctaggcagggccaccagagagggacccaagcagctggaccccctcttggtgtccttgtgtctgggcctctggtggctgctggggacaataactaccagctaagttaacagagaaactctaagagttttgttcaaaacaaggggtcaacaaaatttttctgtaaaggacccgatcataaatatcttgggctttgtgaactatgtggtctctgtcacagccactcaactctgccactgtagcacaaaaacagccacaggtaatacacaaatgaatggtgttccaataaaactttatttacaaaaatagcctgcaggccagatttggtctgtatgccataattagctgattctgccttaagccattacaaatatttcagaaaacccacatagaatatacctttacagttatgataagaccactcctaggctaatgaattccaaccaaacatctctggctgagcaactcaggctgcaaggggccactcatggtggtctagagcttgattggcagcttcataaaaaagggaaagttgctgccaggaaaaaagacattcttaatctgggaccacaaagaggttatgtcagaatgctttyagctccaagcgatagataccaaagcaaacaaccataagaaaaataaggaattttttagttcatgtaagtggaccagtttcaggcacggctggatctaggggctgaaacagtcagggtctgtgtctgtcttcacctctttttttttttttgagacggagtctygctctgttacccaggctggagtgcagtggtgcaatctcggctcacggcaagctccgcctcccaggttcacaccattctcctgcctcagcctcccaagtagctgggactacaggtgcctgccaccatgcccggctaattttttgtatttttagtagagacggggtttcaccatgttagccaggatggtctcaatctcctgacctcgtgatctgcccaccttggcctcccaaagagctgggattacaggcatgagccaccgcgcccggccacctctttttttttttttgagacagagtttcactcttgttgcccaggctggagtgcagttgtgcgatctcagctcaccgcaacctctgcctcccaggttcaagcgatcctcttgcctcagcctccagagtagctgggattacaggcatgcaccacgacgtccagctaatttttttgcatttttagtagagacagggtttctccatgttggtcaggctggtcttgaactcctggcctcaggtgatccgcctgccttggcctcccaaagtgctgggattacaggcgtgagccactgctcctggcctrtgtcttcacctcttgttcctgcttcccttggtatgcwaactgaaggctttctccacatggccggaaggatggctgctggccattggtgatccaaaaggaagagaggcctggtctgttaaagcaactgtccccagtctttttggcaccagggaccagtttcgtggaagacaatttttccacaggtcaggacggggtggggggtctgatagtttcgggatgattcaagtgcattacatttaatgtggacttcatttctattagtattacattgtaatatataatgaaataattatataactcaccatcatgtagaatcagtgggagccgtgagcatgttttcctgcaactagacggtcccatgtgggggtaatgggagacagtgacagatcttcaggcattagattctcataagaaccacaacctggatccctcacacgtgcagttcacaatagggtttgccctcctatgagaatctaatgccaccactgatctgacaagaggtgcagctcaggcaataattcaagtgatggggagcagctgcaaatacagatgaagcttcacttgctcacctgccgctcacttcctgctgtgcagcccagttcctaacaggccagggactggtaccagtccatggcctgggggttggaaacccttgtcttaaagcatcctgaaactagagcttggggagagattctgattggctctgcctgggtcatgtgtctactcttgaaccaattactgtgtttaggaggatgtggttctgtgattggtgcagtctgggtcacatgtccagctgtgtaacaacaggatgggagtcagatgtagtatagggcactatgaatgctcaccccactgggatgtcaagtggaagaaggacaattccctgaaaagggagatttagattgaagaaaacaagtccataatagtggggaaaaataatagctcttggtgataagaaggtttggattccagttctaatgatcacaaatgtacctgtgagctgaggatagcaacgcattgcctattctatgaacatgtcgtgatagatttggggyttgtgtatcamcccggcccccctgttggagctggcaggacaccctgttttgagctttgtaggacagaataaggcacttcccatctcaaggaaggggaggccgggtgcaggcttggctggagactgacttcctggccccgagctgcctgggatcccacccccgagtccaggatctacggtgtagggtacaccagagtgggcagtgcctgctccagccctgtgacaacttsggggaagctcggggcggcccccactgccccaggataccagaggctktggagccctgtgccaggggcacaaacaaggggacgtgaccacgggcatctgcatctcggcaggaggasgaccgctacaggctcatgctcagtcggagcaacagtgaaaacattgccagcaactacttccgatctaagcgggccagccagatcctcagcacagacgccaggaagagcctcagtgagtgtccctcccctgtccccaccctctccacacaactgggagaggcgtgaargggatagttttgaagtcagacaggcctgggttcaaaaactcctttmcctctcggagcctcagtttccttagctacaaaatgaggggggtaacaccaacttcttaggattaggtgatacgaggtgaggaaacggcccagcccgggcgctggtgctcagtacagagtctcctctttgctccagtcttgtctcccctggcccctagtaggcactcagtgcatggctcaggggcctggctggggatgcacgggtttaggcctcactagttacgcgccagcttcctggcgagtcacacgccagcattgtgacttcctccaaatgcagattgacttcacttatcaagggccacaaatgcaacacacgcttttaagaattaagcatcacttcattttatctgcttttaaaactgaaagcaaagcccgcagagcttccaataaaatagcaataaaaagcaaatcttggccaggtgcagtggctcacccttgtaatcccagcacattggcaggctgaggcgggtggatcacttgaggccaggagttcaagacaagcctggccaacatggtgaaaccccgtctctactaaaaatacaaaaattagccgggcggtagtggcgtgtgcctgtaatcccaactactcagggggctgaggcaggagaatcgcttgagcttgggaggtggaggctgcagtgattcgagatcctgccactgcattccggtctaggcgacagagtgagaccctgtctcaaaaaaaaaaaaaaaaaaaaaaaattagctgggtatggtgatgcatgcctgtaattacagctacttgggaggctgaggcatgagaattgcttgaactcgggaggcagaggttgcagtgagctgacacagtgccactgcactccagcctgggtgacagagtaagactttttctaaaaaaaaaaaaaaaaaaaaaaaaaaagagcaaatttgagttctatatattgaggttatttaagagacagaatgggtggggsggggggaataggattaattgagtgcctggcattgtgcccatgttgcagatgaggaaactgaggctcagagacgaagcagcttctctaaggttgtaggaagcagtggagctgggctttgaacccagacttgtctggcttgagatcccaggctgcctcagtctgatgctttaaaaccccarctccccagcccagcctctttggatgcagacatagttgctgggtctgagacctcagccagagcagcctcgcagagsctggggtcccagctgcagggccagggcctctggctgggcaggggggcgggagtggggtgggccaggctctccatcctacccacttggggcattttctctccatccctgcgctcctggcttaccagcacctctgccctcttccccacagcacatcacaactcgccaccaggcctcagctgcccactcagcaacaactctgccatcccacccacccaggcccctgaaatgccccagccccggcccttccgcctcgagtccctcgacatccctttcaccaaggccaagcgtaagaaaagcaaaagcaactttggcagtgagcctctgtgagcacagctgcttgccattgcctgccttataggcatgtagagactgccaggccctcccagggcagccccaaccaggtctcctcccacctgccacacagcgctccggggcctgagggctccctcagccctgggaagacacattcccttccctgttccccagagagcccacctccgccctgggcaggagcccctcggaggctgtatagtcctccttagagaggcctgctccagctgttcataccacatcagtgtttccgtctgctcacctgccacagagcccacacccatgcccaccagtgttggtctttgcctcaaagcctgagacctgcttcacggccttcaccagccctgatggagagggcagcagctgccacgtggaggaagctcaatatcagctgggaaggaactgtgcctctgtctgactggccccacttcctaagcactgccctgccccatggggtggcacaggggtcccacagcaggtcttcctgcactgcccacccctggctggtctgtggcccaaggaaggccactccacattaagctgcccaataaactgcttttaagataagctccccttctctgaccctctgacagtgtcacttggggcccctccctgccattgtggcctggctattccagggaagttctttctggaaaaagggttcttttgcctgggacctccagggtttctgcagctccctataatagtgagtacattcttctgggaagagcgtctgaattttcattagattctcgaaggacctgtgacccaggaaagcaagaccccttgttgtggaaaatagggccatgtctcactgaggccagaaaagggcccagcttttgacagtcctgggggctgtgctgggactgggtgtcctgatatagccagaaatgaatccaggccaccctgtttgtgcccacataggggggtacctaggacacagccttccccttgcacactctatcccaggccagtcctgtggggggctccacaatctaagggaaaaggcttggcctttggcacagtcctggaacctcatttcactctgagcctcatctgtgaaatggggataacgcccacctcacagggttaatgtgaagattaaatgagatagtatgtaaagctcctggggcatagcaggtgctctgtgttagtcctcctcctccctattttgtatcaatttctatggcaggccccacaagccacatgcctgggccaaggagcacacactcttgagaagctggggtgggggtgtttagacaactacagagatatccagccagaggcaggcagcagtacgtcctgagtcagagccggtgagatcaggtcttttaaaaattatttttattttctttgagactgagtctcgctctgtcacccaggctggagtgcagcagcgggtaatctcagctcactgaagcctccacctcctgggttcaagcgattctcctgtctcagactcatgagtagctgggattacaggcgcccaccaccacgcccggctaaattttttgtattagagatgcggtttcaccatgttggccaggctggtcacgaactcctgacctcaagtgatctgcccacctcggcctgccaaagtgctgggattacaggtgtgagccaccgcgcctggtcgatatcaggtctttatggggaacaaagagtgcctttctgaagggagcagtgctgggtggggctcccagaaaggatggagaagatcccaggaggtttaagatgggggtgtaaggagggcgctcctggcggagagcgctgcaaagcaaaaggcaggaggtgtggaactcagggtgttaaaggctgggccattcctgttccatggaagccctgagcaaggactgagaggggacgaggctgctgagatgagtgtaggtggagacctgagagcaaagagccttggggtgtccctgtgccgtggccgactcttaacagtttaacactgttggctctgaattagaggcgggcggatgtggtactgtgtgtcgagggtggaagggcaggagttagggtgcaggagccaggagctctgcagaggcttaacttggggcagagccagtgggaatggagaggaagtagagtccgttaagaagatgtatggagggaggttttgatttttgctccattcttgggttggtggacaagtgtccgaaaggaactgctaccttctgtctctacagttgccgtcaccattggcctcaggattgtggttgggacccagaggacggtggaagtcttgctgcttgtggtagtttttacttaaacccctggtggacaaaggcaggtctgagatgaaccgggtggcctctgtattaacctagaagaggtgggagccacattattgaatggatgttcactctagcccggcgctaagtgcttcaaaacctgccatgttcctcccaagagcccagagatgaggtaattaaatggctgttcctaaggcacacagataaacagcggagctggacctcgtccttagtcctatttacagccagggaaactgtcctggagagaagtgcaatgcccgggtaacggctagtgagagatgcaacttggaaatggaaccatcgctaggccagtctactgcccatccacagtctccagcgtgggccaccgagctgggcagcacaggcccgtccatgccatggcccctggagccgtgagcggcaggaaggaggctccaagtgccctgaccctgatcttattcttccaacccctcctccctagagatggtggaggtggggcctagttcctggtcccgagccttcccaggcccagtgaagaccccgccagcaagaaggtggccaaacaccctgtccaggacgcgacggtcaagcccggggaggaccccgcaagctccagagggaagtgggctccagactagggggcgggaggccggcctgggcggagcaaagggcgctcggcctcgttgattggccgcggctgcagagctgtctctctaggattgagccttttctttagggggacggggccttgattcactcccaccaatagggttcaaggaatccacctcccaccagggcacttccggcggcgctctccgcgccttatcgccaaagctgcggctctggacgcccagccgcggcgtatcccgatcacttccgggtagtgctccacgggcacgagccgcgattgggctaccgtagatggggtacttccggtgtgcaggtgctgggtccttcggcaggaggaggaagatggagcccagcaccgcggcccgggcttgggccctcttttggttgctgctgcccttgcttggcgcggtttgcgccagcggaccccgcaccttagtgctgctggacaacctcaacgtgcgggagactcattcgcttttcttccggagcctgaagggtgagagcggggtccgagggggtagcgtgtgggggcctggggttggtacagcatcgagggcattgaccactctccttccctctccctttcctggagcaggccgcccgggtctggcctgccgcttggcgtgcgggtccgcgatgtctgcagcaggggtttcccttcgcgtcccgtcttcctcaactacctgttttttcttgtccagaccggggctttgagctcacattcaagaccgctgatgaccccagcctgtctctcataaagtatggggaattcctctatgacaatctcatcattttctccccttcggtagaaggtaagggttccgcgtcgcccctagcactggaattcgagacccgggacttgatggattgctttcttctggttcttgggcatgtcctgggtcacaggatgggttgccagtcctggatggtgctaccacggagataaggaaaatgctcatttctgacctgaccctaggagggtacatctttctaaaagaaacagctaaggattgtggagtcaagtgttgctgcagaccgtggaacccagggccctgctgctctgctgagaagggagtttactctgtaaagggcctgataaaaagatggaaagctcctgggttgggtttgcctgggtggaaagaggaaatggcctgttattaatatggattgctataaagaggcattgtgcattgtggcagttgatcttaagaattcagatagattcatagtctcgggctgaaaaaagagccttagcaattatctaccaccccacccctcctcccatttgaggctggataaatatgtccagcagccttgcagtgggctagtcgtttaacagaatgaatatcttggccagattatccagttgatacttgagtattcttgttttacgaggcaatccactccaccactgaacaattctgttaagaagttcttatattaagaaatattgtctcctgctttattttgttcttatgctccccagcaccttagagaatagatagaatgcttatcttgtttgcaggcatagccttcacataatcacagcttattcggttgtttctcctccagactgaacatccccagctccttagctatttctcttttgccatacttttttggtgagcatgttagtcattctcttctttatttgcttcagtttatctttttcttaaaagactcaagttgtccctgtctgggtaagacaggactgccttcctcccttcagttaatgaagcttaggaagttcttcattggtgccttttttgtttgtttgtttttttgagacagggtcttgctttgtcccccaggctgagtgcagtggtgctatcatggcttactgcagcctcgacctcccaggttcaagtgatcctccctcctcagcctcctgaataactgggacatggcttctttattctctgtagttcatgcgagattcagttccaccgaatccctcaagtactttccctaggcttctgttacttactgtgtcactcccaactcccttgcaacatgtgcttttggaattggctttttggaggcaagattagttaggcggatgtcaccccaaattggtagaagttgaaatcttctgatgactgggctttggtgcagtaactggtgtttgccaagtttttgctgtgtttgaaactttgaaataggtaccttacagtggactgggtgagatcttaaggatagggagtctgccctggaggagttttttcagtctgtttttgaggaaataaagacctgaaatgagttaccaaaccctgtgtcaggatgtaagatgaagcggaggcactgtcagcttgtataggtcagaaggaaaaaagcagtgaatgagactgctcgggagagggctgagagaggatactgttggtgggagaaatgacagagagtgtaaaacagtgtttcccaaactttagtcatttgcacacgtccttcatggtttttaccatgttacgtatctcctgtgctaataactacctaatatttttcttcaaattgacctgcttaaaaaaaaaaaaagaaaaggctaggtatgatagcttatccctgtaatcccatcactttgggaggccgaggcagaaggattgcttgagtccaggagtttgagactagcctgggcaacatagtgagacctcatctctacaaaaaaatgaacaaaattagccgggcgtggtggtgcatgcctgtagtcccagctactggggaagctgaggtgggaggattgctgaccctcggtggtcaaggctgcagtgagctgagatcatgccaactgcactccagcctaagcgacagagcaagaccctgtctcaaaaaaaaaaaaaaaaagaaaagagaaaaaaaactaaaacaacattttaaaagggaaacaatagcgagcccagaattaccaccgaaaatggaaatccagtgtcatcacttgatgtacgtagaaggtaactataaatagaataaaaacaacacccgtaagttctagccagatgctgctgcctgccgaaggctttgaacctgaggttccctcttgaaaaaggagattagcaagcattagaagctctaacaactagtatcaaactaagacattctctttgatggagaaagcttgaaaaataaggaaagggagtaactttctgtctctgagattcaaggttatttaaagcccggttcccgcattcgcgttgctgccttttctgcctctggtggagtgggttccacactttggaaggtgctgctgtgggaaatcctcaggcgttccttgggaggaagctgcagggcagggttcggggtaggggtttggtgtctgctcccagggccctgccctcgtcccatgactactgtcactgtcaccctctcaggtgagtgagtgctggcctggcttccctgtctgtgccccagtggcttctttgccctctggcatcggaaggctcccaggtcactggcaatcatgtctacaagggaagaaattttcagcacatcctctatacccgggaaaaaccggatccctgttatagatggggaagtgggttcagaagggtgaagggatttgcctagttttaactccaggtggtctcgatttcaaagcccgtgttctgtcagctttacaagagtttctcaacaggtgcattcgtgacgtttcagactggataattttatagtgaggctgtcctgtgtact

SEQ ID NO: 98091 - DNA, 20772 bp, Homo sapiens
ttctagttttattccagtgtggttgggcaatatacttgatatgattttgacttttttgaatttcttgagacttgttttgtggcctctcatatggtctgacttgaaaagtgttccatatgtgatgacaagaacatgtattctgcagtagttggatgaaatgttctataaatgtctgttagatctgtttggtctaaagtatagtttacctctgatgtttctttgatgatctggatgatccgttcactgccaaagtgggttgttgaagacccctaatattactgtattgcagtcggtctcttcctttagatctagtaatatttgctttatatatttaggtgctatggtgctgggtacatgtatatttactatttttatttctctcgctatattgacttctttaacaatctataaggatgttctttatttccttttacagtttttgcttaaagtctatttgatataaatacaggtaatcctggtcttttttgctttctgtttacttggcatatatttttccaacccttcactttcagtttatatgtatcttcgtaaagtgagtttcttgtgggcaggatatagttgaatcttgattttttttttcaatccattcagacaacttttgttgttgttgttgttgttttgtgtttttcggtgtttttttttttaaagaaaaatttacctttgttatagattaaagggtacacatgccggtttattacatgggataatttcacgatgctgaggcttggggtcccagtgatcctgttaccaaggcagtaagcatagtacccaacagatggttcttcagtccattcccccatctctctctctccctgctattgatccccactgtctattgttctcatctttacattcatgtatactccatgtttagcttccacttataaatgagaacatgttgtatttggttttctcttctcgcattaggtcacttagtataaaggcctcctgctctatccatgttgctgcaaaggtcattatttcattctttttcatggctgcatattattccttgtaaatgattcctctctattgtaaatgagattgtgctcttgaattggttctcagctggaacactattggtttataaaaatgctagtgattgtcgtacattgattttgtcaattccaggagccttgtgtcagattctttagggtttttcatgtatggactcatatcatcagtaaagagagagagtttgacttttcctatttgaatctctttcatttctttttcttgcctcattgctctggctaggacttccagtactaagttttttgtttttgagacagagtcttgctctgtcacccaggctggagggcagtggcacgatctcagttcactgcaacctctgcctcctgggttcaagcaattcttgtgtctcagcctcccaagtagctggaattacaggtgcatgccaccacgcccggctaatttttgtatttttggtagagatggggtttcaccatgttggccaggctggtctcgatctcctgacctcaaatgatccacccacatcagcctcccaaaaagtgctgggattacaggcatgagccaccacacctggctgatttttaaaagagtttccagtaagttttagttactatgttcattgtaaggattagtctaaataatgtatcccatcattaagtctcagttgctagtatttttcctctaattaattcagtatgtatttccttagaataaagaccttctcacagacaacctggtttagttaacagaaatgagggtatttaacattgatataacactattgtctagttcaaggtccgcattcaaattttatcagtcctaacaatgtcttttgtaaaaaaaagtttttccccttgcctgtgttcaaacccagatcatgcatggttttcatgtccccttagtctcctttcatttggaatagttcctcgatgtttatatttcttgaccttgatactttagaaaaatacagaccagctattttgtataatttccctaaattttgttttatctcatgttctcacattattgggttcaagttatgcattttcacaagaccactgtagtgatgatgtatactcaattgttgatatttggatttttgccattttttttgtttaacatttttatttgacccacctaattgttgggggttttttaaaatttcattttaatttctcatttttaattaattatttatttatttttgagacaagatctgttgtctcaaaaacagaccttgtctgttgtccagggtatagtgcagtagcacaatcatagctcactgcagcctcaaatccctgggctcaaggaattctcctgccttagtctctgggtaactgggactataggcgcatgtcaccatgaccagatacttttttaaaaaatagtttttagagagggggtcttgctgtgttgcccaggctggtcttgaacttcagggcttaagcaatcctcccatgtcagcctcctaaagttctgagattacaggtataagccaccgtccccagccttcattttatttattagctttttaactgtacctttctgtattttttaaattcttttttccaaggattatcatatcttatcacagtttaaagttaatattgtactacttcacttaaaaataagaacctttcaaaagtataggtccacttatctcctcatcctttgtgctattattgtcatatatatctacttacattaaaaaaaagtctgtgcaggcatggcttttaaaattcagaaaaatagtatgtatgtcttaaatttacccacatctttactatatctggaactgttcatttctccctgtaggtcagggtttccacgtggtattgtttctctttagcctgaagttcttttagcttgtgtgcatctactggttgtgaattctcttagctttggtttatatggaaatgtgttaccttcgcttttgaagggttattatcttggagataacattctgctgacagtattttcccttcattacttcgaagtatctcctcttgttttctgctctccattgtttctgatgagaaatcagtcaacatttgtatcagtgttccactatatgtaatgtatcttttctttagaccagttttgaatttttctctttgaatttcagtaatttgcttattatgtgcctaggtatatttctttttcttttcttttttcctttttttttttttttttttgggatgaagtcctcgctctgtcgcccaggctggagtacagtggtgcgatctcgggctcactgcaacctccgcctcccgggtttaagtgattctcctgcctcagccttccaaatagctgggattacaggcgcccaccaccacgcctggctaatttttgtatttttttagtagagacgggatttcaccatgttggccaggctagtcttgaactgctgacctcgtgatccacccgcctcggcctcccaaagtgctgggattacaggcatgagccactgtgcccgaccatgcctaggcatatttctttgtatttatcctcccttgagtttattgagcttcctagattttataagtttatgtttttcacccaatttggcaaaatttagttattatttatttaaatgtctttttctgtctcatctctttcctattctcaactgcaatatcttacatattatttgttatgttccacagttcactgaagctttattttaattcttttcctgtgttcttccgatttgataattactattgatctgtcttcaaatttggtgactaaacatggtctccaatatgctattaaaccatgtagggatttttctcaattattgcacttcttagtacagtaaatacaataatttccattggttcatttttatagtttcagtatctgtgtaagattcattgtctgtttattcgtatggcactattttcctttacattcttgaatgtatctttaatagctgtttattgcctttgttcactttgttccagtatctgtgattcatatgggggtcaaggtctatagactgcttttttttcttggctatgggtcacaattccctgctttttctatgtgtaataattttttattacatagtagacatagtaaatgaggaattgtagagattctgtactcttctgttcctctgaagagtattgacttttgttctattaggtctgtctccttcaatgtggacagaagctaaaatcactgccctattttttcagctttcagatgttattgtttttgagcctcctggagtcagtgaccagacaataatttggtcagaggttatcctcaaatttaggggcttctctgtggctgtcttattttcaggagtaccccctaattttgcagctgctctgctagtcccaacctatgttctctgaaacttcaaaccagtgagcctgtggctttttgccagcctgtgatgcatggattgagaagtaccctccagcataagctcacaaatctctctttttagtggtgacttctcttcagttcctttggaggagctttcaaatcttttttttatgttttgtccagaacatataattgttacctgtgagagggttacttcaaattattccactataaatggaagccagaattttcctacccttaaattttttttttaagatgagtctcactatgttgcccaggctgtctttgaactcctgggctcaagtgattatcccacctcagcctcccaagtaggtaggcctattgacatgagccatcatacccagttaattttttaactttttgtagagacggggtcttgctgtgttgcccaagctggtctcaaattattttcctgcctcagcttcccaaagcactgggattacaagtgtgagccatcatgcctggctccttaaattttaacaacatatttgaacttacatttttccctcaacacctatacctagtagactattatttatcttctcccttcaaaaaaaaaagttattagtgttgacaatgttggcaggctttcatttcccttctggccaagttgaaaattcatttaggattttagttcctgctttggggattttatttttgtatactattttatctaggggtatgagtataagttcaaaataattttccttcagaagtttgaagatgttccattttcttccagcttaccattattgccagtgaagagcttgttagcaatatattttggggaaggggtcatgatgtgtatatatgttgaaattttaaattttatatacagtaaaattgacttcttgttgtactgttctaagagttcttagaaccattctggctactttcattgtggtggaaacagctcagatttagatcttgcagatttggttgtggaatctgcctatagctctctgtagctctgtaaccttggtaaatttggaacaacatggagtatgaataaagaaaacatctctgtgtcacatttccttatttgcaaaaaaggatgatgccatctttcctgtctaccactctgggatctttcctgaggatcagatgagaccgtgtatgtgaaaacatcttgaagaacataacacttatatgagggaccgtttagtatttccatttgccctcctatcctgtatagatgattcagtaacattgtgtgtgaaaaaaatgatttaagcattatgaactgctgcaatatatagcaaataaggaatcattatactattatcattatgttagtagtggactactgaagactagaaactctcaagagccaaagaagagttgagtttttgtatgccataataaatggaagagtgtgtagggatggaaaagggggggtgtcagaagtacctgcacgtttacaccctgtaaaagattaatacctactttgcattcctctttgttgtctctgcccttggagactcctttactttcataaatatggaatgcttaaacaatgcacccagtttagtgtcggtgtggaaggaagctcatgttgaccctgcaactagattaatgggggaaaaaaaggtctgtcttgagcctgtgtgctttaaccatgtgaaatttattgaaaaaaaaatcaggaatattgagagaaagagttggagcagggaagacaggacagagaagaatggataaaagcatgaatagaagaagaaagataggatgtttgagcatcctaatgctcaggcagaggcagatgtggtcagttgttgactggggaaggaactaaatataaaatgagccaaatagagtgatggaggctttttactgcctgagtcaaaacaagcaagggcccaggcttctagatcttattgcagaaagattgatttcgacagcatataatttgcatcctcgttccatgggagaagaggttcatagatgggcacatgttctcacacccttgaaccatgaattggagttttccacctgaaaggagcagagacagactagtgagcagaaagcttcgtcctccaaccttagcctttatctgtgatgctcagtgtctccatgcaggatggtcaagacctccacttgtccattatcccwtctctttctcttctatttgcttcctctgggaacttgccccccatcagttgcccactcstttcttatattgtcagtccgtttctatggactccttttttggtttacaaggatgctcaggttaccccaaatttaaaatactttctcttaatcgtgctactcccctagcactatccttcctttccttacagccttcccagagtctgcctatcctcctcaccttggcccctcacagtttgaatcatgaccctactatgccgaaacctctctcaaaagtcatagagatctactcatcaaattctgcatccttttctcaggacttttttaacctctttgcttgcacatcatactgtggactacaccctttcttttcttttcttttttttttttgagacaatctcgctctgttgcccaggctggagtgcagtggtgcaacctcagctcaccgcagcctccacctcccaggttcaagcgattgtcctccctcagcctcctgagtagctgggattacaggcgcaccaccacacctggctaatttttgtaattttattagagacggggtttcaccatgttggtcaggctggtctcgatctcctgaccttgtgatccgcccacctcagcctcccaaagcgctgggattacaggcgtgagccactgcacctggcctgaaactacaccctttcttgatactctctgcttctgacaaggtcttccccactgctcatctactcctctggatccaattatttctgctctcccaagttgaactgtcacattaccaactaaccgatgatcacctccatgccaatatgctaagggcatctaaaacttactatgcccaaaatgaaactcattactttcctccccaaacctgcttgtttttgtgagtttcctttatatacttcctgtaccacaccttcaaaacctctgtcatctctgattcttccctttgctttttccatccaatttgttgtgaaggtctgtcagttctacttgcaatctagtttgtttctgtcactcggtttccatttatcaaacatttggccgggcacagtggctcatgcctgtaatcctagcactttgggaggccgaggcaggtggatcacttgaggccaggagttcaagaccagcctggccaaaatggtgaaacactgtccctgctaaaaatacagaaattagccaggcaggcgcttgtgatcccagctactcaggagggtgaggcaggagaatcgctggggggcagaggttgcagtgagctgagatcgcgccactgcactcagcctgggtgacagcaagactccatctcaaaaaaaaaattaacggacctagtaaggaactatgctagactctggagaatgcaaagattaataacatcatttgatgtcaagagctgagagagataaaaatagccaattattacatgcaatggaaaaaccatgttatatgctatgctggcaaataaatgattaattttggtattttgattaaggggggcatagtatcaaggaaattcttaggaaggaagtgagactgaactaagctatgaagaattgttagcatttcgattagaaaggaaagaggataatttcaggctgaagcataactggagaaaacatgaaaacatgaaactgttcaggaagtggtgacttgcgtagctggagtaagtgtagagtgtaaacagggatgcagaatgagtgaaaagacatgggagagatgttaataagtctttccatcagtcactcctattaccttttactgaaatattacaatagccctttaacaggttctcttgtgtccactgtaacttgcttctaaggtaatcttcctgaagaagcgctttgaccaacctggatgggctactggctctgccttttcctagtaacaggtctttaggcaagctcctactttgtgaggattaaatgataaagggtattttaaaatgcatatcatactgtctggaagcaataaataaaggagaactattaaattcaaactctttttaactgacactgaagctcttgtatcagctggctccagtcaacctttccaagtttatcttctatgtctctgctcaccatcctcaaaaaactctttgctctttttcctatttacatcctgcacttttctgacttttgctttcattccctgtctctggaatacccatcaaccattgctgtatgactaaatcagtatctctttaatcttgactgcacatcggaattgtctaggagcctttaaaaaaatactgatgcctggattctattcccagagatcctggtttaattgctttggtgcaacctgaacattaggattttttaaagttgctcaggtgattgtaatgtacaaacaagattgagaactcctggcccaaatcgtaaatgttccctcaaagcattttctgaataccaccttctccccatacttctctgcacctctaatctttcctttccctgaactctctgcactttatatgtgcctttcttaagacacaattttctcccttgtgatattgtttcttatttcttacattataacataatctctttgtacacagtttatatttgagtcatctttctgtagttcatggtatgtgtcattaatgttttccgagtgatggtggatgaatgtctgcatgtagaaataggaaaatgacatttctagtgaggaagaagaaaaactacaagaggagtcaggcagtgtggttcctgggatggaaataaccagtatcccttattttagggatgaggaactgagagtaagggtaaagaggtgtgggaatatactcagactggtctggtaacctgtgaacacagacttgtagacagttgtttattagtttatccattcaatatttactaaatgcctaccatatgcttgacattgtgctaggtcccaggaatatatagctatagcttacagtcaatgtcccaatggctcatggggcaatcaacacattgctttaatgggaagagacagctagtctctctgccttctcttaggcctaatgggaagggcatctatctcttcatcagtacctggtggtagaataaagaattctattctttattttctttctttctttattttttttagatggagtttcactcttgtctcccaggctggagtacaatggcatgatctcagcttactgcaacctccgtctcctgggttcaagcgattctcctgcctcagccttccaagtagctgggattacaggtgcccaccaccacacctggctaggttttgtatttttagtagagatggggttttttcatgttggccaggctgatctggaactcctgacctcaagtgatccacctgccttggcctcccaaagtgctgggattttaggtgtgagccacctcgcctggcaagggattctgttcttagtccttgaaaaaataaagttctgaatcttcaagttccttgattctttcctgggcccctgtcattccaactgccccctaccagaagtaagttgatgtgttctcaggcagaaattgcctcatgaagtccccatataccttcaaagatcttctttaacatgcactgctgggaattctgagtgatgcaggttccctctccacgaagacattttccttgatcattcatataagcacatgtgtagcaatttaatattgtgcctgaaaatttaagataagcctgatgacatttccttgtggwccagatgtgtagccttgattcacatctgggaggggtaatgggcaataggtagcatggatactacayatttatttcttagttctttttggggatctgggccctgtgtctgatagacctgtgccagaggaaattccttcattcttcttcatctctgaccctcattgctgatgaatcccaaatttctctctctaatatttttactccagtccatatctgcattgacttcctgggcatttatcattagatacccttctgtcatgtgacagcataggagcaaaatgtatgtgtgattttcatctcccttttgtactccccatcatactctcacccacaaggcacaaacacttggagtcatatttgaccgattaataagctatgttagaatgctctaacattgcaaaccctgtgaagagtgtgtccttctccattttcaaattgaccttattgaaggtcactaacagcactatctttgaaatacttccatgttgcctcttttactgtctctactgctaatcccccagtttgggaagcctaaagaagtggaaagattatgggctttgcacagtcctaagtttgaatccaaagtttgccactttctagccatgtgacattggacatattacatttgcctcacttctttcatctgaaaatttagaataatgatatttaaacaatagagtgaaatgtgaactatgtctggtaataacttgaggcatcaaactttgggtcttgttttctttcccagaacaaacccttttaattaagagccacagactagcagttgtcctaggaactcatttctggatctaaaagaaaatagctttacattccatgttcaaacaaaaagaaccaccagctgcacacatctctttacagaatttgtaaagttatagcattctaacatggtttaagaggcagggttagcataaagctaatgaaggttagtcttcagaactctgcactttcatgatccccttctagggaagtcggaagggctgtgtattcataatttcttatggagagtgaagttggaggggtactggcattttgtatttgttttatttttcttatagagggccctccatattgtttagctttcaggctcccacatgcctcttggtatgattgtgacgagaactagagagactttgagagagctgtttgtgaagtgttaacaattctttcttctgcactcyttccctaaaattgggttttcttgatgtgttccccatttcccacctgaagtsaatgactggcacccatccaaacatggctcacctgtagatgtgcttgaaattggtgcacctgaagcctgttcccctgaagcgtgctcacctgaaggctgttcacccgaggcctgctcaccagaaggctgttcaccsgagccatgttcacctgaaggctgttcatctgaaggctgttcacctgactcaagctcactcaaaggctgttctcyggagaggtgttcacctgaaggctgttctcctgaaggctgctcacctacagtatgctcaccttcagcatgttcagtcgcagcgggctcacctgaagcatgctcactctcagcatgttctccagaagtgtgctcggccacagtgtgcttgcttgaaccatgctcactggaaccatgctcacttaaagtgttcaggcctgaagaagtctcatataaagcctcagcatcagaagggttttcaagtgaaaagaactcacctggaagttgctgaactgaagtttgatgatctatggagccagaaagctcattaggctgacttgatgttcctgggatggagaaggaacagaagagagttggtgaagctgacagaatgggataaagactatcttcctatggagttaggctaatgttatgagactcctaggtttcctatgggcctagattgggcacctgaagactgcagatgttgggaaaaatcaactaagtatcccaaaaggccatggaggacagaagtgtttagtgaaacaaacagaggccacctctgggattgaagggaagaatcttaagttccccaatattaagaactacttaggagaatccactcatccatgtacaaaaaacccctgaaggaaaatgaatgtgcctccctgacaaagtcagcatcaggaagtcaggataccatccctgatagaatcagaagttcgccaccaaccctcccattcctctrtgggtgaaagacaagaagagtagagatagaagagggagagagaaagcaagtagttttcaatacctgagtatttgtaacctaaattaagggcggaagagttaacctttggacagggatgacaagtatgagcccacaaaaattatcagaagggattaagccgcctgtatttggtaatgtcaagtattttytcacactcaatccccaatccatgtgggktggggattcagagagcaaagttgctataagctattaaggtaaaaaaaaaaaagtctaggcatattatatatatatatatatatatatagacacacacacatatatgaattgtatccttgtgacataccatttacattcacttcatggagttgtcctgagtacttaataagataaattgtgaagtgcaccattgcctagtactcaattttatttttcttttcttcccaccttacactgggaattacaaaactcttacatggttatttttttctggccagtctcttctacctttaatccgtctctttctttttttttttttgtttcaaagatagagtctcgctctgttgcccaggctggagtacagtggcacaatcttggctcactgcaacctccgcctcccgggttcaagtgatyctcctgcctctgcctcccgagtagctgggattacaggkgcatgccaccatacctggctaatttttgtatttttagtagagacagggtctcgccatgttggccaggctggtcttgaactcctgacctcaagtgatccgcccgcctcagcctcccaaaatgctgggattacaggcatgagccactgtgtctggccaatccatctcatcattgactgtcagacaaatattccttaagtatattttaagtgaacagaagcacaaaacagataatttgattattactctttgattaaactgagccmcctagaggaagacaagtagactacaacaaccaagttatttaattctagccaaaagctgagaggaattattggatctttgaggctgaggtagtctaaaaccccagagtactcaaaactctaagaatcttgcgatagatatattttcttggcacagtgcagtacttacaatcagtgactttctaaatgactagggtgagaatatgttgataaaggaaaggtaagatttagtaaagcttttaggaggtttttattttttaaacttattacataaatactatctacttgactggtttttcaataattaacacaagttttgataaagagatgtttctgatatagaaaggagacataaaaagcatgctaatttcttgatcttatagtttatgactcgtgtcaccatgtgactggcacatactatcacctggtggctgtgtatctacatttttgagtcaacttttgaaggtctaacaaagcaaaaagcaaaacctctgacagtcgacattatagaaaatacattgttttttcactraaagctcagagctcatggcctctttctgctgtaggaggcaggagggaacacagcacaccatgaatgggggatcccaaaagaagagatgatacagaaaacctgattgatataacacagccatgaagaagaggcttatgaagtctctggcctatagctctgtcgtgttctgaggttgttttctgaacacatyacatcttcccatctcccatctttccttggcacattaaccacacaaggatccctcacatttaattggtgggacaaaccttcattgggcttctacagaacccctaagcctactttttcatctcatgcagcatcaggtataaatgttgagtggctaaaataagtagaaaccagactgtgccaagccagtgggaccctctgactgtaaagctrtgactagagaaatcaactggttcaggagctctccgagttggacttgtttagctgctcttgattctgactcagattggtttgggtgactgagagactggtcttccttcttcaaggcctgaaatgtcttaagggagaccccttttgtatttacctgaagcctagatcaaacactcacctctggcagatccaagcagataaagactcattagcaagagaaacctgttcatctggatttaggaaaagaggggaccccagtgtgggccacagcttcttcacagagctatgaagcaaactgcgagcaaaagcttccagtgctgaagcagagcttctgggaattctagaacctcagaagtaacccatgtttcttcacaatgggttgggctctgaggttcttgtgtagcctgttcaggcaagttggcccttagcaacccmctgcttatttcactagtgaagaccmatgattattttctgtgtgcagggtagtgtgttggggctatctgccctatctttaaaaaaaaaaaaaaaagtattaccaaaaagcacatattttttgtaataaagtttaaaagatatctactgtcttttaaaagtgtttttgacaatgagatgtaattgttgattgttttctgtttggctttctaaatcagcctttcttggctctgatctgtaccctggaaggttgacctctgttgactttatcacctgaatgctggctggatttggcttcagattgggtttatacaggattggaggggagaagagagaaagagagagaggaagagggaagggaggaatggggagaaagagagcgagactggaatatttgttcttcctattcccttcctgccacagttgacactggctgagtctacatgacagagcttctgttgggtgtcctctcttccatggctccagctctcatccatgctatggtaatatgtttttctccccctgccctcttaggcctagggatgataatggtttcctgctgttactaaaatctggatgcccaaacttatctctttttttgtttgtttgtttccttaaccttgcccacttctgtaaatagtcttttcatacagacctttatcaacatggttttagcaggaaacaggtggcaaactcaaatgggtaactgaggagagtttacacagatatgggcagagtaaagagatcaagagacagtagaaagctgcgttttgagctgcaacttggtagcaagggggtggccaagctgagaagatggatgcagtgaggcatccacctgatataaaactagaacttatggaggattgagtggcaaagatctggtagcttccatttctcgctgcttctctgctcagctctcttgaacaactttgttttatataccactgaatgctaaatctagaatagatgtacttattgttacattttgaaaggaaggtgagggttaaagaaagagagagtggcggctctacatcaaatccaggctttctgtctagcataagacctacagaggtgggggactagcttaatgccagtgcccactgcttcgtacaggttggggtacttgtaggtatgagcaggacgggtctgggcagtatggcttgctgcctgggaagatgttcccataatgaggcattttggcccttgttcccgcagaatgtgatgctgatgttccttggactttttcccagcagagtgtgataaagtcagggaggcagttggacaggctgtttctaagggcccaaacccccgtggaatgcttcactttagccaaggtctgcaaaatggcgggggtcggtgggggttacgaaatggtgcagtttggactaacactttatcactgttataattatttgtttcatgtttgtactccccgttggactctaagcttgaatgcagagaccctgtcttgactattgttgtagtcccagtacctagcagcatgcctaagcttttcctgaaggaaggaaggaatgagttaccttttggggcctctctctgcctcatagaggagaatttatagagaatcatgtaagagaatctatagaagagaatctggattaaggttctgggttagttgaagacagcaagatcaccagggatcaaaagttacttgacttgagttagaggataaagctaggatttctgagcctcaggcaggttcctttacagtagagaaaggtatgaaagagcatgctatcaataattcttttcctccaggatgagtttggaagaacagctatgagccttgggtctgacttttgttgatagaagcagtggaaattagtagaagggaagaggtgctatctattccaccctaacttagaacatagaaagacagacagtgggctctggagagctgatgctttcagctgaaaacaattgtttttaaaaattccctatgtaaatttgcttcaaaataacctaaatgagggattgtagcaatgaacggggaaagaagataaaataagactggacacagtggcttgtgcctgtgatcctagcactttggaaggctgaggcgagcagatcacctgaggtcaggagttcaagaccagcctggccaacatggtgaaaccccatctctactaaaaatacaaaaaaattagtcgggcatggtggcgggcacctgcaattccagctacttgggaggcgaaggcaggagaatcgcttgaacctgggaggtggaggtttcagtgagctgagactgtgccattgcattccagcctgggcaacaagaaagaaactctgtctcaaaaaaaaaaaaaaagaagataaaataagattggtcctgtgtgcatgattgttgaagctgtgtgatgggtacatgcgggtactctctacttttgtatatgtttgaaactttctatactgaaaatcttcagggtggagggcagaaatacctatttggaaagcctagataatcaatgccttatttaaaatagcttcaggggatgatggagaagtctttttaatatgtgtgtgcattaagacctagataggagcttaactgctccctattatacaactatcctacacccagggctggcttcctgagcaggcgcatgggcccacactcaaaagggccctggtttcttgctttgctttcaatctctggaaattcttcgtcactttctaacaaaggcgcctcatttttgcgttgcactgggtcccacaagtgctgtctccagtcctgcctagatctcattttccagtccccttaggtatatcaccgtctggtattggaaagctttggcctctgaaaccaggttgaggaagctttcttttaggaagagctggggcacacctaagtccaggctgctggcttcaagcagacattcctccccttcttgcactcttccctacttgataaatatgttcccatataagtttgttgtgctctgatttttagtagaagccttctcagaaacatcccttccaacctctccctctactccttagatttcctcaggtttgatgctttgctagaaggacttacagaactcaggaaagtgctttacttatatttaccagattattctagaggacacagcacagtaacagccacatggaagaaatacataggaaaggtatgtggcggcaggtggggcggggaggtggttgggtgcagagcttccgtggcctctgtgggtgggccattctcccagcacatcagtgtgttcatcaacccagatggtctctgaatcctgtttagagggttttatggaggcttcattacataggcaaaattgattaaatcattggccatttgtggagctgaacttctcaacccttgaatcatgggattggtttctctgatgaccaacccgtaccctgaagctacctaggcccacttcatgaatcatctcattagcataaaaagacagttccaagggtattaggatccctgtgccaggaaccaggagcaaggaccaaatagatatttttatgatgtcacaaagaaattcccaggattgccatgaaggaaggcctcagcatgattgctgtgcagctggggtggagacaaccctcccagataagggcaggagaatgaatggcccaaagtggaagtctccagagaaataataatatattatctgatagctccgatgacagccatgtacaaatgtgtactgagaagctcttggaaggtggggaagcttagccagaagcataaaattaattgagcaaatgataatgtaattattatttgtaggaaaaagaatataaaatcatgtaataaaaaatgtcatcctagtactcattttatttcacttgtgaatactatttaaatatctaccagtcagggcccacttgcaggacacaggagcttgtctggtgagttaccttcagcagaaaggtattaggttggtgcaaaagtaattgcagtttttgccattcttttttctttttttttttaatggctgccacctctatcacaatcaggaaagtcactgtagagtgtcaggcagcttccacaggaactgttggcttcaggagggcaccactgtgtgagccaggaatcaggagtgggctgccactaggacttgtagctgtatatgcactccacgcatgctagacgggcattggcaagacatggtgtcttgttcctcttctctcactatcataaagctggtacctggatgtagaatgctgcttctgcaaaaacaaccaacaaaataaaacacaaaacacctcacaaaattccaacatattctcaaacatcggaaaactatagacatagcagaaagattgtaatacctaaccttgttttaagactctcccttagctacctaaccttgtttcaatatgaataggctctcccttagttgagaaaaccggacgaacaccatttggctccttcatttacaagacatcaaggactcctcacccatccccttcctcaaggagttaacttgtgtaagcagatcgaagagtccaattaactgataaggtactgtggcaagcaatgtccatagttcccaggaattcgctcaagagatagcaccataaagcctcggcgtttgtgtccagcagagcccccgtacctatcgccttgtgataaatttaaagcccctgctcctggaactgtttgttttcttgtaaccattcgtttttttttaactttttgcatgttttaacttctgtagaattgctacaattaagcaccccctcccatctctaaaccaaagtataaaagaaaatcaagccccttcttcagggccgattgaatttcgagcgttagccgcctctcgggcgctggctgataaacgactcctgaattcggctcaaagtgtggcgtttctctctaactcgctcaggtacaacaagatgaccctcatttctgcattcttaattagtgaaattttaatcacactggcaaatgtagttcttggctttccagaaagaagagctattagaagagattggggaagatgttgagggctaatgcaccaaggccagaacaacatagcccccatctcaaggccttcacatttactgctccttctgcctggagtccttttccttcagtggcaaaaactctccttgatctaacttgaatcaggctctcttgagtcctctgccccactaggcccaatctttggcttgcctttctctctgtttgtaaaatccactttgagcaggaatcctgctaagtcagtgcagtgaaaatccctgcccttgatatctgatcacctgaatatctatcaccctggcttgccttcagcaagaatctattgagtctagcaagaatcttagaagtttccacatggtaatgtcccatccaccgacccctaccctgctccttgactgtaacaccctttccttgtgttcagactacagcccagtctctccccactgcaagagcgcactgcattggtccctatgcctacagtggtagttccccctgaaacaagtcattgtctttagcaagcgtcctgaatacttgttttaacaccagataccagcatgtcttcctccctcagtctccttaattcggttctctgctgaaatatcacttctcagagaaacccttttaaaaaagcactccctgccactgtctattgtcttagcctccttcagttttcttcattgtttttatcattacctggcaatattttatgtatcattttgattttttatctgtatgagtgtcctctgtgtgtacactactctgtccccagagtctggcatatcttagacacgaaatagatgtctgaaaggacgactaagcgttgacttatcctgcactgtgaatcaactctattgagagcatggagggaggggcggggggatgtataaaggagggaagttctcatctatcatcataagaaagtccatcgatggccaggtgcagtggctcatgcctgcaattccagcactttggtagctgaggcaggcggatcacctgaggttgggagttcaagaccagcctgacaaacatggagaaaccctgtctttactaaaaatgcaaaaaattagccgggtgtggtggcgcatgcctgtaatcccagctactctggaggctgaggcaggagaatcgcttgaaccctgga

SEQ ID NO: 98092 - DNA, 32726 bp, Homo sapiens
cctggccaacatggtgaaaccctgtctctaccacaaaaaaaaaatacaaaaattagctgggtgtggtggcatgcacctgtagtcccagctactcaggaggctgaggcaggagaatcggttgaacctggtaggcagaggttgcagtgagctgagatcgtgccactgcactccagcctggcaacagagtgagactgtgtcaaaaaaaaaaaaaaaaaaaaaaaaaaaaggaaggagggagggagggagggaggaaggaaggaaggaaaggaaaggagggctgtttgccaggggacctgagcctctctcatcacagagagcagagaagctcaggccaggctgccccttgcctggctgaccctcagccccagtgctgcctgggcccccacagggtgagcttctgatgggggaggcctcctttgtcatattccagaagcagagctgaggctgtgggtggggagctctctggaggccacattgttgctgggttcagggcagcagcttctcacccaccatccctccccaggagtgacccacctgcggttccagcggccccagggctttgagtacaagtcagggcagtgggtgcggatcgcttgcctggctctggggaccaccgagtaccaccccttcacactgacctctgcgccccatgaggacacgcttagcctgcacatccgggcagcagggccctggaccactcgcctcagggagatctactcagccccgacgggtgacagatgtgccagatacccaaaggtaccagaccctggccagacatgccacatgcgcccatatcccctttgaaggctttggcccggcagcactagactccccgctctgtgcctcccctctctgcatctagagactggttgttccagataatgccacaaatcctcctcttcccctcactccatatacgtatctacctttccttttctctcatttctggcttccgatctatggtggtggccaagcttaactgaaacccacgcccctccctacagctgtaccttgatggaccatttggagagggccaccaggagtggcataagtttgaggtgtcagtgttagtgggagggggcattggggtcaccccttttgcctccatcctcaaagacctggtcttcaagtcatccgtcagctgccaagtgttctgtaagaaggtgagtactgcccccacttcccaccaacccatggccccttcttccttgtcatggtacccatctgtgcctttctcctctgcctttgttcttggcttccctgaactgggcaggggcaagttggtttgaaacctggggttgggtggtgagtggggtggtatcaggatatccctagaccctttaggacagaactggtttgcggatgcctccagaatcctgcctggtttacaaagactctttccctcagttaggggtgctccacataggatttgcttctgggagttcctccaggcaaggttggagggggtaaagaaacccattccttcttacaaaggagcccagcacttggagccttattgggctgggagagggaagggcatgttgggtggagcacaagtgaaactggctcagctctcaagaggaacaggaggagtggtggcaaggcagggctggtgggccaggttggccccaggaacacagctcaaaccctcaggccctcacacgggtcctttcacaccagcctggacctggtggcaggcccctgctcgtttctctgggcctggcaggtgagtcaggggtgctggaatgcagtgggcagaggcccagcccatgtgctgtcagcattcagagggtgacagctcccctcctgtcctctgccctctgcttcttaactatacagccccactttcctccctcggaagctgcagagggctccccgcagggcagcttccacccgctggtatctctttgagcccattcccatctgctcaggcagctgctgggtctccctgaggctgctctgtgaaatgccctttagccactaggtgcctggcagcctgaccagggaccactggagggagctgtaggacaggctgagcatgaaagctgcttcccaccccacagaccatcagctcccaatcaccaagggatctttcccatggccctggggtctctcacttccacctctctatgccctgggccaactccatctctggcctcagagcctggccccgtggcccatacactccatctccccaggctgtctagggaagggcacaagctagctgtggtcagaagagttctatcagtatggacacccctggggtttagggagactgagctgagatgggtcctgaactccagccctgtgtccccagatctacttcatctgggtgacgcggacccagcgtcagtttgagtggctggctgacatcatccgagaggtggaggagaatgaccaccaggacctggtgtctgtgcacatctacatcacccagctggctgagaagttcgacctcaggaccactatgctggtatgtcagggcccaccaggagggtatgcgggccactgtctgagctaggaattgaccctagctgtgcctggctgaactttgttccacccttccctaccatagtacatctgtgagcggcacttccagaaggttctgaaccggagtctattcacaggcctgcgctccatcacccactttggccgtcccccctttgagcccttcttcaactccctgcaggaggtccacccccaggtcagtccaacccataaccaggttctcttcctctttatcatttggggtctgagcaaagctcccaaaccttccccatcaaggaagaaatcgactgctgatgagaacccatcccctgggagattggtggggtaatggaatggaaaggataggtgggtgtcacccttaggtgctaaaggaggaggcaggcaatagggacttgccatctctgaagccaagatgtattgtccagaaggaagagctcaatcattgagctagtcctcgccaaaaactcggggctaccctcaccactaccctcaccaatactgagtcagtcctcaccctggacactgagggaacctttaccatgagcactgggctagtcactactcacaaatactggtctagccctccatgagaccctgagctgttcttcaacttgaacactgattaacccaacctctattagaaatgttgatctagcacttagcaaaattccactagacctataaacactgagccagccctcaccatgcatagtacaaagcaaaccatcaggagcactgctggctttttttttttttttaatttaaagaaagggtattgctctgttgcccaggctgtaatgcagtgatgcaataccagtttactgtaacctccaactcctgggcacaagcaatcctcctgcctcagcctcccaagtagctgggactacaggagtgcaccactatgcctggctaattaaaaataaaaaaattagagtcagggatgttgctatgttgcccaggctggtcttgaactagggagctaccccttcctctgaacactgcgttatccctgcctctgagcaaagagttagcctccacttattcctcctgcaacaggtccggaagatcggggtgtttagctgtggcccccctggcatgaccaagaatgtggaaaaggcctgtcagctcatcaacaggcaggaccggactcacttctcccaccattatgagaacttctaggccccttcccgggggttctgcccactgtccagttgagcagaggtttgagcccacacctcacctctgttcttcctatttctggctgcctcagccttctctgatttcccacctcccaaccttgttccaggtggccatagtcagtcaccatgtgtgggctcagggacccccaggaccaggatgtgtctcagcctggagaaatggtgggggggcagtgtctagggactagagtgagaagtaggggagctactggtttggggcaaagtgaaacctctgcttccagacttcagaaacaaatctcagaagacaagctgacctgacaagtactatgtgtgtgcatgtctgtatgtgtgttggggcgttgagtgtaaggatgcagtgggagcatggatgctggcatcttagaaccctccctactcccatacctcctcctcttctgggctccccactgtcagacgggctggcaaatgccttgcaggaggtagaggctggacccatggcaagccatttacagaaacccactcggcaccccagtctaacaccacaactaatttcacccaaggttttaagcacgttctttcatcagaccctggcccaatacctatgtatgcaatgctcctcagccctcttctccctgctccagtagtctcccttccaaataaatcacttttctgccttcagggtttctttattctgccctaggaccggaaggggcatggggagaggaagccactaacccagccagctcaccaggctggcccagacatctctcaagctgcccagtgtcctgagtaaaggagctggcccaaggcaaagtgccccagctagcaatcccttccccggcccaggggtgcccttcctgacagagggcctgtcagccactagtgtgaggcctggtgagcctgctcaggaggggcagaaacagagggtgtggaagcttctggaggaggttggctggggaagagaacggggtcgggggcagactcagctggagtctatagggagccagagccgcctggcttgttaccaggacctcagtcactcccagcccttctctgagcaaagggagagttgggcacctgtgcctacatggctcttccaggcagtgagatgatagcaggagacaaatgaacacatcacccaacctctctgggcctgttttctcatctgcaaaatggctggatgctctccaagtcgacttaaagacaggacaaccctctgagggaatttctctgagtgcgccccttttttttttgagacagagtttcgctcttgttgcctacgctggagtgcaatggcacgatcttggctcaccgcaacctgtctcccgggttcaagcgatttctcctgcctcagcctcccgagtagctgggattacaggcacgcaccaccacgcccggctaattttgtatttttagtagagacggtatttctccatgttggttaggctggtctcgaactcccgacctgaggtgatctgcccgcctcggcctcccaaagtgctgggattacaggcgtgagccaccgcgcccggcaagagagtgcccaattttaagtgatccttcctattgcttccacaaaacgcctgcataccacatatcctcaatttcgagaaaatagccactggtttagaaactctcaagtactgtgattcacagcacactttggaggttgcacgtttaggttctggaagaggccctcagacggccctttggctcagcggtcccccgaaggtgcctgtccagcatgtcgaggggtcctgaccagcctgcccgcggggtggggcgggcctggggcagcctgagagccgctccgcctggcgacccagtgggcctccgcgggcccgcccagaggcccgggcgggttccagcggtgggcgccggtcggggtgcggcctaggccgcgggccggtggttaggggctcgcaggccggccacgcccgagggtctgcccgggacaaacccttccgttagggcgcgagggaggcgctgcaggccctcagttcctcggccaaggagacaagcgcggcccccgcggcccgtcccgccagccttcccgcctccgccggcgcgcggcttccgcgtagcaggccgccccgctccccggcctggcgcgctgcctctttgtctctccgcgcctcccctcctcccagacaaatggctgttggcaggaaattggacgcgctcgggggaagccgcgcgccgcggggagggggcgccgcgcggccagcgggcctcgggtgcccccagccggggcgggggcggcggggatgttttgacatctcgtcaaagaaaggaacttgatgcttcgaaagtgcttttcacagccgggctgtgtctgctccagagctgatttatacgcagaatctgcgctcgcttctccgctccctcccccgtcagcccggggacggcgccggaggcgcgggcgcggctgtgcccggcaggatcgggtttatttattgcctctrgcccggagccggggcggcctggggactgcacagttccctctgcccgagcccctccccttctctccccaccccccaaagccggctgcttcccaggggcctgtcttccccaaacctcttaccagactctgggcggagccctccgacggtctggggtggaagtcggggacggaggcagagaggtggtaaggcgccccaaggggccgaattctgcactacctcgcacggacccagtggggagagggtggtggtggtggaggtcaccacctctgccctaaggtcggaaaggagccggagctgccagtctgaaactccctaccatcccagtagctctggaacccccttcctccaggggctatcctttctctccagggattcctctttccccagctccagacaaccccttactccaaggccccaggagccctttccctttagaataaattaaggaatctccagcttctactggatcccaggagaagaaaggtttgaaagatcacgtccctggcaagagccacagccctcagccaggtgatgggcacagggctgggtacaggtctatcacagtgccctggcttcacatctaaagagtccggatggccacagggtagagcagggacatgtgttcggctcccttaatgggtagcttgcggctggcatagtggtgcacaatttcagggacgctgctgaagggcgggctgttctggcccagcacatatttgtgttccttggttcgggacagcttcatgtgcatgaatccctggctgctcctgggaagaggagaggagactttggtgagtgggggctctcctcagccccctcatccatccacccagtaaccctccccaaccctacagcaartgtggtggttccgaagccagctgagaatgacaggtgattaggggaggtggaggtcagtccagaaagcaggggtggtggtggtgtaagtaggtagcactgggcattggctttgtggtaaggccactggttgtgccaagaatgtgtgtatagggagcatacagggtgtgtgcaggtggaaactgagcgaccagcacctcccccgacccctgctggccaaccctggggtccaggcaccccggccctccagcctctgtggccagggccagtttaacctcacctttcttgagctctttggtaggacacccgtgaggggctcctggtgactcatgtggaaccacatatgcccttggcaggagggtggacagatgtgacaaccaagctagtcttcattggggctctcccttctaatgactagggggaagggggaagctgatctggaagaccccccaaaatctgggagtgctcagctgcctcctcctggggatatcccttcactctcttgctttctgggtcttggaccaagcccctagctcatttatccggcccttcagcctacaatgacttcactcccttgctcagaggagacatgctcctgcctctgccatctccctgccacagccaggaaatcagcattagtgcctggccccgccctcaagacaaggaccccactgctcagagctctggctagctcctaaatgtccagggaccctcggcccatgagagggcatgggagtgagacctccaagaacctttgtctaaaccaccacaggcttggtctgtcaggcctcaggtctgaaactcaagcacaggcaaggggtgaggaatgttttggggagccctgaagcctaagtgttatatactgctggccagagcctacttggggacaaggacggggcttagaggttagtgtggaaagcagaaccagtgagggagctgcctccatcctgaggtccaccccccggagaagtgaggctggcartccttatcacttgcctcccctgactgggtacaaggctctgcccggacccatttcaccaggcccacaagcgagaaatcagagtggggaggctgaagggaggtgacagatgggaggaaaaacggaggccccaaactctatccctctgcctccccaggcatggagtcctcaggagcctagcagactgctaggaaaaggcctgaggccccagggctgggagtcagggtgcagggtggccggggccatctgtaggtctgagataactagggctgacagcacaggcccttggggaaaggagccaagggcctgaggcaaacagcccctgtgggtggtggagaggggaggcagtgtcccctgtcaggctcaaggctgtgggcagcagcatgggccctgctttccttcacctcttctcagtttggggctgaccccttctcccttagtccacctggggaattgtctctcctaaaagctgcacattgtatcttctcaaaagacagatctggctaagaaggacaagtggccagagagctcagccgccatctggataaccaacctcctgcagaggggatggctgtgctttcccacctcctgggacaaagtcccaagggtccattaggacacagcaaagcccttgccagaccctcagggtactggggttaggaccagctgggctgcaggaccaggctggcaagcctttttgaggaagttgtttaattaccagtgaaagctcttccattagtgagagaagagaaaccataattctatttcagagaagccatttatatgcaaacgaggctctggcagacagatgcggagccaggtcagccagggtgggagcaggtctccaggcctgccttgccattttacctcccaggctaaggcaggctggcagggctccactttgggagccagacccctggcatctccccttaccttggcctgtaccaaacaataatatggcactggtggagccctggaataccatagtttgtggagtcagacagagctgggttcaaatcctggtttggggactttattaccgggtggccttgggcaagtaacaaacctctttgaatttattttctgtctataaaaaagagatctatcttgcaggggagtagttggtttagaaatggtatacaggctgcttggtatgctccatgaactttataatttttaaagcaatacacatttctgaggttatgtaaatcaaatttttgacaaaaacttttctgggaaatgcttctttgattttacaattcagactcctagagtatgacagctggaaaaaaagcgataatctatcaactcatttggcaaaggtagaaaccgaggctcggagatattaagtgatttccctaggatcacatagctagtgtatcaaatccaagaatagaactcaggttacctgactatagtccggcactttttctattatctttttctttcttttttttttttttttctgagacagagtcttgctgttgttggcctgggctggagtgcaatggcgcaatatcggctcactgcaacctccgcctcctgggttcaagcgattttcctgcctcagcctcccgagtagctggcattaccagtgctcaccatcacacccaactaatttttgtatttttagtagagacggggtttcaccatgttggtcaggttggtctcgaactcctgacttcaggtgatccacctgccacggcctttgaaagtgctgggattacagatgtgagccaacacacccaccactttttctattatctttgagggaagttgaataattatcccccaaatatgtcttgtttagcagccccaagttcccatagattggatttgtctgaatgggagggtatatctgtactctgatggtcccagagaatgtggtagaaagtggtgcaggtgtcctactagtgatggtggggggcaaatgaacataccaccccactggcttcctaacggggtgcagggtctaccaggcagaactcctggttgcccagggcagggctggccatgctaccagggagtctgggaggctgatctgctgctcctgggaggaaagcctgatggggagggagggccttgcctcctctacgtcttccaggacccaaaagctcagacaccccccatccccgaacacacacacagacacacacactcttcctcagagtaaacagaaatactttgtgtccactgccctgccctccttccaggaaccagcccccsccaacaccctacagactccctcacgcaaagctcctatctccttgcctatgcttctagaacatcttgggcttccattaataatgacagtgataatttattgagcccttagcactatgctaagcacttcccatgcattatttcacctaatccttccctatattatcccccatccatttcattagtaaggaaactgaggcctagagaggttaagggggccaggccacacaactagaacagaacccttctgagctggatgctgcggatcaactatttctcccaatggactctgagctccttgagagcaggggctgagtctcagacatctcaggacccccagtgcctggggattgttcatgggggatggggacctccccagcttggttgggcataaggggaatactggagtccccttccaccctgcttgctgtycctgaaaccacaactgtccccactcacttgagggagagggagaagtcattcttgctggtctcactgttgcgcaccaggtagctggcctctttgcacagccggagcaggttctcggcgtcggttcggctgatggccccgtgataccagctaaggatgagagagaggaaggggggcatctctgctgggtccctcgctgtccaggcccacccattgtgggtgtcccctgtagggaagccagtgccaggaggggaggagtggggagggagtccccagctggacacagacactcacacctggttttccagaggcagtgctggatctgtccactcccccagggggctgctgggctccatgcttaggggtttggctgacttggggttccctgcagagagtcggggaggtagccgccccttctcctcccggccaggtgacaggcagctcttctccggtccttcaaactgggctgtggggaacatatcaatcatggactctaaggaccctagaggtcctcagaggtccctattgaatagccagtgcccaacccctacttcttccagccccagaaaggatcaaaggaatgctctaggagggcagcccatgctgaagggcctgactggctctggggacgtaatcctggatctatcccctggtgggggtgggcccagccttctgtgccacacagggtgttgcagtccccacattgtgggaggagagrgcagaggagcaacctgagaaaccatgcacgcttctccctccaaagcagctgactgccttcccccagtccatcctctcagggtggcttcagcactgataatattgtttctttctcctcctcagagttcattaccgttctccaaatcaccctgccaagccattctgtagaaatgacttatcgatctgagaacaattatctggttccccttggtgccatcctgacaggctaatcccgcccaaagccaccagccagcctgtccctccccsacccccaacgttgctgcccactggctcccctccccaacccacagaggcccagaggcagcacctctgccctcccagaccaggggagcctgatggctgagcccataagggaaggctgagcccccgtgggtccccaggcacacatgcgcacgtgcacgtacggacagacaccctccttcatcccatattttaaaatacaacattcaggcacaaatgtacraacagatgctcatgcctctgcacacacacccttgggtgcccattctgggcagaactgaacatagaggaagaattaagtgcgttctttctcctcatttgggctctttttctctccttgtagcactttgaagcccttactctctttcagtcaccagatgcaaggtcagatctgctcctctgcgccaaggagttccacacttgctgtgtctgtcccacccccagctcaggagtatttgcattgctgaaggagcttgtcaagcaaagctctccccaaagtgaatttaaaatggtggatttttgtagcatggtgaggaacacattagaaaggggcctccctgtagaagacaccatcccacagctgtggggaagggaggaacgtgcattttgtctcttccttcttcccaaatgagattcttcctggggtctccaaatcctgccccacctctcagctcctccaacccaacccacagggcctggaggggtgaggacatgtcaccctggccagaagccccccaggacccaccgctgctgtcctccaggctgggctcagggaggggcgaggctggaccggagatgtccctgtccccatcaggcagggaggggctgctgtccagctgtcccacaggtggaggccaaggtaggtctttgatgaccttaatgtcaactggagccagcagcagaagtgagaagagagacagacagtgacagagacagaaagaggtagaggttgagacaccaaaacccagagccaggacacaggacagcctagaaatgaggaggggcagaggcagaggcagaggcaggtcagcttttggggaggcactcaagggctgggcagagccaacgttgaccacaccaggttggcctggtcagagggagggaggcttgggtggcaagcagcaggatgcaggggcttgcactgtcagcccgtgggtccccttcatttgacctctcacaagcctccagggcccaaaggtaccaggaacaaaggaaatgaaggactaagagtgaccagcacctcccaacaccacatctgggttcccatagcctcctggcacccacagccttgcctccctttctccttttccccacagcctgggaactcgcaggcagcaagaaagagccagcctcgcctcaggttgtcaggattactcagacytgagggcagatgttttattgaartttaatccccaccccccatcctgagaagagtgatgccactggcggctgctggactgctaacgaggtttcctaatgacgagcatagattttcccattaagcaatccaaacagtattgattctccaaggagacttctggagataaacggcccatcctcaatggtgtgtgctttacaggaagaatattagaatcctgtggttttccagtctggctgtcagggtggggagggcagaggagggctgggtccagctccaggatgagccccttgcccaagcaggggagaggggcatatgcaggcaggagtgaagtcgaatggcatttgagccctttatgttctccctgaatcaaggacccaggagcaaaagccctctccctactccaggctcttgctccacccacctcagaccactaacatgaacttttccatggtggacttggacttgggatggacagaagaaacctgatcttcatttggcaatcaagagatttctcacagcctcactctgctcctcagaaatctccttggggccagacacccctggtccgccagggcctaccactgggaggcagagccctagaattcaggttacacccatagctgtctttattgtttgaagtaagtgccttcttttgttaaatgtaagtattttaacatatgtcrcgagtttcataagtttgttttggaatttatttttaaatatacccagtccccaaaagagagaagtagtctaagcctcttagcttccaagaggtggtgatgcaggggaatgccttcatccttctcctgtacccattccttgaccctgcacacagcgctgtgtccacactgccaaccccaccccctatggtacagaactcaactacatttccctggagtcctgatcctgggcctctctgggttcctggggtccactccttccattctcttgagcctggaaagctgctcagaggccccagctgacctgccctctccaccaggactcacctgcaaaggctttggaaatccgctccttcttccactcccagggctggtcatactcctcagggggcctctcatcatcctctggcaggcgggactcccggggccagggggccccctcaccttccgsggtggccccatcctcctctggctcatagggtgtgtcatacagaggcaagggctgagttgctgtctccttggagccccggatctctgccggagcagggcaggamgggaaaggtgagggttcagccttggctttctggctcccctcctccaatgcttctcagcaacaagccaggcctccttcagaggagatgccctggctctggggggagctcagcaaccacacatcctgggttcctcaccctcaaaacacttctgggtctctaaaagcaagggagccaatgaaggcaagggcaggtgggcactagagtaaaagacaggaaaaggatcctgcaacagccagcgagggctgggtagctaaaatttatgagtttaggaaactgaggcacaaccctcccgttgtccacttcctccctgatgccaagctccatttgtttccttctgtcccaaatgatatcattccttttttctttttcttttcttttyttttttttttgagacggaatcttgctctctcacccaggctggagtgcaatggcacgatctcggctcactacaacctccgcctccccggttcaagcgattctcccacctcagcctcctgagtagctgggattacagacatccgccatcatgcccggctaatttttgtatttttgtagagatggggggtttcaccatgttggccaggctggtctcaaactcctgacctcaggtgatctgcctgcctcggccttccaaagtgctgggattacaggcattagccaccacacccagcccgcaagtgatatcatttgacaatcacagaattattctttgctgcccagacactgtggaccacccgctccttgaaactttcccttcgacaagttacgttcatcatcataaagacctttcactttgacattccatggtttcaaactcatcaccttctctaaagctaattggttctctttttgggatcactgacccagccctcaccattattttgtccttcctgactatctcgaatgctaatatctgaccttcagttgtgtggcctcctgtaccacttcaggtcacacaagtcacatctgcttctccaaaaygactattggaaaggcagtgaccatcctccccacggacccggcaaagactttctttctgatcacccccatttggcctctccctagatcctctcttggcctctctttcccaagactaggtcttatgcatttttccctatcctaattccttgaactgtatgcccagcctcatggcacttgctgcatctgtatttccagtcatttgggtccattgccataaagacctttcgctttgacataccattgtttcaaactgaccaccttctccaaagctagtagttcttttattgggatcactgaccccagtgaaaatatgataaaagctatggagctactcccccaaaaaatgtgctcccatattttcacatataatttcagggcattcatgggggcttcctgggttccacaccctctgacctaaatggggtagtcagcttctcactttctccatttctgtctactacactgttctccttggacctggccctccttcattcttcaaatcccatctgttctttgccaatacccagtgaccttcaccctcatctttccgtatatagattactgctagggtgaacctccattctgcaggcttgtgtttccaagagctccatggaataatagtcctgggatattcttgaccactctctgcctcccttaccacctctcccaagtaggaagagcagtttattgtattggtcagtgaatgcacactctcttttcctgaagagaaagaacattctggttcatgcagtcagtggcctgctcctgtgctgtctttgacccagagccccaggtacccaagggcaggctctgagcttggatggggacaagctctggctcttcttttgcagggttcccccactaggcctactgagttgcccaagcctgattgggcaagtttaattctgtggtgaagtattaagaagcccattgtgatgacacataagcccattgcagtgaacataagtaatgttctctaatcaactttatcagtaataaagctgacattttcatcctgttcctctcttgctcaagaattcatcatggctccactccccattttgaagsaagtccagatacctcattccagcctatgaagcactgctccgcccctctcggactctctcatctaggttcccatgcacacccagcactaacatcatttgctcctgaacaaacttcctctcaccctgcctcagggccgtggcttggacagacccaccctgtcctctctgatctcccctatttgatctctttcccctggactgtctctcagcctctgttcccaagaccagatcttactcttttctctctagcctcactctttggactacttgcccaggctcatggcacccactgtaactgtatttctagtcatctttctccaactgccatgaagatgtttcatttcaaactcatcccccctcccaaggctagtggttctctttttgggatcactgatcctcccagccctcaccactcttttccttcctatcttgaatacttctatctgaacttcagttgtgtggcctcctataccacttcaggtctcacaggtcacagctgcttctccaaaatgactctgaaaggcaatgaccatcctccctaaggacctggaaaagactttctccatattttccagggaccaaagaatcagtccttagacttgtgagtcgcaaagcctgttctgcagagcccaggcctcagggagcacctcccctgcccctgtcactcaccggccatcatcttttgagcctcatagggctccatgtagccatcattttcagggaccttctctggggctcctgaagctcctgctgagccttcgccagtctcctgaacatcaaacgggtccgcatagtcttctaggatagctagctgtgggargagagtgaagagagtgggcttcagggagcagagaggcaactctgcttctcccaaggtactctgtccatgggagcaagagtcccaagtaggctgccttcgacccagacccccaggtactcaaaggaaggctctgagcttggatggggacaagctctggctcttcctttgcagggctcccctactaggctgccaaccaagtggtacctctttccttctttcttttttttttttttttttgagacagagtctcactctgtcacccaggctggagtgcagtggcgtgatctcggctcactgcaacttccatctaccgggttcacaccattctcctgcctcagcctcccgagtagctgggactacaggcacgcrccaccaagcccagctaatttttgtgtttttagtagagatggggtttcaccatgttggctaggatggtctcaatctcttgaccttgtgatctgcccgccttggcctcccaaagtgctgggattacaggcrtgagccaccgcgcccggccccaagtggtacatcttttccactaattttgtgcctctaggccatctcctaggctaaatggccaggaggaggctactgggccatagggcctgcctcaagtcagggtccaagcaggaccatagcttacaccaggtggttcaacaaagggaattacttcagagaaacagttacaaaggtgttggaagagttcaaagagcaagcaaagaatagtgagacaactcagagattagcatggtccatgcctacaagggcgcttccagatggtgaacaaataaacagctgctgagcatcaaggaagggaagactgagtagtcactttttcagttctgctgacggatcctcacaacatccctgtcatgtgggtattactgtccccattttaagaagtcagaggctcaaggaagttagggaacatgtccaggaccattctacgtaagtggaggaaccaggtgattggaayccatgccctttgtgcaaaaggctgccaacctgccaccagggggcatcttggctgtcctgggagagagaatgctggagccggctttgggacagacctgaagttgtgctgaagtccctgtggctcctggagggcagggacaggaaaggcttcactttggcccttcacttcctacgctgcccctttctcccacacaagtgggctcacggccactcctctatgcctgctgccattcatcgcacagtgaactgcaaaccacacactccgaagaggcactcaaggtgctcagggcggggcgcagctgaggacaatagaacctttctccaagctgggcttgggcttctcctgatggggcgctggctgaggcagagactgagcccggttcacccagggctgccagcaccccaggagcactgcaccactgggttgacaggcgatgacaggaggtggctccagggcctgcagcatggggagaggccactcttgcctttccctaaatctcagtctaggctttgattctgagccagaccagggctgtaggagccagctgggctgggaggccgtggggtgactggcctgctctgggttagagcaactgggaatggtgacccctagcaaggcagagatgaagaaaggaacctcttcacctcggagaccccttctgcatgttccttccaccttgctattccctctgaggtacctcccaatggctcctactgtctcatctggggtcttcagctcccaccttgttctattcatgccctcagctcctttacaacctcctttgcgtctctgcctgcttgtgggataaccaccatctcagatcatccaattaccaccactggactattcatatctggagctctttgttgtttttgtctttccagctccagtaagcacctggcatacagtaggcactagacaaatgtttctccttgatcatcgcctatctccccttggagcccttcacccctagtcctccttctgccaggaagtagagaaaataaatccactcacccctacccgcccaagctgcttcctcccaggccaactggcacccacagccccaccccttgaccaaggcggctctgtggtcagcccaccttcggtgattctgtcagtcggcagccagcatcacactcttgtggcagctgcttaacagtgtctgactcaaccaacacgttatccataaaccttgcgatggctctccagtgcttcaggaaraagtctgcagttgaagagatttgaaagcttccactttcctctttagtttctctctactcaccttggatcactttgttaccagaaagctgcatgttctttctacttcaaaggctttccctctgcctggatcactttccccttcctcctcaagagctaactcttatagattatttcttcagaaagcctttccatacacctcccaggcctgttaggtgtctctgtgctgggctattatcacactgcatggtaaatgtttgttttgttccatgtcttcctgcagactgtgagcttcctgagggcaggaaccatgtttactttcaaattcctgacagtgttaactccattcacataaaacaggaagaatggacaaaggaagtacttttccttgttcattcaggagaggaagcacaaatctggattgggtgggatcatatgaggggacagtctttccaagtgaagctgtgtcaccagaagctgcttggtcagcagaggtgcctgatccaacccccgatagtctccccacccctaatcctccactccatagagccccttcggcctctccctcaccaagcctgcaggcagcacccttcttacccaagtcctgggcccatgcccagagctgcgacccctccsaggctggcgtgggcctcctcagctctagcctgcagtgcccatgggcacccaggtggcaactctgtgggcagctcaatggctcctctgttccattcctggctccacacccagctccaggaagccccggccccacgccctgggctgggatgcccaaaggagccgyccacagggctgggagttgggagcagcagcagagatgccagttgggaaggatggcaggacaggcacccaccctgggcatagaagttcctgggcagaacccaggcytgctttcctgtggcttctaggtccccargatagactgcttagtggaggaagctgctcctataggcttccgacccctttgacctaccctaatttgttattttgtttatggtccctttgccccactctgatgtgctcactactgtatcctgcatcaatctcagggctggcacacagtaggtactcaatgtatactaagggacgctcaacaggcgtcctctccagactccatcctctggagtgacatcacctttcagatccccattcaccttgacctctaatggctgcaggatcaggctctcagcagatctacatctgaatagaaatcaaagactctggcgcaaaggccaaagggaggaattgtccgcaaaggacctttggggaagacacctaaaaccacggcggaggggtgaaattaaagactttcaaaacttaaaaataaataaataaataaaaaataaaaccmcggctggtatttaggcacattctctgatatagccasaatgctgctgaaatgctgaaagatttccaaactagtaaagtagctactacccagaggatcccatccctctccttcctgccacccagcagggtgcctccaggactctgctatattgtgtctgttccaattgggcattacccctcccagagcagctgtcatactttgaatctccttcctgctcaagcctctcctgtggtagctagcaggcctgccatctggttcctcttccactctgcaattgggccatgcaacacatccctgmcccccaccacggggctccagagggtgtggatccaggaggagcaagaggggcacacgttacaatgtgtgccttgctctggaaggtccccaaagtctcccactgcccctttcctctgtttctttagtttacattgagtgtctggaaacctctttttatgtgtagacctctgtctttttatctgtagaaaaaggatggtaatagtacccatatcatagggttgggaagaggaaaatgaatttgtaaaagttcttagcccagaggctggcatggagtcagtgctgaataaatgttagctctgaggataatcttttctattcaggtattaaggcctcagagtttagatgcttgtccagggtatgcagcttgtcagcagcagagacaagatagggaccctggcctcctgacttgtagtatgttatcatagatttttcaaacatttggaaaatgcagcatcttctctcctctatttgtagatttaaaatacactttaaatctaaggagtcctgcagcaaagaaatcagtctacttttgtttaattctgtaatttcccaaaaatatttaaccatggaagccctttgtcactgaaaacctattaacctgtcacagtttgggaaatggtacattacttaccttcctcgagatcaaactttttatacccattgttcctgcttattggaatgtccttctcctattttatctgagaaatcccttgacataaaacaaatgtctttcccttttctaattacaagaacaatgccatgttcataaaacagttaaacattacagacatgcagtagatcctagcaaccctcataagacccttgggtgtgtctggtgtcaccttgggattgggtagcaagtggtggtccccagcattcaggaagtagtaaactcagtacagaacacacccctcattccttccctaagagtctgcttcctcttgttcattagcaaatgcttagtgaatacctcttctctgccaggcacctgctggtaggtgctgagggtccaggcattgggctcactctaccacctgctggctgagaaaccgtgcaagtgtgactcagcattcctgtgctctggtttccccatttataatctggggatagtagtagaatcttcctcacaggaytgttttaaggatcagttggtctaacacatgtcagctgcttcaaaatggtatcaggcacaaggtaggtgcctagtaaatgttagccactatattattaaagacaaaaagaccaaatttctgagtccttctggaggaggcccacagtgatagacctaaaataagctccaagttgtgaagccctaaggctaggcaccaggctctgggggcacccacaggcccaccgtatgcagggtttgggccccacttttgctctcacataatatgttgactctgtggtgagggctaatggagtgggcagcaggtatcctccaagtcctgggccccagccagggcttgttcagcctagccagtagctcccacccatggtcctcagggtcccagctgttcctggctcccaagaggcaaagtgccagagctgagttgtcattgagtcactcactggccaaggtaagaagcacagatgtcttccagacagagttggtgccacaatgtggggtgacagcactgggtagagtggacaggcctgccatccaatcccccagtagctgcaggcctcagccatcctcaaagcagcaacggcagcacagatggccagcctgggccacagaggcttaagaggtttaactagtctacaaaagttccttcacctggactcctaccttctcctccctcccttccccagactctcctcctccctctatctccatctgcaacataagcagactggatctacagactctgtggaagtcttaagaagaaacattaaagcaaacaaacaaaccccaaaaaggcaagtatgaggtcttccaggtgctgtgtccctttcagcgcctaatgacatacacttaatgaacactggctaagagatggtcttacattgactggcagcccctaccaatcctcctaacctcagggcaggaatatwttgttcaactttagatgccctgactgtatccctcactttactcttcctatctctgtctgtttactcctttccaaatctgtgcctggaggayccaagtcctgtggatatcatctatgaagtacatctattttttaaagttcttaatattttggggcctgtgaaaccctacgagaatctaagagctatamctttccccagaaaaataggaaatatctgcacacaatttctggcggttcatgaagcccaggaacctctccatgagctaagaagagccctggttgtaatccagggtgcctgactgtctcattgtccrtgttacctctccacccaaccccaaacacgtatcttggcatgagggaggcaaaggacacactgcacagatggtcacaggcagctgagagctttgtccaatcagagccctgttcccatatccatccccttccctaattacaccaggtttttcctgctaaaggtctgagaaaagggagcaaagcaaggggcccagctctctagcccccactgccagagcatggcctgggggccagacgagggcccagcaccgtgaagctcttcctctggccagrtggcaaggccctgcctgcccgttgcagggcgcggctcctgctgctcccacacctgccctgccaggcctgcccagatggccacccctgcacccctgccaactacggcagtgggtcccagggtgggctggcagccagaaccccacatggggagaaggctaatggtcctgaaccccctgggcctctcggtactgtcgaggacctggttctctcctgcccccatactaactgggtttctgctcaatccctctggcttgtcatagaaacacctccacccatttcatcaaatctcatgacccatcccttctcagagggttctgactcccccagccccagccactgggctccagaggagagaataggccagcacaaagcacatccctgttcccaggcctcatcacatgtcaggaggagacctcaaagcaagccagaaggcctgagagaaggaggaacagaaaacagggagaaagcggccacatagtacataaacaccagctccactgggccacaggggcatgcgccagctcacatccaggagcagcatctcttaggtttagggtaagggactcaggtaccttgtttgagcttttcctaggggaagactcagaccccaaactctgctcctaaaggggtggggagctgctctctctaaatggtgggaggccccaggtcagggcccagagagatagcatccctgccccgggccaactcagatggcatcctgggtctttctcatcacacccattaaagaaaccacagattgtatggctcctgggagagcctgctggatttcattcctgtccctgtagctgacaaaggagtcagacatctcttggcccctaagtctgaacagcacacagatcacagagctgacccaagctgaggcatggaggcccttggcaagaagaggctgtgagtctctgcatagaactgtgtgggtgcaccccttccttgggggtgtctgggaaaatgtgcaagggaagctgtggctaggggagtctccgaccctcacgccaccctgataatggacagtcaccattcaggacatatttatgtacccttttttatgtcaagcattgtgtcaggcacttgggagacacaagaagacatggtctgtgtcctggaggagcccatggcttggtgggcagcctgttagggcatccaagccactgtagagaggagaagggccaaagacagctcaggcccatgttgcctgtgccaaacaggcagtggttagagaggaggagactgactggtcagtgggaagaacagggcctatccctctcctctgtctcactgtcactacctccatcacatcacacaatagcaggggacaagaagcagacgagcacagccttggagaagtgcccttgaaccttcctctgcagaataagtatcctggcccaggatgggcagccatgccccatggcaaaaactaggggaaaaataatttgcattcctgaggcttctgctctgaccctgacagatctctctcatccaggaaatctggcggaacggcgctctctcagctaaaaagcctcaatcctggagccaacggattcggaaagcaactytgcactccaatcaaataaaaatgttcttctctgctgaggagaagggggcaggccccagaactgagctctcggggtgagtgaagaaggacagcagagccaaggcagcccacagagtcatcatcacagaatttaggggcctgggatggctttcagctctcactctgccagggagggataaggccaacccgaatcagggcagggccctgaggcatggtggatttcctgttctcctccctatcctggtgcctgcagacccaggaaaagctccagcctccctcagaatggaccagggggagagggaggccaggaggagaggaggaatgggctcagctgcttagccccatgtgggcaacaggtcctgagcactgactatcctcatacctgagaggacgagggaaggagggaggagtgggcctggaccccacgaagcccccttggcaagagctgtaagctgcctgtcttcgcctcctgagaacaacagcctatagggcaaaggccagctcgtgctgtgtccgcaaggagaaacccgtcttcacctcctttctggggcttcagcacctgcaaggatgcttaggctggagaaacaggaggaggaagaggaggaggaagcaaagaggcaacaggagggaagagctttgtgctggctatgcccagggggaagggtcagagatcaaagggcactgagccgctgcttccagaggggcagaaaggccatcaaccagtgggggttgggaggtgcgcctcaattcccgttagcaaaaggctcayggatcaggctagagggggctacgaagtggagagccagcccgggagggggagggtcaccagttctggggccattacaaaggatagggcagaggggcagagtttggggcttccgtctcagattagtcggttgagaatctgaacaaaggtgggtgaaggctcggaaccccggggtcaggggctcgcgtctgccagaagctgagacaccgaggggcccgggccaggccacctttgtccctctcgcagcctccagacccctgaccgccttccctcctggccatcccggcccggcgcggcactcaccctatcgctgctggcggggggtccggagatccgctcatcagcaggcggcgccgggggccccggggtctcgacccgaataaggcggtgtgggggagagccgtggcgcgggggcggcgtgggtccgggggcgacaggggtggcgagggcggcggagccggacgaccccccggagtaggggtcttcgaagtcgcgctcccgctgcagcctgtaggcggccaggatgtccgggggcggcgcggggggcgcggccggagagggcgcaggggggcggtagtcgggctcggggggcgccggcttgctgccccctccgccgccgccccccccgcggaagcccaggtgctcccggagccacttggctactccgccgctgccgccccctcctgggccggctcccgcacccccggcgccccggcgggacccccccgggccgcccccagcgctcccctgcgttcgcggccccgggcgggagccagccggaggagctccgctcagtaacatggggccagccagactgagcgaggggagcgcagcggcgggtggggggcgggggcgggggtggggaggggggcggggctccgccgggcggggagggggcggggcgcttcagtaacaagggagaggcggggctccgctccctaacagggtcttcctcctcccgtagctcggaagagtgtacgcgggcttccagccggtatgcacaggcaagaagtgaagtgggcagccctggggcagaggatgcgactactggactgaggttgaatcctttacgtgtcgccacgcggtcccctgtggggagcgcatccatccccatctgttcttttccccagctcccagctcgtgcgagacgcaaagaggggagcccccagactcctgactctagggagccttacgcctctcctcttccctctcccaggatctcgcaactgggaaactataatctaggaggaaaatctaggcgggcaagaaaaggggctaggttctgtaagatgtgtctgtaagcctcctcctcccgtgctaccttgggagccccacaacctcctcccatccaaccgtacgcactgcacatacccgaacctacgttacttcccgatccaggcaaacacatctcacatcacatacaaacaactccctagagacgcccacttctcccgtgtcgttttcacacacgcccttctcacacgcaaacagccctcgctcaaacatcccccacccacgggagcacctgctccaaacgggcccacatggccctgacgatagcatgcgcacgcacgcagaaatcccttccagccacatcccgggcttcattgtcaatcagattagtaacagaatggaaacagacaagtcaataaatcaagtctagaaacagtcccagtgttgtctatcacaaactccttatcctcttgaggctcagatgctcaagtgctaggcatttttgtcttagaaataaagccagttccggctgggcgcggtggctcacgcctgtaatcccagcactttgggaggccgaaacgggaggatcacgaggtcaggagatcgagaccatcctggctaacacggtgaaaccccgtctctaccaaaaatacaaaaaaattagtcgggtgtggtggcgggcacctgtagtcccagctactcgggaggctgaggcaggagaatcgcttgaacccaggaggcagaggttgcattgagctgagattgcgcgactgcactccagccagggcgacagagtgagactccgtctcaaaaaaaaaaaaaaaagaaaaagaaaaaagaaaaggaaagaaataaagccagttcctcaccataaatgtaggcctgaagccaacaccaacacatttgctcttggctctgctgggaaagcagctgtctcacctcactttaccccaccccctttcccccactgcctcagtgtctccgcactcctaggttcatgtctgcctttttttttttttttttttttttgagacggagtctcactccgtcgctggagtacagtggcacgatttcagcttacagcaacctccacctcccgggttcaagcaatgctcccagctcagcctccctagtagctgggattacaagcgtgcgccaccacacctggttaattttttgtatttttagtagagatggagtttcaccgtgttggctaggctggtctcgaactcctgacctcaagtgattccccacctcggccttccaaaatgctgggattacaggtgtgagccaacggcacctggccatatctgccttttgagggcgcaaaaagccaagaggccccaaaggaaaggagttcaaagcgggggggtgtaaagaaggatgtaatggcaaaactgtgaatctcctgggattcccagggccccgagtctcaaaatatttgttgagttcctgctttgtgcaaattctagttgggcgaggtggctcatgcttgtagtcccaggtacctgggaggttgaggtgggagaattgcttgagcccagaagttcaaggctgcagcgagctatgattgtgccactggtcagacagtgctgcttgtatttaggacagtgcttctgatcaagccagtgctgcttgtatttaggacagtgcttctcaaactttaatgtggacactaatctcctggggatcttggtaagttacagattctgactctctaggtctagctggggtggggtcccaggtgatacagatactgctggtcccagaccacatgttgagtagctggactgtaggagatactggagaatctgatgttgaacttggttttatgaagtataatagagaaaataacgtgcatatttttaaaatgtgcagttaaattgactaatggtgcaaaacgaagctggacatagagatgataaatagagaagaatggtccagttaatgtatatcagagagtctccacagtcaccaggtgtgagggcatggataggtaactaataagaaatccaatagttgtgggctgtagccaggtatttggggaaggtactcaatgctactgatacttgctttcatgatctctggaaagggcgtgataatcattgtgtgaggattaagggaggtgatgaatatgaaaaaggtttgaaaactgtaaaatgcttacagtggaaggtgtgacatgagttaaactgcttgacagctcagaggaatgaaatcaatcaagtctgcaggcttcatgcaggacaggaggtagacctgagctgggtaggatttggacagatgaagcaaaggagtgaaaggtcattccaagacaggaggtcggcattagctggacaaaggcatagaggtgggaacccgcacaccataaaaaaggggagtattcatgatgggaagagtaggaataaaataagatgggaaggagggaagatgtcataaaggcagggtttaaacaataattttaaaattataaaaacttgtgtgcaccatacacttactcttgttttaaaagatctgctaatgtactttcctccattaccagagtatgagctcctaaaagcaggcagtttgagcacctcatggagtcaggcagcttgataggaaccaaggatacagaggtgaggccatcacagcaagggtcctctgagaattgggtggaattttctagatccaaattctgtttaccttttctttcctttagagatggggtctcactctcttacccaggctggaatgcagtggcacaatcatagctcactgcagccttgaacttctgggctcaaacgattctcctacctcaacctcccgcgtgtgatccgcctcacccaactaatttttaattttttgtaaagatggggcctcagtacgttgctcagactggtcttgaactcctggcctcaagcaatcctcccacctcggcctcccaaagcactggtactacaggtgcacattaccatacctggctaatttattgtattttattttctagagacgaagttcttgctatgttgctttgactggtctcaaactcctggcttcaagtgatcctcccgcttgggcctcccaaagtgctgggattacaggtgtgagccattgcacccagcctagattcaaattcttgcatgttaagcagttcgccatagtatcaggattctgtaaggaagcatgggtgctcccatcaccaagtgcagagcctgtcacatggcatcggtttaacaaacgttgaaatggataaagacaatttgtctttcttattcttagttttatatagctataattgtggtatacacataattttatatcttttttaacttaacattgtatgataatttccccatttttgtcatgtaagtttattttcttccaaattttttttggggaaaactatcaaccctacagaaaaatccaaagaaagtatactggaggctgggcacagtggttgaagcctgtaattccagcactttgggtggccgaggtgggcggatcacttgaactcagatgttcaaaaccaggctgggcaacacggtggaaaccctgtctctatttaaaaaaaaaaaaaaaaaagtaagtgtggtgtaaacctatttacccttcagctagattcacctctttttaaattttgccatatttgccttattcctctcctttttctttcattttcttaaccatttggtacaagttgcaaatatcatgacactttggttttacacactttagcaggcattgccaaagaataaggaattctatcaggctacaagatcattatcacatttaggaaatttaatatttatttaataatattgtctgtcatacaatccttattaaattttttgatttttcctgaaagtgtcttttatagtttttttctttttttattttgtttttgaaaaatctttaaattttccttcaggcagcctcctgagccagagtaggctcaaagaaactccctacagttttttttttttctgattccagatttttttttttttttttttttttttttgagacagagtctcgctctgtcatccaggctggagtgcagtggtgcaatctgggctcactgcaagctctgcctcccgggttcacgccgttctcccacctcagcctgctgaatagctgggactacaggcacccgccaccatgcccggctgattttaattttgtattttcagtagagatggggtttcaccgtgttagctgggatggtctcgaactcctgacctcgtgatccaccttcctcggcctcccaaagtgctgggattacaagtgtgagccaccgcgcctggccctgattccagatttaattaagtttccccatttcatctgtttgttatgttcctttagtctattttaattttgaacagtcccctattcttttgttgctagtttgtttttcatcacatttatctttttgaaatgtccaggccaattgtcatgtaggatgtcccacattctggacttttccatagtttcttcatgattagattcaggttacacatttctgaaaggagcactacataggggatgttgtggactttctagtgcgttacaccagaaggcccataatgcccatttgtccctttattggtgatgttaggcttgatcacttggttaagctggagtccaccggatctctccactttacaatttaaagaaagctgtggaatgatattctgagaacttttagctattttcttcaagcaacatattaccccattgttttatcccccacattgatgatctatacttaaatttgctattacactggggattgcaaaatagtgactctctaattctgtaattctatgaactcaaaatatctgagacaggtctcaagtaatttagaaagtttattttgccaaggctaaggatgcacacatgacagcctcaggaggtcctgaggacaggtgcccaaggtggtcacggcccaatcaatatgtgtaaaatgtacattggtctggtctggaaaggtgggacaactggaggccagggagggggcttccagttcataggtagatgagagacaaatggttgtattcttttaagtctctcattggcctttcactgaatacacaatatacatgtgagaggagaggagaggaatagtcacttatgccttagtctggtttagtgaagcaatagggcagaggaaacaatagggcagaggaaacaatcagatatgcatttgtctcaaatgcatataatattcagtcatgagcctcagagggatgattgagttccacaaggaaattccttgtgggcaaattggaggaaagtatgtcgctttttaaaatctttgtagctatcttatttaggaataaaatggagccaggtgcagtggctcacgcctataatcccagcactttgggaggccgaggcgagtggccttatgcaggcttcatgcaggacaggaggtagccctgagctggtaggatttggacagatgaagcaaatgagtgaaaggtcattccaagtcaagaggtcaggagttcaagagcttgtgctcaggaattagagaccagcctaggtaacatggcgaaaccccttctgtaccaaaaaa

SEQ ID NO: 98093 - DNA, 14236 bp, Homo sapiens
cctcttcttaggcaagccccctcaggcaggacaagtctggtggaaggatcagtgtgtccctacccacggtaagaccacggtcaggtgccctaggaccatatcctgtgaccatcaccagcctgcctgacctcaatgattagcagcttcaggggcacacagcccttggggtgggaccctgcagcaacaggacaatggcacccaacccagaagccaccctgcaggaatggtacaatgcagtggttaggaatatattctggaatcagatggctgaatttaagtccctcctctatgatttaccaactatgtcatcagtaaaatggggaaaatgattatacataccttacaatattattatgtagattaaatgagtcaacatatgtaaagggtttggaacagtattgccataggaaagctttagctgccattattatcattactattcctgacctgggggtccacattagggttgagatcactccagttccttgggatgtccagcccaaaggccagcagggcctggctatagctgggcagccccatatctcggccacgttggatgctgctggccacatagtctgtacgggagaatttgccagggccaggccagtaatctgaagaggagagaagactagactatgggctttgtcctctccatccttttttgccctgcagccttgtatctgactattggcactacggttcttccctcctggctacccccagtgatccacatgagatctgtgcccatgctgaccttgccttgctgcaaggccaatgtcaccatgggtgatcagagccagtttttccagtaagacccttcctctaagactcaagactgttctagtcaccaagcagtaaattccctgtcctatgcctccctagtttcaagacagggctgaatgaaaacctttagagacctaattaagcaccaaagagattgtggtaccacccctccccaatactcagacatagttaatttaaaataaaagcaacacaaaagtgtaaattaagcaaaaaaaaaaaaaaagttcaaagttcattttcttcttatggctccttgaagtctgtgtttgtatctgtgttcctgcatcgtgagcgccctaggtctgctattgatgaacccagagggatcctcaggcttcctggtcccttaccatccaccccttctggctctgagctcacccctcagatcttcaaccactatgttgtcctccaactccgaaatctgggaggccattcccagcagcagctcattcacctcctgggtactgttcagattggggttctggaagtaaacaatgcactcaagataggcctctacccaaaactcggtctctctcagcctggaccactttagtaccccaggacaaagggcccttggccagtcccagactctcttgaactgttgtccccggataatttcctctacccttcatctcccatgaacctggggcagcaacactcaagaactgggattgttgcttttcccagcctgtgtgaagagactgaccttgacccatcttcccctgaccctgaccccagtctgacctcccgaatccagtagttgttgcagaccctgagagcttgggagctttgaaaacccttgttcaggaccttccggaaatgacagctggcatttctgaaattgagaacaaaggatgtggtgagggaatttggagaagaatcaaagatggggttgagtgggctgagggactcagtgggggttcactaggattgagcagtggcccaggaacttccttgaacacggcagagatttggtgatgtgcgtttactgaagatagagtgcgctcctagtccaggtagggtggggagaggagggaagggaatgacccagctgctagacaaatcctacacccagccaccaaatttcagcccttaggagagctggagagatttccctactaagcctacacatcttaccccagggttctgtttcagggccccaaatttttgcttccccttctctagtgaaactgcgaaggagtgtgaaaggccccagcccccaaggcagctcattctgcacctttcttagtgtggtgcccctctctgccaacccctccctcacctcatgtagacaccagggggcaccatggtagagaagaactgctcagaggccaccacaaattccggggagatgctggggtctaggaaaggacggtatcctgcaggaaggagacggtgatgatggggagacaggcttcttgcctccacatcctcccatcacaggcacctgtctccttcccctcaggattctccgcacaggtgtcctccttccccgctccctcacctgtatactccgggagtgttttctgcaggaagctgggcagccactcatacacagcgatgttctgaggggcagagaggggcgaggggaggcacgagttggatggtgtggggcctggaagggtctgagcccaaggacggcttccgtgtggagatgagaccaggaagggtcaatcatgggagaagcaactcagacaggagcagtgtgaggcctgtccccacaaggaaccaggggatttgagggagtggggggtggggaggtgataaataatcatcaccagccagatttctcctataaacagcgcgtgcctccctatcatttacaggggcttccctagacctcggctgtctggggaggggtttctgggtggcggttgtccacagatggggagctccatggggcagcggagtctcccgtgggcttgcacgcggaagggaggacgtcgcggggcgcggacggctgacctggtaggtggcgatgaccctcttgcgtgcgtgctggaacagctcctcgtcctcccagtctgggtgctggcgggccagcctctgcgcccacaggttgtggtagcggaaccagagcaggcccagcgcctgcaggaagggttcccggttccctctctctgccccgaaggctgcatccgacgtgggggcgcaggggaggagacgagcggtagcgtgatcgggggagcccacactcgcagacccccagccggccccgtcccgcccctgtggcctcaccgtacagcccccggggcccgttctgcccggtggcggggtcgggcgccgcccacatgagcagggggttctgcgagtctcgggggaaagcggggtcgggccccgacgccagctgtccccccgagaagctccgcagcgcgtcgctccaggagtgcgaggagccatagatggcgctgccgtccagccagcccgtcacctggttggcctgcggggcacgcggcgggtgagcccgggtcgagaggcggcggcgggccagggaaggccggggcccggcgggtgtccgcggctggggagtgggcgcctctcccctccaggccctgccaggcccgaagcccaggccccacctggctggggtgcggtcccttcccgccgccttccccgcctcaccaggtcccgggggttgctgggactccgtccggtctcggggtcccagcggctcctctggaagggcagcaccacgtccccgcgctggtcggggtcgaacacggggtctccaggtgggatgcggatgttgaggaactcggcggggcaaccgggcgtttccacgctcaccacgtcggaaagaacatggtagcctgcgggcatggggcgccaatacgtgacaaaccgtccgtattgcgccctccccacggccagggcggcctccaagtgtcctcaggagccaaaagacagaggtcccagtgccagctccgccaccagctctgcacgttagccccaggtagcctcaattttctaatctgcaaagtaagactatagtgagttcccttcctactcaattcataaagctgttgtgagaatcaaaatgatataatttatgtaggggtaccccaagtcagtcctcctccctctgggctagggggaggtaaaatggttacaaacacacggtgaggagagcggtggctggggagctcagttcccaagagctataatgggggtccagtgacacccctaggttggaataaggcgtaagagaaaggttagatacagagcaaatatctctgtatcaacatcccaaaatctctccgagatgaaggcagtctcgaagtgctgcgtagagaggaagtggttgggagtcggatgggtctcctgtggactcgcagacgggatctggcccctcccccaggctgagcagagcgccagatcaaccccactggtctccccctttgccctcaccaaagaagacccccagtacggtgcggttgtggagcgacggcaggccggctatgccccgcgtggctgcgttgctgagccggcgcgggttgggcagctgcggctcctccagagcctgatacacaccgtcggcgtaattggctggtacgcggcgctgcaaccggcagcctgcggaggcagggagcggggctctgtctaagcactccatcccctaggatcccccaaacctcgccctaagcctccctcaacccccatcccacttcactgacagaaccttccctcaagggtctcttggccccgggagcgcataagattgcgctgtgtaggcagcggagctgctgggcgcgtgttccccgcagattccccgctcagggcctttcgcgccccggcccttcgcgagccacggccccagcacgcccgggcccccagaacgcaccaacagcaccacgctcgtggtgcctcaggttgttaaaccagccgtcatagcgctgcacttcccagggcagtgagagtgcgtcctgactgcctgtgggcacagagaagggcctcctcagcactacgctcccagctacccctcccgagcaacgaaggccttggccagtccttccccagctcgcggagcgcccctaaccggacccaagtgtcgggccgcactgggaagtttcccatcccgctgagctgcacggcgaaatgaccttccagtctcagggagcctcttgccgcacctctccccgccccacctcccagggatcctggggaacaccccgccgctagaggagcctgatacttgcccgatggacccagggatccagtcagaagagctcccaggagcatcagtgcctctggtcttgcacggagcatgccaaccctgcagcctgcggggtgagggtgggggtggtaggtggtatgcgaaagccactgttagggcgtcctctatgcctcccctcttgttcctacagctagtactggaggaggagcaccagctgtttccacttctggaaggtagctgttagaagcatcaccgaggaccttcatccaaacgccactctttccaggacaattggcagctctggaggcattgacactgttccccatccgccaccccatcagagagttaacccccgaccataggaacccactgggcaggagtcttctggggcatgtcagtccagggcaggactggtcaagcctcccagggtgtgcccaatgtctccaatgtttcacctccacccgcccccaatccgtcaggctccgcttctcctccaggaggcagggaagggaaaaaggttactgacctgggagtgagggactgcagcacccttccacaatgaatccccccttccccaataaactccccttctgcaatgaacgcctgtgcatgatgggcgagggctagggtcagatcccaaactctggtctaacctgtggtttagggtggtgttgggttcagatgtcttctttcctcttaaaatctttgcttctgtgctctacttcttgccttcaccctcactcttccagctccgccgatcctcagcctccccggctgcactctcacctttctctctgggtccttggtctcgccactgtgcaggtgtcggctcaggacagacctgcgccagtgtgagcatctggacctagggctcaccctcctgccgtggaggtggggcccttatttgcataacctcttccagctcagaccagcccctgggctgggacacccgtgtggcacgtcgcccacgctgctataaaaggggtcccgcgcgacttccaaactcagcgccaacccgcagaaccaggaaagtaacggctacagacagtgagaaatagtttcgctcgccggctagaaaaactctgtcggtaccaaccccagarcgttgagagcagcccacctccacgcttccttaacggagaggtgcaggactcagacttcaccagcccactcggtcccagccttgtacgcaaagagacgycaaggacgcgctctcccgcgtccaggcagccccagcttgctggcttgcctgcccgcctgcgtgcagcactcggccggcgtgcagcatgaccctgtggaacggcgtactgcctttttacccccagccccggcatgcygcaggcttcagcgttccactgctcatcgttattctagtgtttttggctctagcagcaagcttcctgctcatcttgccggggatccgtggccactcggtaagggtgtcctcatagtgcaggtagagtgggggaaggctcatgggcagattgtctcctgagggacccaggacaggtaagactgtacaagagcctccatgaatagtcgaattgaggctcaggtggagtgaagtcaggagtctggtgcagcaagcacccctttccaaggatagggagagctccccatccaggatatcctggagaaggaccccagctgggtccttgggaaggctgctgcagagaatgggcacccagtccagtaatcctgaggaacagtmtaggcttcttgtgctggagggcctcccacctctcccaggactaaagctgcactctcatcccatccggtgggtgatgaccttcaggccaaaaggacagatgccagcagctcagactgcagtgttcccctttgcactgggttgagacacatgtgtatgggtgcctcatcctcaggactgagactcccacattggattagaagttggagccaactgggtgcattgtcttagactttccccctctcccagaacctaggttgtgcatttttcagttctgggaggacccagcttttctgcatcttaatctgtgttgctttccctggaactggtgcacctaggagtatctgcattcccacctcctcccctcggagatcaggctggggcctccctcttctgagggaggtgacccctgcgtgcctagcacttctggactcactgagcctcaccaagcagtgactggaccaggaggcagaaccaggaccaggcgccagacagctaggggagtgaaggtggtggaagagtgccaggaagtgggggtggaggggaggtgctgttagggtagatgggaaatggggctagggaggtgaaagtgcgtggtcacaaaatatcagaaatgccagtagcccagagggacttgcaggaaaagcgtgcctaacattagtctcaaaagtctggatataactaaagatccaggtgaagtggggtcaagggtggtcttggggactctggtttggcagggctcaggcctgacccgggtgcctattcctgcagcgctggttttggttggtgagagttcttctcagtctgttcataggcgcagaaattgtgggtgagtgtgtggtgcagcccatggggagaggacggggtgaggaaggaggtgggcagagggcacctgggacaatagggaactggggttggttttctgctccctcttcccactctccagctccttctagggcccactttttggcccttaccatgcaaccacattggacctctaagtccccatctctctgcagtgtcccacctcccataccactctctaattccattttcccaccctcatcccacccccaccgtgtgcctttccctacagctgtgcacttcagtgcagaatggttcgtgggtacagtgaacaccaacacatcctacaaagccttcagcgcagcgcgcgttacagcccgtgtcsgtctgctcgtgggcctggagggcattaatattacactcacaggtgagggggctggggctaaatgaactcctggagctgggagatccccggttaggtgagtgtgtcagggatagctggagggcctctcacatcccacaagctcaaatagcttgtggtcctcgtggatttgcgttttctccaaccaccaccgaacccatttctcccgccgagagcgccacacccccactttcctgtctgaatccgcttagttgcgaggtctccgaccgcgggcagcccsatgagccygcctcaccccrcagggaccccagtgcatcagctgaacgagaccattgactacaacgagcagttcacctggcgtctgaaagagaattacgccgcggagtacgcgaacgcactggagaaggggctgccggacccagtgctctacctggcggagaagttcacaccgagtagcccttgcggcctgtaccaccagtaccacctggcgggacactacgcctcggccacgctatggtaagcgctggagggaaggctgtgtgcacgtgtgtgtgtgccaggagctgggccgtatgagcgggaggatgcaggcctcggaggcactgagcagctgcagccagacccgacgcgctcggggtgggcatgacagcctcgcgggttagaagatccacgagatctgcacagacggaatccggagagactccagccaccgcctggacctcaggagcccgcttctcccccggggaattcccctgcaccgctgccatcccagtccctggctttggcgctggggtagggataaagaagagcgcagctgtgggaaccccggtgggctgggagaagcccgctcacagcgggttcccccactccccggcagggtggcgttctgcttctggctcctctccaacgtgctgctctccacgccggccccgctctacggaggcctggcactgctgaccaccggagccttcgcgctcttcggggtcttcgccttggcctccatctctagcgtgccgctctgcccgctccgcctaggctcctccgcgctcaccactcagtacggcgccgccttctgggtcacgctggcaaccggtgaggaccgagagaatgggccccgggggctaagggtggagacaggattcacaccgggtgtgcactttccagtttacagaatgaattcacatctattaccctatttgcccctctcaatagttcgcagaaacaggcactgttatgaccattttacagatgaaaagtggggggctcagaagggtttggtgtcttgccgtgtttcatgtaattcagattagaggtgtgtggcgggaggtaacacaaggggtaggctccaaaagatggaagaaggcccgggcatcacgcctgtaatcccagcactttgggaggtcgaggcaggaaggtcgtttgaggccagagttcgagaccagcctgggcaacatagccctgactccacatgccctcctttctttcgatccccaccgccacaggcgtcctgtgcctcttcctcggaggggccgtggtgagtctccagtatgttcggcccagcgctcttcgcacccttctggaccaaagcgccaaggactgcagccaggagagagggggctcacctcttatcctcggcgacccactgcacaagcaggccgctctcccagacttaaaatgtatcaccactaacctgtgagggggacccaatctggactccttccccgccttgggacatcgcaggccgggaagcagtgcccgccaggcctgggccaggagagctccaggaagggcactgagcgctgctggcgcgaggcctcggacatccgcaggcaccagggaaagtctcctggggcgatctgtaaataaacctttttttcttttgttttttaaaaactgtttttcccattaattttcatggcttctccgcgccggggtcgcacgtcctcatgagcttcgctgggctggagacagcctagtacactctccgcagtgctgtgaaacctgattctctgcgtcgactccagagtaataggggcgccctctagtgaggccggagggaccctaccagagctagcatctttctgaaccaccccagggggacgttaggtggcagtgatgaggcaggtcacccactcccccgtcctggatgccactcagctagcccagctgagtggggtgggaaggaatagcgttttggagttgattccctaacttcccacctggcttcttgtgaggtggtgtttgagggccaaggtaggtgtcagcaaggcatagaaagataaatcccaagattcttggcaagtcttgcaatcttatgtagcaaatttgggaactgaagctcaaagagaatgtggcatagttggttaatgttagacctaggatgagaagtttggtttcccctcctttccagtgctgtctttcattgtaccaaaaggccacacaagctggagaagtaaaggaagaacaaaaggaacccaggaaaaaggaaaacaagaggtgccgagggatgagaggaaaccataggagaatcatatgtaacccccaccctgctggtgttatgggggtgaagttaggtttcagtgaatagcatcttgaagaggcaaggcagcacggaaaggctgggttgctgtgcagataagctagcccctgcttggccttatcatggcaacaggctttatggacaggcccagcatctcttcagtcccttagggctttttgttttgttttgttttttaacatcagtatatagagcctcctttttctactccgtctgtagattggtgctgggtgtctggtaacagccaccctgagggcagttctgctggttttatggggcgccaatgaggtttggagccagactggaagtccaggtggcctccacggggaggaatgttataaagcacaatcaggatctttggggtgtgcctccttacagtatgccttggtggaggaagcctctgacaggggaatgtcctgggacttgggactgtcagccatggaccggtagcgggggctcaggagtccaccttcctcaggactccactccagcatggggtcttcatccacactctggttgaagaaagccttcagcctgtgaggctgcatcctgtgggccaccgccatagccaggcccagcagcacacacagcagtcctggagatgagggcaacaattgtcccaccttagtgctagtaacacctgccgaggatatcttcccctgggagtgtcagaacaactctaagggaagcctagagcccctgcttcagggcaacttgggctcagagaggtgactggctgaggggcatgtggctggtgtggctctgttgtcctaagtttccagactccaagcccagtgctccttctgttatatcccgggagagagagagagagaaagggggagagggagaactctgaaaatagggagagaaaagaaaaaaaccctggggaagggcagggcacagaggaggcatgaggaggcacatgagggagtagacagcgggacaggagaggagaataagactgcaggacaatttagggatgtgtaaggcaggacagggaagggtttaagaatggggacccagagaagggtatttggaggaagcaagaggggacagggggttggaagattttagaagcagctgggtgaagagagttaggggatgacagagacagagaagatacaagggagtgggcatctctgaggaggggggggaagtggcactggggagagaaaatcaggagataagagatacaagagggtgggactttaaagagggcaaagccatcctggcctccaggaacagaccctcaactctaccgacatgatgcccccaggccctccctccctggccttgagacttctagtgcttgtctttagggctgggtcttacctgtggtcaatgtgatccagaaggcaggcccatggtgagtatgcagcacagaagcgcccaggtgcaggggacagggtgaggtgagtgatgtggccatggagaagaagagcagagccaacagctggaagatgcccgtggccaatagcatgtagccaccatataccagcacaggcatggagagcatcacattggccagcagccagcagaggaatgccaccctggagagccaggacccagtgaggactggcccaggtacttctacctgctggtgaatttggatgggcccaggcggaggttcagggacccaagagtgacccaaagatatgaggtagggattccttcccatggacttcccaagccagcaccatggggactggtgccaggccaccccacctgagatacccacatgagtggaggagagatgggtagaaaccctgttcctgaatctaggctaccagggcctccaccccgtctccttcccatcctcaccatagcatggctgaggtgtagtgtcccgccaggcggtactggcggtataggccacatgggcttcttggagtgaacttctcagctaggtacaacacagggtctggcagccccttctccagagcctttgcatactcctcagcatagttctcacccaggcgccaggtgaactcctcgttgtaattgatggtctcattcagctgctgcacgggggtccctagggcacaaggcagctctgctcagcaggaacccaagggccagagtggggcctaggtagggactcacccacactgggcagagggacaggaagtggtctcaactgagagaaggtagcttccaaggccctgaatttcccttcctaccatgcctctgacctcccacctcacacatcctcccagcccctgtgccaggcatcctatagctctttgaccacaccaaacatagatcccaaagatggcagagccttcccccccaccacaggtaagagccctccctcacctgtgagtgtgatgttgactccacccagcccgacctgcagcccaatatcagcgctgatccactcagaactgaaggccttgtatgatgtgttggtgctgacctggcccacagaccactcagaactgaaattcacagctgtggttggggagttggacatatgggaactcagagatgactgggcattactaggttagagtcagaaggagaaatacaaggggtccatgtctgttttggtcataactggatacccgttaactagccagggtctggctcatggtaagtctgccaaccacatgtgtgggatttcccttggccatattctgtttacctcttccctccctttctccctgctttagggagagtcactcagggagctgggaaggaaacgtgaaccaaaaccatgccaggcaaggcaaacgcagatagcttcaacaaaaactttctttgagacggagtcttgctctgtctcccaggctggagtgcagtggcaccatcttggttcactgcaacctccgcctcccgggttcaagcaattctcctgcctcggcctcccgagtagctgggattacaggtgtctgccatcatgcccagctaattttttgtatttttagtagagatggggtttcccccatgttggtcaggctgatctcgaactcctgatctcaggtgatctacccacctcagcctcccaaagtgctgggattccaggcatgagccactgtgcccggcctcacggagactttcatctctcctatttgcctcatcaccaaactaaagcaaacagctgtttcccatttcctcccttcctttctggggccctctccccacagacattcattttgacctcctttcccccgaataaaagtgttaggaaggttgaggagatgcatccagcttgttttccagggtgacacctctccaggcaagggtaagagtggggagataaggccatggtgagagaaacatatgggcagggtctggaagccaccctgaagcaagggcccaccgctgtggggaaacaaggagaggagatgcaggctgctgagggagttgaagggatggaggcagcagcccaagtcagctgcacttcgcactcacccaggattgcagccccgatgaataagctggtcaccacccgaagcagccagaacagcctctgagtcacaaggtaggtgggttaagtaaagagtgccttccttccacatctacccttcctgtttccagacttgggggaggggcgggaattctaaagctgagatcacttggtcaattgaaatcagagtgtctggcacataataagtgcttatgtatttatgtatgcatttatttatttattagagacaggatctcactctcttgcccaggctggagggcagtgatgcgatcttatatcactgcagccactcaagtgatcctcccacctcagcctcccaagtagctggaactacagatgcacaccatgatgcccagctatttttttttttttaagag

SEQ ID NO: 98094 - DNA, 23775 bp, Homo sapiens
aaaaaaattttcttgaaaaaaattaagcatttctcttatacctgaagtagttatagttctttaatattttatttgagtagttcaatctcaaagtctattgaaaaccatttttaattataaaagaaggtaattgcatacaacagtgttcagtggtccttctacagttaaagcctgtgattcggagtactgaaaaattccacaagaaaataaaccaaaaagaggccgggcgcggtggctcacgcctgtaatcccagcacttcaggaggccaaggcgggtggatcacctgaggtcaggagtttgagaccagcctgaccaacatggtgaaactttgtctctactaaaaataaaaatattagttgggcgtggaggtatgtgactgtaatctcagctactcgggaggctgagatgggagaatcacttgaacccaggaggcagaggctgcagtgagccaagaacacatcaatgcactctagcctgggtggcacagcgagactccatctcaaaaaaaaaaaaattaaaattgaaaataaaccgaagataggtcatagaaggctaagtcctttctataaaactttccttaaaaggtaatgaatatgaataggttctacaaatatatataacttgaagatttaatcacctttcaagtgtgtaagatgaatattaaagttttttctataaaaatctattttaatcagtagcaacatagctaacatattatgtgacaagctctgctgtcagcccatacatacgtttaatccacatgaatatcctgtaaagcacatacaattttatgacccccattttaatgatggacaaactgaggctgccacaacttccatgatctactcaaagttacacagcctttatgtggcggagcccaggctcaaggtagatgtaactgacccaagcccctgctcttacacgctatcttcagttaagatttaaactcccctttctaaatgatgtcactatttcctctccatatgggtttcatctatctagaaaggaagccttgaaataagtaaagctctaatttaaatagcacttcagcaattaagtaaagcagaaaaccccagaacctatacgctaacttccgaaacaaaatctcctgaaatgccaactcaatcataaattttaagatgccaatctttcagaccatatctcatcctttgctttcctaagctccatcagaaaaatatggttgggtaggaagaggatcattcccaaagcctaaactccaagtttcttagtttggcaactatactgtgctttgggactttaaaattataagcacagttcccagaggagaacatttcctttattagcaattggctttgaaaattccattctcagatgctaaatataacaaaataccttctgacttttataaataaacatgctccagattattttgatactaatgattttctatttacaagacagttttgccacagcagttaagcaactgtaacattttgaggaatctttcaagtttactccagagctttttttttttttttttttaagacagagtcttgctctgtcgcccaggctggcgtgcagtggcgccatctcggctcactgcaagctccgcctcccaggttcacgccattctcctgcctctcagccttccgagtagctgggactacaggcgcccaccaccacgcccggctaattttttgtatttttagtagagatggggtttcaccatgttagccaggatggtctcgatctcctaacctcgtgatccacccgcctcgtcctcccaaagtgctgggattacaggcgtgagctaccacgcccagcctccagagcttttcttttcttttaagacgttgtttggctcttgttgcccaggctggatggagtgcaacggcgcaatctcggctcaccggaacctctgcctcccaagttcaagcgattctcctgcctcagcctcctgagtagctgggattacaggcatgcaccaccacgcccggctaattttgtatttttagtagagacggggtttctactaaaaccccgttggtcaggctggtctcgaactcctgacctcaggtgatctgcccacctcagcctcccaaagtgctgggattacaggcgtgagccaccgcgcccagcctattccagagcttttaaagcactgacttgaaaattgttcactggattcttctactatgaaattaaaaagttcttgtttcataatgcatttccttaaaatttattatttctaatttccttgggttctaacacaagaatattggcaaagccaaagtcatggaagtaggtgtttcccaaactatgaaacagaataaatcaggattttttaaaagtttactatgggccgggcacggtggctcacacctgtaatcccagcactttgggaggccaaagtgggtagatcacctgaggtcaggagttcgagaccaacctggccaacatggtgaaacctcgtctctactaaaaacacaaaaaaattagccagtcgtgatggcaggcacctgtaatcccaggtactggggaagctaaggcaggagaattgcttgaacacgggaggtggaggttgcagtgagccgagattgtgccattgcactccagcctgggcaacaagagcgaaactctgtctcaaaaaaaaacaaaaaaacaaaccaacaaacaaaagtttactatatacattcaaagacaaataatagatttcacagtttttaaaatgttcccttattaaaaatcccaaacatggccaggtgtggtggctcacgtctgtagtctcagcactttgggagaccgaggcgggcagatcacgaagtcaggagttcaagaccagcctggccaatacagtgaaaccccatctctactaaaaatacaaaaaaaaaaacgccaggtacagtggctcatgcctataatcccagcactttgggaagctgaggcgggaggatcacctaaggttgggagtttgaggccagcctgaccaacattgagaagccgtgcctctactaaaaatacaacattagccgggcatggtagcacacgcctgcagtcccagctactcgggcggctgaggcaggagaattgcttgaacctgggaggtagaggttgcgatgagccaacatcatgccattgcactccagcctgggcaaaagagcgaaactccctctcaaaaaaaaaaaaaaaaattagccgagcgtggtggcggatgcctatagtcccagctactcaggaggctgaggcaggagactagcttgaacctgggaggcagaggttgcagtgagctgagatcgtgccactgcactccagcctgggcgacagagagagactccgtctaaaaaaataataataataaaatcccatacatgacaattcagtgacaattgagaagttctgaataatggggtgaggaactgattgtcttgttctcggtaatgaacatcaggcttttaacagagtgcatagcagctgtcttttaggaaacaacacgccacaagtggacctcatgaccccaggcattctgtcactgtataagtgatataagtgcacctctagctggacagctcctcaggtcctcccagtctaaagtacaggatgtgaaagtaagacggttcaactcgcactttatctctgggggatggatccaacgagtccgggaaggagggtagaatctttatgttgcatctcataatcccaaggttgttttttgacattctaattattgtacatagttagcttttcaaaaacatggcccaccagctatcatgccttctttcttctctctctcctcacaccttctaggtccacaaagtcccactaacatcaagcatgatctcacccttaaacagagctacagagcctccaaacatctgcatactcaccaactagtagtacaaggtaagtcagaattctttcaggctgaaccaggatagccaaatgaaaaattagagacttcaaagtatcttgtctctgcaagcgactgctaaatcctcagccccagccctaaatgttctccaaaatatgtttttgtttttgttttttgagacagggtctcaaactcctgggctcaagcgatcctcctgcctcagcctccctagaagctaggattacaggcgagcagcactgtgcctggccaaaatatatgttctaaaaatcggtaggaacagttctctttggatagtccactgtcaactgcaataacacgaaagttgtttaaaaaaaacccatgatctcattatctttcaccaaaaacattcctcctagtgtaactgctctgttgacatcctgtcaccaaatcttgtgctttcttccttctgggtgtctccctaatgtccgttgcgtccagtcatcaaaaagttacaggctgcattaggggaagccgtgagcctggtgtaaggcaacagggattggtgggaaccgatgatcctcagctccagccaaccattgagcaggtgacaaagtgatggtggaccctccaattatctaagacaggcaagaaatttagattgttaggagaaactttctgatttttaaggcaatatgtgggccaaagaaaacatctacaggtcactcatgggcaatcccgagtgaaccaggctccctcagtctggtccaggctccctcagtcccttctacacatcactgtctgatcagtttcccaaacacagggctcctgatcactgctatctcggaaagcacaactactgctacaaagtcctatactgccattcaacctccacagtaataaaaccaatccctaccttccttaactcccctacacagatctttcacttcacccaaaggagtccactcccccacccgtcacccccgccactgtccccgccaagatggcctccttcctactctcctcccctacccaccagagcccacacggtgcaggaaacaacccatcaaccgggaggacgccctccaacacctgctgatgacggactggctcactgggtaacacccctttgctcaaagccgatgatttcatgcccaagaagggatttacatctcccaggaggcaaatgctatggccttgtcctgattcccccaccccccaaaataataacattgtaaaagggaacggagagcctaagttgcgctcagaggagccgcctccctaagaaggctctgcatatcttcacctccaggaaggcctcacggagttgggggagaggggagtccccgcagccagcccagcgaggcaggaggccgtgcgccactcccgagaagctccttcctgcgccccgggggagccacttcagtcagaccctgagccgggaccccgacccgccgacccctgacgcgcgcgccgcgaaggccgggcacccgagggcccttcgcgctacccgggcccggggccgccgtcggctgcgacaaagggtcagagaacaagacgacccctctgcgcgcgtcccccgcaggcctcccggatgcgccgctgtcccggccgcgcccaccccgacgctgccgctaccttgtcctcgggtggcgcaaccggctcatgggccaccctctgcctcagctctgtcatcctgggaaaatcggcccgacgtcgccgcgagctagcagcgaagccgccggagcaggcagctcggcgcgggcacgcgcggactcccacggccggccccgccccgcccgggaggcgcgcggctctgagcggctcacagttcccttagcagcccagcagccagccctggagctcggccccacccagtgccgtcaccgccctttcacccgggccgagcggggtcagccttccctagccccgacccgagagctccctctcccgggagcagggctcggagcgagtgcgcacgcgcagcgccaccatcacggtccggaatatccaccaatggcgcaaatacgccagggaggcagggcgacgggggcggggcggggcggagcagagtcgagaggcgcgcattggacggcagcgtcaggggcgggaaaaggcgtgcgtttcagtgtgcgattagccaatgggagctcccgcttaaccgcggatggccggagctggcgccctggttctggaggtaaccggttactgagggcgagaagcgccacccggaggctctagcctgacaaatgcttgctgacctgggccagagctcttcccttacgcaagtaagtagacgttatttaggtcgaatggaaaggccaggtgagccgacctggttaagagcattttatcacttatcacatgatgagaaatgaaacccacgcttcagtctgctttgctttgccaagcggtcgctagtacttgttaagcactaattgtatactaggcactgagctgagtaatcgctttagttggcttatctcgtttaatccacacatggcttggaagtgggtatgatttgaattttacagttaagatcttcctcagtggtttgtttgtttgttcgtttgtttgtttgttttgtgacggagtctcgctctgtcgcccaggctggagtgcagtggcatgatctcgactcactgcaacctctgcctcccgggcgcaaacaattccaaggtgcgcgccaccacgcccggctaacttttgtatttttagtagagacggggtttcaccatattggtcaggctggtctcgaactcctgacctcaggtgatccgtccgcctccgccttccaaagtgctgggattacaggcgtgagccaccgagcctggcccttcctcagtttttcaaatttgtcttctggactatggaaagaccttttttgggacagaagtgctgtctactttgtttactgtgcatcctctatgtctttgacacatccattgtaagtacttgttggatggatttaaaacttttaaaaggaccttagccaaggtctcccagctagaaagtgcctagtaagaattagaacacaaacaggtttgttaccagcccacactctaaccaccatactatactgcctgcctgcatttattaatacttgtgttgctccagcattgcctttggtgtttcctgttctttctrttcactgccctgtaagtgatgtaaaacacatataacactgcgtccccaacttaagcatactgtaatctcacaatgagacacttgcacacaaaagaattgcaatttcrttttttaaaaaaatataattttacatttttcttcttttcaatttttaaattttaattaatttatttctcctttttttagagacagggtctcactatgttgcccagactggtcttgaactcctgggttcaagagatcctcccgcctaggtctcccaaagtgctgggattacaggcatgagctaccatgcctggctaaaatttcctattggtaattttgacctgagctgtgagttttggggcaggtagtgagaattctgaaaacagcattatatattcctgatttctatatgagtatatgcccgagtagcttggactacaggtgtgcagcaccacacccagctaacttttaaatttttgtgtagcgatgaagtctcactttattgcttaggctggtcttaaactcctgggctcgagcaatcctcccacataggcctcctaaagttctgggattacaggcatgagccacagcactcgagcaagatgatcttctaagacaggtgaagatgttagtgtctagaacttcaccttcaggggcacgtaggtatgaaaggtcatatctaagtgagtgtcatgtcagtccttctagaaactcagctgctccttttcaaatccagcctaataaaaggaggcttggagaatcaatgcacataagtcagaattatagaatgcacagtatgattactaggatggataacatgtggtctgaacaaacttctcatccattacactcagccctctcaggttaatggaactcagatcaagtatattcctgaagtcagtactgtgtgacgaacaggggtctggtggaagtgatgctaatagggctttaggccagctttagagcccttctctctctctcttttcgttttttgttttctttttgtttgttttttgttttttttttttagacagtttccctcttgttgctcaggctggagtgcaatggtgtgatctcggctcactgcaacctccgcctccyaggttcaagcaattctcctgtctcarcctcccgagtagctgggactacaggcgcccgccaccacagctggctaatttttgtatttttagtagagacaggggttttaggtcaggctggttttgaattcttgacctcaggtgatccgcccacctgggcctcccaaagtgctgggattacaggcatcagccactgcacctggctcaagaaacattcttaagcatgcttgatcttggtaaatgcccctgatttcttctgtaggaaaaaaccctagagatcgaatttctgtgtcaaagaataagtaaaattctaaggcttttgatacacatttctaagtttccaccagaaaaattataccaatgtatactcccacttgcaatgtatttaagtgcctacttccttgaakccttcctaacacaccaggtgttaacatgatttttattaatttggtaggttaaaattctgtctccattgaatttacatttctttgcttattaatgtggctaacaaacttcacgtttatgaagactaggactggacagtggaggccagatacctctggctttttgtttagatgaataaattttctatttctcttaatccattcaagttgagttctctgtcactgaaacctaaactatactaaccaatataatcctttgaggcatactgaagtcttaaaacttgtatggttattcattatgttttatgggtttttttcttatgtttggaagcccataggaagatctcataaatatttaccaaaatatttttccatttcttattgggtcaagatttgaatttgaattctttatctagaatttagtgaataattattaggaaaagtctttttttttttttttgagatggaggtttgctctgtcacccaggctggagtacagtggcgcaatcttggttcactgcaacctctgcctcccgggttcaagcaattctcctgcgtcagcctccctagtatctggaattacaggtgtgcaccaccacgcccagctaatttttgtatttttagtagagacggggtttcaccatgttggcctggctggtctcgaactcctgacctcagatgatccacctacctcagcctcccaaagttctgggattacaggcatgagccactgcgcccatccagaaaagtctacagcttttattcttttctaatagtttaaccaattatctgatcaaaatttacttcattctttctcccactgatccaatagtacctttactagatgttagagtagccacttaaaatgtaaattggatcacatcaaagatctgctgttgaccacattcccttgcacttttagagagcctacaaagtcctgcaagagctcaccccagcctctctgcaacctcaccttgcaccactcttgcttcagacacatcagtctgagttctacatcaaacttgtctgaatatattccaagtatgctgacctttataatcatgctattctctcagcctagaatgcttttttccaactctccaagcagctgtcttctctgataagatgctacctcctcagagaggccttctctgaccacagtcataggcatgtttatgtcctcatttcagtttaacataaaatttacgtaactgtacacctctttatcatttgacacttttaggaggacatcacttctgtaatagagcagaaataaacagattgatgtacatggtggatcccccatggatagagtttgtcatttaaaatgtcttcaaatctattacatgtaatttggcattaaaccaaaatgttattatgtaagcagacagaactgaaacagagtagtggagcatatgcatttgtttttagtgaagcaaatgttcctcactggaggaaggaacacattccacattttgcaaaggaactgagattttaacggacccaagaaaggaaaagaaccacaaacagatgatgctgtattatgttttgatattgagatgtatgcaaatgggtagtccatcacacataaagcaagaaagtgccaacatcaaaacttacaaatgagtagcagaggcttgcaagaaattccagagacaatagaatagcactattgaaaaatactgcatcatcaatacccttgacaacacagagtaggatattatacagaaaaacagcagaatcagcaactaactgagtggagaaacagtaggaatgccttaaccaatgtagcttaaattttttcatgtttgcacaagagtaatatataataagaatgtttttaaagtctaaaagttcttttaaaacaaaatagacccgggcgcggtggctcatgcctgtaatcccagcactttgggaggccaaggcaggcagatcacatgaggtcaggagttcaagaccaacctggccaacatggcaaaaccccrtctctacyaaaaatacaaaaattagccaggtgtgatggcgcatgcctgtaatcctagctattcaggaggctgaggcatgagaattgcttgaacccaggaggcggagattgcggttagccaagatcacaccactgcactccagcctgggtgatagagtgagactctgtctcagaaaaaaaaaaaagaaaaagaaaaagaaaaaaaaaaagaaattctaagtgataaagcattgtgtaacagtttgaggctgggcacagtggctcatgcctgtaatctcacactttgggagaccgattgggaagattgcttgagcccaggagttggagaccagccagagcgacatagtgggaccttctctctacaaaaacatttaaaaattagccaggtacagtggtgcacccctgtagtcccagctatttgggaggtggcaagaggatctctcgagcctagaagttggaggtggcagtgagyagtcatcttgccactgcactccagcctgggtgtcaaagggagactcccctctctagaaaataataaaaaaaaaagtttgacagttttcttgcttgtgctacataaaataatggtacatattacaattgaaggcatcttataatagaaatgccctttcctgttcccttttaaggctgacccagtgctttaagaggctgatacagaagggtaaagttaagtctccacaaaatccagggaagagactgtgaaactcatcttagaaccttgtatggagtcacagctgaactaggaaaaaaaaaaaaaaaaaaaaaaggaaagaaaggcattccagagataaagaatagactaaggagaggagatatttgaagccataatgattgagaatatgtcagacttgaaatgaatcttcagttccctcaacaagacaaataaaactaactccatacctagatacatggtagaaaaactaaagaattctgctgaccaaggtattaaaagtaactaaagagaagtggtgtgaagaaagcaagagagaaacaacaaatcctgtccatcctgtaacaattgaaaatttctggctgggcgtggtggctcacgcctgtaatcccagcactttgagaggccgaggcaggtggatcacctcaggtcaggtgttcaagaccagcctggccaacatggtgaaaccccgtctctactaaaaaaaaataataataataatacaaaaattagccgggsgtggtggtaggcacctgtaatcccagatactcgggaggctgaggcaggagactcacttgaacctgggaggcggaggttgcaatgagctgagatcgcgccactgtactccagcctggatgacagagcaggactccatctcaaaaagaaaggaaaagaaaagaaaaaatattaaatgtgtacgctctttgactcagctgtattacttcaaggagttgatatcaccaaaattgcctaagtgctcaaaggtgtttgtagttaaacaacaggagattgataaattatgttatatacatgtgatgctatgttttaaagaggtactgatatgataaaagatgtacgtggcataaaattaaatgtactttattaagtacttttccaagtgtttacggaatgagtgcatttttgaaaaaaaaaaagtgtattcgaacttttaaaaaagctttaaaagctttatacaatgaacgattgagtgattataagagctggcgggggaatgttaagaggatgatagggagctaagtttaacagaacaattcacctctttatcttgtgacacctacgagcgcatcaattctgtaattgaaaaataaagtgcatatttgcagcagctgtactctcttcaggctgcaaggaggcttttcctcccggtaggcttgatttgcatttcactttcactttcgtggctggaaactttctacccacgtagtgggaggctgaggagccaccataaagctggggcttgacgagccgggaccgggacccgatctccacatatgcccggacttgttctgcggccgggttcaggagtcaaagaggcggggagacstgcgcgacgctgccccgccctgcgcccgcttcctccaatgtatgctctagggggcgggcctcgcggggagcatggacacgattggccctaaagtctyccccgcaaggccgtgggctggacagcgtggtgacgtcgcaacgcggcgcagggtgagagcgcgcgcttgcggacgcggcggcattaaacggttgcaggcgtagcagagtggtcgttgtctttctaggtctcagccggtcgtcgcgacgttcgcccgctcgctctgaggctcctgaagccgaaaccagctagactttcctccttcccgcctgcctgtagcggcgttgttgccactccgccaccatgttcgaggcgcgcctggtccagggctccatcctcaagaaggtgttggaggcactcaaggacctcatcaacgaggcctgctgggatattagctccagcggtgtaaacctgcagagmatggactcgtcccacgtctctttggtgcagctcaccctgcggtctgagggcttcgacacctaccgctgcgaccgcaacctggccatgggcgtgaacctcaccaggtgagcctcgcggcsccgggaagccggccccggcccgcmtgcacctccggtgcttggcgggagcgctttcgagcctagccctcattggctggcgtgggccatccgcgccttctcattggcctgccacgcagtggggtggggcccagctgagcgcgcggttcggaaaagcccgcgctggctgctgcgcgaacctgctttttcgcgccaaagtcacaaagcgggtggtggcgggaaartcaagggtttttccgcagtgccaggaacactgttccagggctctttgctcactaaatcctgttggccttgaatggacgctttagctgtggctttcttgtttctgagacggtctcggtgtgttgcccgggctggtctccaacttctgggctcaagcgatcctcccggctcagtcgcggttgactttaaatgctttataatgcccttgcgagaaatgtggcagcctgtcatcctacttagtggcaggagattgtttctatccagaagggacactgctggtggtattttagtataaatactgccagatgcgtcccaaaacgtctgcattaataatggcatcctccagcagtccgyttaccctccaccagttctgagacggcctgatgggtgagagtggtaaccccttctaaccgcgttcgaaatacagcccttcagcagacggcgttgattttaaagcatgtgtctcctgtcttytagtatgtccaaaatactaaaatgcgccggcaatgaagatatcattacactaagggccgaagataacgcggataccttggcgctagtatttgaagcaccaagtaagtcgtacctttttaccgagtcacgaagctacagaaaatcaaaactctgtgtcagtatttctcaaaagcatctgctttcttttggtagaccaggagaaagtttcagactatgaaatgaagttgatggatttagatgttgaacaacttggaattccagtgagtatcagtttctcattgtagagagtgctgtacacaggcacgatagttatgtcatagaatgtttgtttatttttacagacagggtcttggctctgttgcccaggctggagtgcagtagtgccatatagctctctctaacctgggattcctgggctcaagcagtcctcttgccttagtctcctaagtggctaggaaggactacgggcctgtcccaccacacctggctaatttttycatttttgtgtgtgggcgtgggggcrgtcttgcccaggctggtctggaactcctggcctcaagtgatcctcctccgtcaagatatgttaatataatttaagcctacttcataacaactttttctagaaatatatctactggtgcatgtttcaaagagagattttagtatttggatagttgttcaccacaagtctaaaactcacaggttaaatttattgtttactgccagttgtctatttgcattaacttccatgaacctcttttaaaatttgtttccttctagaatgcttgctttttattaagtggattttaaagctgacttggaagaaatttatccaggttaggtttataaacaccaaaggagagaagaaatgtttgaatgttgaaaatgcctaatatattctcttgctttcttttagaaagtagttaggcctgcttgcgccatcatgatttctgtgccatactctaatgttctcttactttatccctggaggatgaggaggaggaggctcttgttccctggatggtgcatttaatagccatttatttttttgagtggagtttgttaagaaattacgcaagtcatattttaaagtaatcagaaaatattgattctgagttgtttaggtgttgccttttaagaaagtgagggtgccaaatcattaaatttctaacaattaacttttggaaaatttttgttcttaataggaacaggagtacagctgtgtagtaaagatgccttctggtgaatttgcacgtatatgccgagatctcagccatattggagatgctgttgtaatttcctgtgcaaaagayggagtgaaattttctgcaagtggagaacttggaaatggaaacattaaattgtcacagacaagtaatgtcgataaagaggaggaagctgtaagtagtttttaagtaaaaagaaaatagtttgaagagaattataatacygcttattaggttaattgctaaaattaaaagtagacagaattggatcccaagtaatttctgaaaattgagatactgttgaaatctgcgamtgatttataagtgtcatccaatttagaattatatttgcaagaagggaatacaaattcagcacgtgtacataccacagaacagtggtttatggatcaagtccacaccggctcttaagggtaggattgggaagttaggcgtataacctttagctttctggagatacttactctcttaccaaataattgagcataggacagcagctcaatagaaggatatggttaggagtaaaagtctacctgtttggagcacttatgtaatcctaatattagcttacatgttgtgggtccaattggtagcccattttaaaggtggagaagcaggctgagcaaccttaagtgacaatttagccaaagtcacaggctgtaggaatcaaaggttaaacaggaaggagacttctcactaaggctagaaagcagactccatgcaactttgagagtacctagagagcccttgtttaaccaaaatagaaagaacatggcaaaaccccatctctactaaaaatataaaaattagccgggtgtggtggcgcacacctgtaatcccagctacttggaatgctgagatgggagaatgacttgaaccgaggaggcggaggttgcagtgagcccagatcatgccactcccctccagcctgggtgacagagcaagattccatcttaaacaaacaaaaaaaactcgctaacctgggcataaattaaaactttgtaaatcaaggacaaaggtcctaacctcataaccttgttaggattaaatacggtagcattaaagagcttagcatatgctgtgtgtggcatattataagcttacaataaatactatatattgctctcttgtcccttgaatgggtagtcaacatttagtttaaataaaggtaaaattcagttgaaaggtttttttttaaattaataaagtctaggagctgattctttatctgtttcctgaatcacatttccactcctgccaacctcgtttttttctttttctgtttttctttgtttttgagacagggtcttgctctgtccacccaggctggagtgcggtggtgcagtyggttcactacagcctcaaactccagggcttaagtgatcctcctgcctcagtttcccaagtagcygggactacaggtgtgtgccaacacacctagcctggtttcccctaatttcattttcccccttccattacaatctatttgttgaagaaattagatcatttattaagttttccagagtttggattttgctgattgcattcctgtgtatacataaattcctctaccctgtgtgtcctacagactggtagctatagccctggagccttgatattcagggtgttttgtttcgggggtgagagagcaagaatataggtggtggtgtgtgcctctagtaggaggcacagggtgtctggatgtgtttgcaatgttagcagctataatagtcattgtctagatccattaagtcattaattagagtttgcagagctgaaattaatacgttttattcacttattggctgcttattagaaaaacttccataaagaaaagctttcccatattatataatttggttatctaaattatagctataggaaagacaagctagataatcgagtcttttgctttatgtatcagtcttcaaaattttcatagctccctccaaagtgaccaatacaagtgtttgtgggtttttataaatatataatgagctaatagattgcaactttcttgatgtttttcaatgatgaatcttttgttttgtaggttaccatagagatgaatgaaccagttcaactaacttttgcactgaggtacctgaacttctttacaaaagccactccactctcttcaacggtgacactcagtatgtctgcagatgtaccscttggtaagataataaatttgaaccttgttttgtaggtagtcatatgtgatacatactcctcagtaattaaccatcttcctgtctttcagttgtagagtataaaattgcggatatgggacacttaaaatactacttggctcccaagatcgaggatgaagaaggatcttaggcattcttaaaattcaagaaaataaaactaagctctttgagaactgcttctaagatgccagcatatactgaagtcttttctgtcaccaaatttgtacctctaagtacatatgtagatattgttttctgtaaataacctatttttttctytattctctscaatttgtttaaagaataaagtccaaagtcagatctggtctagttaacctagaagtatwtttgtctcttagaaatacttgtgatttttataatacaaaagggtcttgactctaaatgcagttttaagaattgtttttgaatttaaataaagttacttgaatttcaaacatcacagggcagtgtcttcattttgaccaggactgttggaagtatcctactgaattcccagctacagctaccctttcgtttaaatggtttttcagtttagagcagcctgatggagatcaaaaggatttcaaatacagtaggttactagatattttaggggattcacttgtcaaacttgttattccaatttgagctcaaggaacaagtgagagagtagtacaaatcctgtgtatttcattttacttggcaaaaattaatactcttcagaagcttaatgtacccaaagtcgtgtgggctttataagatgttaatggagtgtttctttttagcctggggaatcttacaagagtcttggatgtttcagtagagctgtaatggggcccaaggagtatggttgtacaaaatttctctagtataagtacactttgcaacttcactcaaaggatgaagatgtcttaaattccacggatgttggatccaaccaagaaagtgaaaaagccctgaagttgtgaagaaagacttaaaaacattcccactaatagctacaagttcactgtgtgctgtgtattaagaattttttgccaggcacggtgcctcacacctgtaatcccagcactttgggaggtaggcggatcaactaaagtcaggagttcgagaccagcctggtcaacatggtgaaaccccatttctactaaaaatgcaaaaaaaaaattagccaggcatggtggcacatgcctgtagtcccagctacttgggaggctgaggcagaagaatcacttaaacccaggaggtggaggttgcagtgagccaagatcatgccactgcactccagcctggtcaacagagtgagactccatctcaaaaaaaattattggctggtttaatagtagtaggttatcagaacttactaacattagtatcactaaagtaggtatacaacccctgctgctcaatttggctttagaaaaaacatttttaaaaactgctttatcataatccttttttccagtgcatttttgtgtttggtagattaaatgactgatttctttcttaaattacttggactgagttctagttactggacatgagaattaaccatgtccagtagtaagttcattttcctacagtgtgcctgtgagtggagaaggaaataggctgcaaaagagcccgatggaactttggggtgatggatatatttccatctagattggtgatggttctaggaccgtatgtattttcagagctcatctatttgtacttgtgtataaatacttcaataaacctaactttttaaaaagcttcatttgccgcaaaatgtcccttgtgggcaggccttttacctggacaagccctaaagataagcacaagtttgtggggctattcaagggaagtatagtggggtgctgacagcacagacaagtgtgctattcaagggaagtgtggtagtggggtgttgacggcgcgcgcccatggaaggctggcgccttgcagcggatatctggccgctctgactgctggtcctgaggctcgacggactcggcttctgcctccctgggaagccacggcggtctctagcctggcccctgtactgaggaggggagaaaccacgtagccggcttgccctggacctgactgtgacccaggtaggtgaggaccctaggtgctcgcccgccacagcggaggtagccggcggcaggcacaggtcgcggctgcttaaacaaaacccacgaagaagcattcgggccgtgcagccccggagtcccggtgcctcctgcaggtgacactcggtaagggttagcccgggaagctgggtaaagagacaaacgcttccggagacgcaacttccgacgcgcctgtttccggcacgccacttccggcgcactgatcccgcctggggccggctgagtggcacttaagcgggccatgccatgcaaccttgggcgctgccaaccgtgggcgagctctgggtgtgcgggcggcctggcgcggcgctccggtaaggcgtgtgtgcggcagggcggggacagaaccgtcctctcgggctctgggcgtgtccgagaccgcgctccccgccgaaatcaagctccgagtcatccgtgtggggcattcgtcccccctggcacagttggcctctttccagaagcccgttttgtttgttttacgtctaaattcgcgtcggttcttatttctctccctggcaaggtctgaagacgggtaggagaataacgtatgtagaggcgcgtaatgccaggcactgtgtgccaaacgttttatgatgcttttagaactctcgtaacattcaggtgctgagggagtttgggggtagcggtgagctggtaaaaagcctgttggcaacgaagactgatactttgaaaatgctcgtttttatttttcccgtcttttagaatcctctttgccaagagtaaacattcgtctcccctctccctcacgcccctgcgatgtattgttttgatgcggatgtatgaacagttaatgtcaggggacgtactttaaaaaaaagtctaattgcaagttagatgtggttaaatgccctcaaaaaccacacatactggtagtttgaactttgttttatagaattaaatgcagccgggatcacaacactaaaaacctactatttgacacagtttgatccaatcttttttgaaaagtatagagattaacattatgctaatttttaaatacttgatttctagaccaggatgtaatcaataaaaacggatattaatatttagcaccaattatttaattatgctagttattttacattgactgcaagccacgtaaaacagttaggccgggcgcgctggctcacgcctgtaatcccagcactttgggaggccgaggcggacggatcaaaaggtcaggagtttgagaccagcctggccaatatggtgaagcccgtctctactaaaaatagaaaaattagccgggcgtggtagcaggctcctgtagtcccagccacttgggaggcagatgcaggagaatcgtttgaaccctggaggcggaggttgcagtgagctgagatcgggtccctaaactctagcctgggtgacagagcgagactccgtctcaaaaaaaagaaaacaccaaaaaaaaagaaaaacaatttgttattttttggaattaggtatgtacaaagtacttagaacagctggcatctaacaaagactaggtaagtactaaccaccattattgtgatgatgataatgatgaattttaaaaatgccatcccagagaaaaactagtcctttttttatgttgcccttatgcccttattgaaatactgaattttttttttttttttttttttttttttttttttttttttagatggagtctagttctgtcgcccaggctggagcccagtggtgtgatctcagctcactgcaatctccacctcctggcttcaagcgattcttctgcttcagcctcccgagtaggtgggactacaggcacccaccaccatgcccggctaatttttgtatttctagtagagacagggtttccccatattggccaggctggtctcgaactcctgaccttgtgatccatctgccttggcctcccaaagtgctaggattacaggtgtgagccactgcgcctggtcagttttgtcttttttaaagatatgtttttgaatttagaatttaaaaaccctgactaaaatatatttacccattttgatcatatagctttgttactttatggaggaaaagtggacaaattaaaaaaaaaattttctttttttttttttgactcagggtctcattctgtcgcccaggctggagtgcagtggtgcagtctcggctcactgtaacctccgtctcccaggctcaagctattctcgtgcctcagccttccaaatagctgggattacaggtgtgtgccactgcacctggctaatttttgtagttttagtagaaatggggtttcaccatgttggccaagctggtctcgaattcctgacctcaggtaacccacccacctcagcctcccaaagttctgggattacaggcgtgagctatcacgcccggcctattaatacaaatggtcttaatttaaatgttatgatttttcaaacttacccactgtctcttaaactagtgacataatagccatgatttcattactgctgtctgctttgaatattttgaacaagaagccaggttgttattccatttttttctttctttctttaaaattttttgtaagatattataccatattccgtttcttaaggttggtacagaagtaattaggaaaatgaaatcactactttcagtgcttgggatgggacagagaggtgggcgcttctggaggcactagtatagccaggcctgtatccaaatttacaaggggcccggcacagtggcctgtaatcccagcactttggaaggctgagttgggcagaacacttgaggtcagaagttcgagaccagcctggccaacgtggtaaaaccccatctctactaaaaatgcaaaaattagccaggcgtggtggcacacgcctgtaatcccagctactcaggaggctgaggcaggaggattgcttgaacccaggaggcagaggcagcagtgaatggagattgcgccactgcactccatcctggacagcaaagtgagactatcgcaaagaaaaaaaaaaaaactgagttcaagaccagcccggccaccatggtgaaaaccagttcgttacttaaaaaatacaaaaattaactaggcatggtggtgcatggctataatcccaactactcgggaggctgaggcaggagaatcgtttgaacctgggaggcggtggttgtagtgagctgagatcaacccactgcactctagcctgtgtgacaaagcaagacaccgtctccaaaaaatacaaacaaacaacaacaacaaaaaaaccccacaaatttacggcaagaaactttacagatcttttgcattaaaaggttgatctctatcaaggggaaataggcaaaatgctgatgtgagtgtattccattctctgccctcttctccctccctgtcaaacaagagaatcatttgagtatatgctcctcttgctttttcttaagagcgggagcaggggacaggcaatgctgtggtgtcaggtggacctagatttaagtccccattattctacctagtctctatgtgactttggaaaaattaaaagtcagggaatcttggtggcaaaataaactggaatgtgattcttggtgagtgtcttcactgtcattctacaaggacagaccagactagatatttaatacatagtgagaatcttttcactgtgtcagaggcatatctggttttccatatgcatatgcctctgacacaatgaaaatttagcagtgaagtgtaaattgcccattgctagtctgacatggcagcccagaactccagtgcacagcatctaataatcctgaactcattggctataatgcaccattgtcatctacagacaataacgggttttttgtttttaaactgtagctgtgtcagcgtgttatgatgccgtcccgtaccaacctggctactggaatccccagtagtaaagtgaaatattcaaggctctccagcacagacgatggctacattgaccttcaggtaaatgcagaagagaactgacaagactgactggctgtgtttctgttaagttagcaggaagaccttccagatggagattttgctaactgtccttggggattagaaggagcaacaagaagaaaactcagctctgagaccctttcagccataatcgcagaagagggccgtggcagggtagtttcaaaccaattccagtattgtccatttctaagaatttttagttgtaatgcgagagccttgtagttacaggttttatttactttattcagaaactaatcagattgtgttttgttaagtggagttttttgttgttgtttctttttttaaggaactttaaaatttttgttaggtggaattttttttatcactgtttatttacactttagtcaaagcccgttcaccttttaagggagaaacttattactaaagccagcagattgtgggaatcttccttctttcctgatgtcatgagatccaatttattaaagg

SEQ ID NO: 98095 - DNA, 42100 bp, Homo sapiens
gtggctgctagaattccttgacttgtctacatcactccaatctctgcctattgtagtcacattaccttcttgtctgtctgtgtgaaatctcctgtctcttaaatggattcatgtgattgcccacttgcataatcatttcatctcaaaatctttaacttaatcacaactttgcctgtataagttaatattcatgtttccagggacttagccttcatatatttggaagtcatgtttcagcctaccacaattgctatagttatccttcaattaccatttgttgttgattgaggatgcttccagtggaaaaatctgtggcacttcagacctgccctagaggggtccagaaaaagtccttaagtgaaaatttgcaagtgctcagaggactttttcagcatgtatggaacacgaagtactgaggatatgtagacgagacaccaacaacatttgtgtagggcccccaggagacctcccgcacagccccttgcggctttctttctgtgtcctgaataaaaaattagagtgccttgactgctctgtgacctagccatctgcaggttcatcccagcaggcttcaacacaaactggggctttgaacagtcccaggcactggtaaaagtatctaagttgttgcccaaaacactgaaagtactggctcaggccctgagtcacataccttaaaccctcatataaactccgtaccctgaccccctcactgtggacatacctaggtccacaccccttttctctcactgtccatcatgaggattgccacagcactctgtaggtaagttctcctaacaattgttttgggttgatcaccccggcatttaatgcttctttcggccaggcacagtggcttacgcctgtaatcccagcactttgggaggccgaggcgggcggatcacctgaggttgggagttcgagaccagcctgaccaacatggagaaaccttgtctctactaaaaatacaaaattagccgggcatgttggcacatgcctgtaatcccagctactcaggaggctgaggcaggagaagcacttgaacccgggaggcggaggttgaggtgagctgagatcgtgccattgcgctccagcctgggccacaagagtgaactctgtctcaaaaaaaaaaaaaaaaaaaaaaaatgcttctttctatggcatcccaactgggggccttttctcaagacagtttgggacacaccgttgtgggaacttccctgtcgctgcttttgtttgtttttgagatggagtcttgctctgttgcccaggctggagtgcagtggtgagatcataactcactgaagccactaattcctggcctaccactgcttttggggtgattcaagctgtgggttcagcaggacaaaaaatctgctacatcattattctaatgtttgctattattttggtttttggttaatacttttaatttaataattaattataattattagctatcttaacctaattttctgatgcaccacaatataaattatttgtactacctgagtgaccttgcttagaacaaattataccatctatttaaactttgtcctttctcctgttctcatttaggtatacattgctctatgacttcctctaaagcagcttgtctttattttttagcacctatgtgatcttttctattattctctatttggtaattcataattatcattctcaactacacacaaacacacacacacacacacacacacaatttctcaacaatattttaacattttcaaaggtagagaccatgatatacgtattttcaaatcctttctttttttttttttttgcgatagcctcactctgtcgcccaggctggagtgcagtggcaccctcatagctcactgtagccttgaacacgtggcctcaaataatcctcctgcctcagcctcccaaagtgctgggattacaggcaggagccacaatgcctggacagtaatatctaaatattacttaaatattacagttatgtttttttagctctctgatagtgagttgtttttttttccccttggctgtagcactatctcaaaggtctgaacagagattctagactccttccctcccctggattttattttactttagtttagttttgtttttgtttcccctgaattttaggaagggaaacagaaagaggcctaggcagagccaagcacttcgacataagggaggactgtatattgtacaattccaggggcgtcattcacagtttatttgtaaagatagcaaactttttttttttgatctatgacagtgaagtgtcttaaggacatggaagctttttctaatttccacaggtcccctttgggtgagctgtagggcaacctgcctgcctcttttatgtctaagatgattgacagtgataacatccaattacgatgtttattttctaatttgtgatactgaagtgtgggctttttctatcgccaaacacttactacaaagtgacaaacattcatatagtcccttattataacttatgtaaattatcttgtggtactggaaaaaaagaagccttgtttattattccatgtccacttagtgacagttttcaaaactgtttgtttatagaaaatggattaattataatacggtaaatggccaagaaagcccttgcttgttgacaaagatctctggagtatttgggattctagctgtgggtaaaagaaagaaatagggaatgttacaagaggtacaagtgaaaaaaaatagttcttttgaacatggtaatgtgaagtcccatggttaggaggtagagctgtccaggaggcagatggctataagaatgaagcttggggaagaagtataggctggacaaaatctctttgtaataggtagatggatgaaatcacgctggaaaagcaagtagagcaagaagagtggtagacaagtgggccaagagtagaaccctgagagtcacctacattgaagaagcctaaggaggaagaaatggaggtaggaggagaacctggggaacaggctattaggaaagccaagggaatcaacattctaatgtgtgaagggagatacgcgtagcatcaaaggcagcagagagatctagtgaggttaaatgagaaagaagtaatgtaattccgtacacaattagaaaaaactcacaacactttggaggttcttggtgaccttaattagatcagtttcagcggaatgttatgggcaaagccacgtaagttcttaacagacttcctgaaagtgctaacaggaatctccaggtacaatccctgtgatactagtttgggaaagcccagtgacccttatcagctcaagtgtccaggaaagctctaagggatctaagaggatctggagtccaaatggggcttggcagtggattgagtgaagaagagatgacacaaaggtggacacacagaattaagaaaccagcaagattaaatggaattaaaaggaatcatataaacttccatttttgagtattttcgaacaacaggctgctcgaattcaagatgggagagatttagcttggcaacaattgctttaaaatgatccagagattttagttgattataaacttaaaatgggccaagagtatgacacagttcttaaaaaagctagcacatgctgggcatggtggctcatgcctgtaatcccagcactttgggaggttgaggtgggaggactgcttgagcccaggagtttgagaccagcctaggcagtatagcaagaccaaatctctgcaaataatataaattagccgggcatggtggtgcgtgcctgtagtttcagctacccaggaagctgaggtggaggatcccttgagcctgggaggttgaggctgcagtgagctgagagctgccactgcactccagcctgggcaacagagaaaaaaaataaaaaaaggcaatctttatattaaaaaagaaaatactagcacaggattgggctatgacaatagagaagagaaagtggagacgctaaaagaatacttttttctggaagtagggacaagtaggaaaagaggcacataaaagagcaattaaagggagataagtttattagaacaaatcttaaaaatggaagagatttgaatatgtttataagctgaggggaaggatctattagagagggaaagaacacaggaaagaagggataattaatgatacaagaatctgatgaagctgggaggagttggttttgaactggaatggggatgcctcatccttggagagactggaaggaaggctaaaaggatgggagtgactgtagatatgttgatatgcttgggagggaattcaggcacttgggaagagcacaggctgatgttttccacttgtttgatgaagtaatactccagcgggacaggctctgctgtttctgacactgtgtggaaggagacagagcaaggaagaagttggaagggaggttgaaagaagagtgccagatggacctcttggtctttgtggtgggatcaggaaattggtacttttttccctcagtctctctaagagcaacactattcaaggggctcagaaccctttgagccgcactactgggttttcccacctgctcaggactgcgaggccagactctgtgtcagggccatgctcaaaaatcatagactcaaaaaaacccacaaaaaacttgaagtggaatgcttaaatttattgagaaaaaaaagtctttgagagacaagcactttgatactcttattcttgcaatccataaaacttcctgtaaaaatgaacgactttaggcggggcgcggtggctcatgcctgttatcccagcactttgggaggccaaggtgggcgaatcacgaggtcaggagatcgagaccatcctggctaacacggtgaaaccccgtctctactaaaaatacaaaaaaaattagctgggcgtggtggcgggcgcctgtagttccagttactcgggaggctgaggcaggagaatggcgtgaacccagaaggcagagcttgcaatgagcccagattgcgccactgcactccagcctgggcgccagagcaagactccgtctcaaaaaacaaaaacaaaaaacgactttggtgaaattactaagcagacagaatttacccaaagttgtaagatactgaaatgcagatacagttttttatttttatttttattttttagacagtcttgctctgtcacccaggctggagtgcagtggtgtgatctcgactcactgcaacctctgcctcctgggttcaagcgattctcctgcctcagcctcccgagtagctaggattacaggcgcacgccaccatgtctggctgatttttgtatttttagtagagacagggtttcaccatgttggccaggctggtctcgaactcctggaactcaggtgatccacccgcctctgcctccctaagtgctgggattacaagcgtgaaccaccgcacccagccatggatacagttctttatcagctaatggttaaaaattaaagcaaaaaaaaaatgcaaaataaaacactaagaatcacagacttttaagtgaccaaggctgatgagaaatcattcgccatgctacaaacacggccagaatgtccgtcgaggggcaggcattacacacaaaaaataagcttctttctgccctcaggactgtatggaggaaaaagactacgaaaatcagtatctataacagcatgagataagcaacgtgaggagaggcacaaaatgcaatgaggtgaccgaaaaaaccaagtcctctcattctgagaggaggagcccgatttccccaaggttttaaaagaaataaatagggcgagagtcaaagaatcatactcagataaccttgcaaaatgcgcccctcccgcccggcttcccgcctttggcaccgacgccctcggggcttccctcgtgccagtccgcgcgcgcacgccggggggcaaccggtccagggccgcgagacagtcaccgcgagagggcgcgagcccgaacctgtctacggaagtcccgccctcacttccggcggcggaggattgggagggactgaaggccgtttccggctctggtagtgtagggacttcggcacgtgtgtcattccccgggatttctgtagtaaccctgcttctggtgaacttgtctggccggcattcatttaaggcctaaggatgaaggcggtaagtgtcctcaaaagcccggtcgccgcggcctagggcccctycgggtgatagagtcactgcctgagttagcttttaggcaggttttcacccgtgtctagggggcggtggtttagactgggggctttccattccttacaccgagctcatccttggttacccactgtgtgcgcgcaccacttcagagtatcacgaagagacaggcacggagttttgcatgcgtgggatttcatactttgaaggaatttttcaagaccgtctttcgaactcgtttttcacaaatgagaagcagggtcctaccctcagcgagtttataatgtgagtcacggtacccatgaagggtaaagagatagaaaagcaagtgatttgtcctggttctcccagaaaataagaggtagtcctggggttcaggactaactttgggatttctgaatgagtcaccagcaagagaagtggaatccaaagatccgaattcagttttgccctccttagtttatgggtcttttggcagcttcatcagtaatgtgaggataacagcagtcagtactcaactaggctgttagaggtgatttgttggagcactttgtaagtaataaaatcgtagataaatgtaagttttattaaagacagccagcattttgctttgaatgtgttaaactacaggtgtgttaaactagccttgaatagccacttaccactactagatcagtggttcttaacctgtttggggatcgtagaaccctttgaattgctgtgrattgggattgaataactgatgctgtagcgctcttctgtaggattaaagccatcgtttggttttagcttttatatgcaagtctgtggctgtgggacattgaaattgtggaattggtctaatgaaatttgtaatcagttctctttaacctgatttaaaaaataagtttctgggtatgcagtattctttctgttattttctagagaagaaataaaaaacagatcccaagctttcgcaagttaataaaaactagtaaagtcaaacttgaaaacaagctaaaaaataagcagtttaaacaacaaagcactctcaagaagtaccgaaaagaacagaggaaactaaggcaagctgtgaaagatgctgtgtctaagaaacccattccattggagaacccaaaggaaaagcgaccaggtaattgtgaaaacatcatgtgctctggtttccattgatttattctgaagtgttcttcatggaaataactttgctttctagtaatcgcttttcttgttctcagatcttcctagagtgggtaaggatagtagtcctataggactgctataaagcatatatgctttatcacagtcagtatgagaaaacatttcaatacagtattcattcaagcttctgcttttagtttgtctggaaggcagatctgaagatgcactacttgggaaaacaaactgaaagtactccgttacataaatattgggcagtgtgccagtgctgccactttgccattcgccagcagttaggtaaggtaagaacattgcttgtctctggttcattcttcacagtattgccaaggtacacttctaaacttctgactttcttttcatgtggaaacttggggtgaaattgagttgtaattgtcatggttattttgtaaaactatctaaaaattattaagtactcaaaacttgtaaggaatatgactattttgagtcaggctagttctacaactttgctggtacttttagggtattcttatttgactatatcagattattagacaactattcagtcttctcaggtccattttttaaraattattattattattttaaatagacagggtcttgttctgtcacccaggctggagtgcagtgtgcaaaaatagcccactacagccttgacctcctgggctcaggcagtcctcctgcttcagcctccaaaagtgctggaattgcaagggtgagccacagcacccagctaaagttttttttttttctaattttgtgggtacatagtaggtgtatatatttatgggatacatgaggtactttgatacaggcatacaatgcataataatcacatcagagtaaatgtggtatccatcacctcaagcatttatctttgtgttacgaacaatccagttatacttttttagttattttaaaacataaaataaattattgttgactatagtcatcctatctrtcaaatactagatctttttctaagtgtatttttgtacccattaaccatccctactcctatctcctccaactgcctttcccagccagtggtaaccatcattctactctcttcatgagttcagttgttttaatttttagctaccacaaataagtgagaacatgtgaaatttgtctttctgtgcctagcttgtttaacttagcataatggcctttagtttcatccatgttgttgcacacaggatctcattcttttttgtggctgaataatactacattgtgtacatgtaccatattttcttttattattattattattattttttttgagatggagtctctctctgttgccaggctggagtgcagtggcacgatcccggctcactgcaacccccgactccccagttcaagtgattctcctgccttagcctcccgagtagctaggattacaggygcacaccaccacatctggctgatttttgtgtttttagtagagccggggtttcaccatgttggcygggatggtcttgatctcctgatctcgtgatctgcccgccttggcctcccaaagtgctgggattacaggcgtgagccaccgcgcctggccccgtattttctttatccattcatctgtttatgaacacttaggttgtttccaaatcttggctcttgtggatagtgctgaatgaacatgggagtgcagatatctgttcggtatactgatttcttttttttggattcatgcctggcagtgggtgggattgatggattatatagtagttccatttttagttttagttttttgaggaacttccaaacttttctccatagtggttgtgctaatttacattcccaccaagagtgtatgagagttcccttttctctacatccttgccagcattgttactgcctgtcttttggataaaagcctttttaactaggatgagatgatatctcattgtaattttgatttacatttccctgatgatcaatgatgttgagcaccttttcatatacctgtttgccatttgtatgtcttcttttgagaaatgtctattcatatcttttgcccattttttaatgggattattaaatttagaaggctcatttaaagtagataggagtgccattctgtgcagtgtgtacatttatatagcaagatttactagggtctttttttgtttttttttttgagacggagtttcacacttgttgcccaggctggagttcagtggcgatttctgctctgctcattgcaatctctgctctgctcattgcaatctctgcctacgggattcaagtgattctcctgcctcagcttcccaagtagctaggattacaggcatgtgccaccacgcctcactaattttttgtatttttcgtagagatggggtttcaccatgttggccaggctggttttgaactccttgcctcaagcaatccacccgtctcggcctcccaaagtgctaagattacaggtgtgagccaccgcgctcagccaagatttacgagttttaatgggtcaggaagaattgtaagttctactaggaaagatgctaagattgttttattcatagttgaatcctcagcacttcaaatagtgcctggcacttagttgactttttttttttttaaataaaaagaggagatggagaaagagagcaagacgcagacagtgagcagaaagagaagttagaatgatctgttgttgggattttgttagatgtgagtgcctgaagtgttgaaagaaaaatagttgaggatattggcaagagtgtggttgaagtgataatcttgcagtctaagtgagggagtgaagacagaacacacaggtagatagaaagtggagtggtcagtggattgaaaggttacataattggttaaggaagaagtgctgtggaagtaactgaatgggagctggaaggataaaagcttgtggtcagagagaggggtgagcactagggtttggaatgtggccattagagaggctggctgaaatggaatacgaagtgaaagtaattggagatgagaaggagctgaggggctaagtcattggtttccaaacgtcctgaaaggcatttcagagtatgtggagacatttagtttttggttgttacaataacctgggaatgctattggcatttagattgcaggagtcagagatgctagcatttttccagactcagaacatcccagtacgacaaagaattgtttgcctagcatatcagtagttcttccatttagaagcactgggctcagctgtgagccatggcccactccctgtaatcccagcattttgggaggctggagtgggaggattgcttcagaaagcgtaagcttttcctgtttaaacccaaaatgcagagagttctacatctctgatacttgtttctaatttttctttgtgtgtgtgtgtgtgtggtacaggtaaaaggattgagagggaagaagaggaagaagaagaagcccttcctttagatatgatggatgaagatgacttacagttaatgaaggatttaggacaaagagtatcttttctaacaagagatctttcttctaggtaatacttcatttgggttataatcattcatatccatttagtgttaaaaacttggttctgaatttcacttaggtggttcaaggtgttcacctttgagcacaatgtttacaaagaataaagtattatttagcttatttcctaaataaaggaggttcatgtataagataagctgatttcatttaatgtacatctttcttttgagtctgaatagtcaagtagagtgaatgggggaagaatgctgttctcactttgaggtagtggcagaacagttctgagttcytacggctatgatttcacttaatcctcattaccctgctggtaggtcttattcccatttccagagaggaaactgatggttccctgcagtcacaagtatctggaatttaaagttggaccttttaaactccaaagtctatgctatactctaaagattttgggaaagtaagagtcacacttggttttatgaactgttcttcataaagaatctgctgtaactttcacctttattttgcatctagagggaaaactggatgtagccaaagtttgagtttgtatggtaggttgtttacccatttcttttattcatttgctgtttgagtgcctgctatgtgccagacactagcctaagtgctactatccatatacctattgaaagttggctggtggtttttctgtacttttgaaatgataggtctctagataactttttagatctattaagactgaaaattgatctttttttcccctgcagtgagcctgttcatgcgaagaaacggaagcatgaacgcattatagataaatatgaraaaataccaagaactctgcaaactgcaccagagaaggaactgattcatttacttcctatcaaagataaaagtggtataatcccacagactagggagaagccaggtgagtctaataaactggtaatattagttgaacttttacccccttactgatatcatgtttttttttcactcaaaatttaattttactttgattttacccatatctagaaaatattcaattagtcttatagcaagcttgatgatttgggccagaattatagattatctcaggtaccaatttgtactgtgaggacaactgaagctacaaggttcaggtgattttcttttcactaaattttgttgtttctaaaattagagcatattaactgttcttgattagctttcttttttaatgtatcttcttttgtatgtgaaataaaacagaaaagttcagatatcaaagatgtgaagttacatggtttataacaaagcgcatacctataaaactactattcagacaaggaaaaaaaactactgctagcttccagaatcctcccttgtgctcacctcaatcactaattgtgctcttcccataaaagtaactgctatcctgagttttatcgtaatcacctcctagcatttctttacagtttttaccacttaagtatatatcacagttttaatacatatgttttccatatagttactgatagtaacaaagatgaagaggatcaagaagaagagagggaacttgaggaaggtaatatgtctttacagttactaaattgttaattgagaatttttttgcataatagtaaatgtgagttaattttagatgaaatctggaaggtacattttggagtactgctcatttcaaggtcactttgaacatttttccacatttgaaagcttcatcttgtggaattattaatagattctttatttttttgattatggaaaaatttacacaatcatatttgtaatatctaggcatacaagaagtgtgtcttgttaattattactgttctgaattccttttaattgtaagagaaagactacttacaaataactgttaactttttagctttaaattacaaaagcgattctgtagtatgaagtcattttggtttgtttctagcacaattatacttgcatatgtttcatataattgaatgtcagtttctattacctaggaccatttaatcaaagttgaactgaaataatgcattttattgtttgaaattatattagtttggaatttgtgacagaacaatctagttaaattttactttcgcttagcagacctcattaatagcaaaaatgaattacaggtcaactgtttaactgttttcagtcacccatcataaaaccattacagattatgctagtgttgattaaatctagttccctatgaatttcctaaggtggacatgtttttctgtagcccaaaactatgaagtattagtttgtataaagtaatatatagtgttaaaaacaaaggagaatattctgtacttaaaaaaaaactaaataggattatcctatttgttaattaatatgaattattttgggcttattatcatagaagctaagaatatgagctctaggctggttgcactggctcatgcctgtaatcccagcactttgggatgctgaggtgggaggatcacttgagcccaggagtttgagaccagtctgggccacatggtgaaaccccgtctctacaaaaaacacaaaaattagctgggtattgtggctcacctatggtctcagctactggggaggctgaggtgggaggatcaattgaacctgggaggtggaggctgtagtaagctgtgatagtgccactgtactccagcctaggtgaccaagtgagaccctgtctcaaaaaaaaaaaaaaaaagttctagaatcagactgcctgagtttgaatcctattttcctttggtttatgagcttgaatcctattttcctttggtttatgagcttagccaagttattttctcttcctttgcttcagttttcttatctataaaatgggtccaatgatagtacctgtattgttgaggagatgatgtgtagtagtaaatacaaaattcttagctgttgtcattattattattactgtaaaaatattttattaagattcttggatacttgtaagcagaggaatatgtaagggaacatctaatctgttttagagatcattgaagatcytattcaagagctgaccatagaagaacatttgattgagagaaagaagaaattacaggagaagaagatgcatattgcagccttggcatctgccatattatcagatccagaaaataatgtaggtagtattaatttctttaggctctttgtattaggtatggtgtaaatgcctaattgttaagattcccttgttacctataagcatacactaaaaggaaaagcattaactaaacatagtagctgggttagagtaagagagtagacagaatcttagcttaatgctatgtctgaacttaatttcttttgtaatcctagaaaagttacttaaactctctgaatcttattctcctcatcttcatatatgaaaatactggacatcttataactctaaaaatgtttaaatttataaaattgtattagggaggaggaacctgtttgcaaatttgcttgacatacccgtggagtttttaaaaagcgcgctacaggggaagtgtatggaattagttcaggaatatttgtaagttgaaaatattttaagtgaactagagccaaagttaaagtaaagtgttattgtgccatgtgtatagtcgttgagttagtgatggttataacacatgaactagagaaatctgaggtttaatcttggccctgataagtactatctgtgagactttgggtaagttatttatccaagactctttcatctctaaaaaaggacagtgtctttttcaaaactttgtggtgaggattatatgatgaaatatacgtgaagtcatataaaatgatactattattattgttatgctggtgtccccagcatactattataacaagtatttgtttatgaaatgatagaatagcttatttacatttatagaagcaaatttcatgtgggaatgctttggagtagtacttgtccttttctaatgaagtgaggggaagatctagagcagaattagggaagagagatttggaatatttcttatgtgtattctctcaatcattacaaaaccataggcataagagattgatctaattttacagctggaaaattgagccttaaaaaacccaagtgatttgttccagattttaacagccactggattggaacccagatcttctactcaggaacctgtgctcacagacaatagtagttcatcaaagcagtcgaaaccatcatagaaattatctttgaagctcaagttaatgtggctatattacatgtaattcctgattaattcatgtgtatgactgatatatttggttaatgtatataacattttagtatattttgaaaagcgtttttagaagaataggacacacgtactttaggaaaatccagcaaaaaagaatttcccaaaatagctaaataataaatgtaaactaattttttaaggtctgtatgtttctaactatatgacaaaaatatgattactgatatagtttggaggtgtgtcccctccaaatcttatgttgaaatgtgacctctgatgttggaagtgggcctggtgggaggtgtttagattataggggtggatccctcatgaatggcttggtgccatccttgtggtaacaagtgacttctcactctggtagttcatgtgagagctggttgtttaaaagagcttagaacctcccctatctttcctgtgacaccctggctccccctttgccttctgccttgatcgtaagtttcctgaggcctcaccaggagtagacgcaggcaccgagcttcctctacagcctgcagaactataagccaaaataaacctcttttctttataaattatccagcctcaggcatttctttctagcaatacaagaacggactaatacaattactttatgactttagtgacttatctcttggtaaagtgagcagggtctggagtttggtgtggcatgactagacttggagtcattgtgtgaattccgcttgttttgccggatgtggggctgttgtcttttgttcataattgtttcgtcatgatttctccagctttataagctatttctttaacagattaaaaaattgaaagaattacgttctatgttgatggaacaagatcctgatgtggctgttactgttcgaaagctggtaattgtttctctgatggagttatttaaagatattactccttcatataaaatccggcccctcacagaagcagaaaaatctactaaggtaatgctagattgctagatataattactatctaaaataactaaacattttggagagatagactttttttttttgaggcagagttttactctgtcgcccagactagagtgcagtggcgtgatcttggctcactgcaacctctgccttccgggttcaagtgattctcctgcctcagccccctcagtagctgggatcacaggcatgcgccaccaggcccagctaatttttgtgcttttagtagagacggggtttccccacgttggccaggctggtctcaaacacctgacctcaggtgatctacccgcctctgcctcacaaagtgctgagattacaggcatgagccaccacgcctggcctaaacgactgccgcgttttttgttttttgkttttttaaatagtactgggtgtatactagacacacatattttatactaattttgggcttttaatgttctgattttaaaaaatgattgacctttttggtcttttcagacccgaaaagaaacccagaagttaagagaatttgaagaaggcctggttagccaatacaagttttatttggaaaatctggaacaaatggttaaaggtatattaaacatatcttcaaagtttgtaacatacttagccttgatcatgaaggtgaattctgtacagtgttctgtgttgtgtagtgagaggcaggtatggtcaggaacagaatctagagtcagacttccaggggtcaaatcctggctccaccacttactacctatgtgatgggaaaattacatagtctttctgtgtctcagttttcctgtctaaaaaatggaaataattatagtacttaccttccaggattattgtaagaagtaactgagtttgtagatatgaggtgctttaaacagtgcctagcatgtactatacactatattttatcaattattagtattattgctgcagtttttagtaagtagttgtatttttgttgactacaatgcatttaacaaaatacattgttatgaacagttgggatttattctgctgttttttatttggaggcatggtagtcagggaagaaggataactagaggccaggcgtggtgggtcacacctgtaaccccagtgcttttggaggccgaggcaagaggattgctcgaagctaggagtttgagaccagcctggggaatgtagtgagactcctgtctctaaaaaaaaaaaaaaaaaattaggcatgatggcccatgcctatagagccccagctactggagatctgagctgagaggatcacttgagtccagaagtttgagcctgcggtgagctatgattatgccactgcactgtagtctgggcgatagagtgagaccctgtctcaaaagaaatgaataaataaatagaaggataactagaaatggatatttgcatgtcttgaaaatggatttatgagtcaattatttgggatgataaactcttaaactcttcagaaaaggaaggacatagaaaaaataggggtaggaatagggaagacagttgttgcctaggccaggtgttttcatttggcctaattggctcatttacccagcttatttactaagatcacccattgctgtcagctggaacaggaccactgaatcctgttggcctaataagggcataaaggtagtggagtatagtggggtgggggtgggtagtatggatattgcttctatgttctggtgttccagctggcaccctattagtgtttgttcttccagtgagagggcctgggagtttttcttttgtttttgaatttctgaactgtttggaaagctcctgggatctttgtgcaaccatctctgtctgatagaactataacatgagccacrtatgtcatttaaaaaaaatgcagacacactaaaaagcaatgaaattaattttaatagtatattatatatattcagattatcatttcaacatgtaataaattttaaaaattaatgtcttacattctcagttttttttagtactaagttcaaatctggtttgtattttatacttagagtgtattttatacttagagtatatcttaatttgtattagctgcatttcaaatgctcaattgactcctatatgtggcagttagtagcctccatattggacctttcctgagcagatcgaaccattatgaagtctttttttcttcttcttttttttttttttttttgagacgatgtcttgctctgtcgccaggctggaatgcagtggtgcagtcacagctcactgcaacctctgcctcccaggttcaagtgattcccctgcctcagcctcctgaatagctgggactacaggcgtgtgccacccaccatgcctggctaatttttttttttttatgttagtagagatggggtttcaccatgttggtcaagatggtctcaatctcctgagctcgtgatctgcccaccttggcctcccaaagtgctgggattacaggtgtgagccactgtgcccagcatatgaagtctttttttaaggggtgtgggaatgtgtgtgtgtgtgtttatgtgtgttaaaatgtacattgattgtaaaagaaagccaattagtttaacttttgaccaatgagtaaagtaactacagttatcttttgattagattggaagcagaggaagctgaagaaaagtaatgtagtttccttaaaggcatacaaaggactggcagaagtcgctgtgaagagcttgtgtgagctgttggtggcactacctcattttaactttcacaacaacatcatcgtattgattgtccctctcatgaatgacatgtcaaaattggtgagttgctgtaaatggttattgctgtcctccttagaaaattatacaccatgtgggccaggcacggtggctcacacctgtaatcccagcactttgggaggccgaggcaggcagatcacgaggtcaggagatcgagaccaccccagctaacatggtgaaaccccatctctactaaaaatacaaaaaattagcagggcgtggtggcaggcgcctgtagtcccagctacttgggaggctgaggcaggagaatggcgtgaactcaggaggcagagcttgcagtgagctgagattgcgccattgcactccagcctgggcaatagagcgagactctgtctcaaaaaaaataaataaatgaataaaaaaagaaaattatacaccatgtgattttttttccccctacaaaattcttctgaagttatttattggtaaaataatgtcaatttattaaacactgtctatctgaagaaaattatctgaacataagtttggtgtagtggttcacaacaggaagcaaatttgtcccccagggaacattaggcaatgtcggcatacatttttgattgtgatgactgtggtggcgatagagtcttaactactggcatctagtggagaaagtccatggaggcttttaaacatcctaggacagtccccctacaacaaagaattctgttacccaaaacgtcagtagtgctaaggttgagaaacactggttaagtatgacattttatttttcagatatctgaaatgtgttgtgaagctgtgaagaaactctttaagcaagataaattaggccaagcttctcttggtgtaattaaagtgatttctggttttgtgaagggcagaaattacgaagttaggccagaggtgagcctttttttttttactttgcattttgtttttaaattacaaagttgattttcagttgttatgaggaatttattccttataagtgtatgaagtaaaaagtattcaagctccttaagtgtttaacatgtcaactcctgaaatgtttgatactattaacagttyggtatttatccttctagatgtttttctttgcagatatagtcrtatatacttgcttatattttaaaatraaaaatgggcttatactttgaaaactgttctggaacagttttcattttctatattgtgaacttacatatagggttatcccattctttctaatgcctaccagagtattccattgtgtgccctaattgttgaacagctgagttttttctagatttttgctgccacagtcagtgttgagaacattttggccatattattttttcatattgtgtgaatattctgtgaattaaatttataaaatgtagatgctggatccaacagtaatcacatttacaaactcaaattgttgttcaaaaacatttaatcactgtgttcctgctaggaatatgagtgtcagttccctcctacctgctcagaatgttactatttaatctttgttagtcaggtaggtgaaaagtttatatatatatamactttttttacctgcttattatttgtcagtttttctcttaaagtaattgtcttaatgacttgtgatgagtttttagtacatattcattttaataaataactgctatgtgccaggcactttttttaggtcctgggaataaaatagtaacaaaagaaacgaaactatctgtttgtggagcttgcattacataaagaatattaactctttgttacataggttgcagattgttctcttttttactttgccttttaattctgtgttcagccttatatatgaagctatattttttgttatgcacatagtctcctcaatcccaatttacggagtctctccgagatttttaattttaatttttatatttaaatatttaaaccatttgacatctttgtatgtgtggtatgagtacagatttaatatctgtgtttaatatatgtaatgaatatatattttatatagtttaatatatattgaatatttatattatgtatatatttgawataatctgacagccagttatttcatcaccattttttttctgctgatataaaatgctgcttaattattgtgttatatctatagtatatttgggtatgtggtacaataataatcagaaagggtataattgataaaagacatgactattcttttttctccacaatattcttatttatttcagtatattactccaggcartttagaatccatttttcacttccttccctcaaaatagtccacacagagaatctgattagaatcgattcaatgtattgattagtttggatgaattaaaatatttacagaattgatttttttctattcaagaatatcatatcttgccatttatttaagacttcttttatgttcttaagtaaaattttatagttttcttcactgaggtcttagatattttaatttgtctttagtaatacagttttgggtgttaagctgttctaccattttatttctggatttcacagttttcctttggcatcagattcctttttattttcttaaatctgatttcagttgaattgctaaaattataaacattaaatgaaagtaacagagcatatttagcatctttacttagaattgtagagcaatcagataaggcttgaacatgaaactcagccataggaaaaccctttaactttcgtgatgctagagtaaaaactacatcatttgatttggagttatttttcgttggtaggtgatattttgagcacatacagtacctacaaaatattcagagttggtctttctgatacctagaatgacttcaggttcactctttatgcctttagttattccttgtttcattctgtgcttttagccgtgtaatcccaaatactcagctttcttccaaatgtgcatattggaacatcaaaataatacaaacctgtagttctcaaggttttttccaggaatgctgctgtgcctgcgggaggtcggtagggtgatttcatccagagaaagtgtagcattttaaaccccttttgttcttagtgtttgagtatgcgaagtttgctgtatcacacaaaacaccagtttccaaattagtttctgaatttttgaatggcataaagcaataatttttatttttgtccccagaccagcatcagctgggaattagaatgcaaattctggggctcaactcagacctactaaatcagaaactctggggatagggcccagcaatttgtgtatcttctcccatactggtccaaaccttttcctggcctgttttctctttgtcatcctgttggcatgtgttctctcttccttatactcattaaactgcaaagaaagttttgtatatttagttagtatttgctagcgtccgttttgtatgtttgctcccgtccttccatagacacaagttattaatatagcatacagataaaagaagttggtgtaaaatgttataaaagatgtttgaaggttttttcatgaayragggaaataacactgttaaatgcttttctatgtaaagtttttgagggcaatataaatattaagctgtatatttgtgttttttttccaatattagatgttaaaaacatttttatgcctaagaatcaaggaagtagaagtgaaaaaagatacagaagacattaataaaccaaaaaaatttatgactttcaaagaaaagagaaaatctctatcaagaatgcagagaaaggtttgacttatttccccttttgtttcatttaaattttctgtttatttgatcttagattaaacttataggcacatgtaaaaatcatagttaaatcataaacataaaagttttgaaatacatcatttagagaattttatcttttcctgttactgcaaagaaatgttttcttaaatcagttttaactgataatgattggcaaggagagcaatagatgaaaagatatttttgccatgctggcttttatcctttggctttttagatcaatttagagttatgatacacagattccttccttaacagaaaagatgcattcacgtgaagttggcagcaaagtgagtttctgttaattgaatcttgtttctttgttggtttgtattttaaacttgggttgaaatttcagccgcttgtttatttactgaaactttggaaactttatttatttatttatttattttttgataaacggggctaataatagtacctaccttgcagggtaatcgtgcaggttaaatgagatgatgcatataaaacacttggcaggctttataaaccttagttttagtaccaccaccatcatcactattattgttatcatcacatctcagaacatttctaaacagtttattagagtgatcaagttgcttgtaaaaacaaaagtaatctctggggatattcatctttgaatgggtctaattttgaaaacatgatggaagtatcaaaatagacttaataattgtgaacaaaagaagatacatattttaactatttatattatactatcctaatgcaggttggatagctctgttaggaagagcatgtgtatagatgaggtgaggaaacaaagaccaataagaacatggcagctctttaacaacttctcatgagagaaggaaacaatttttcagttccctgtgcctcaggcagcttagaaattatcatttactgctcttacagcattaggtagtagaaaaaaaaggatattttattgaatttctttatagggcccagttttatgcattgtatgtaaatgtgttggggaagtattgttggtgactggcttccaagttatagatgatttaatcctagccattatttttgggctcaacatgttctttccttttttttttcttttttgaaaaactttaataatagaaaatgatagcatatcccagatatctgctattcagaatgagcaaatattaatagatttactttagtttttttcctggaaaagaaagaaaccataggtgagagagtaggaatttcttttctctctccaatctcattcttctaccttcttcccaggagacaccatctttaatttggtttgtatatacttcccgtccatgtttctctactttgtttatatttgcattcrtagacaacatgtggtattactgtatgtgttttatgacatttacgtattctgcctctgcttttttcactctgtggtatatgctcttagatttttgtttttcaatctattttcagtggaagaaagcagaagagaaactagmgcgagagcttcgagaggcagaagcttcagagagtactgagaaaaaacttaaactggtaggcagtttcatattctgttatgcttttaaaatgcgttragttgtttaaactagaaatttattgtttcagcttgtagctgtgtaattttggtttctttcatgaggcttagatgtgtgacttttgtgatgtgcgggaaactgtgatgtgatcagtgctagttttatgcagtcacagggtgtatatcttcattctgttttgttaaaaatttcaaagattgcattgtggggagggatgggtagggaaaaaagttaacctgttgaagtgatacttatgctcactcaggagaaagcataccaggttatcctaaagtcattttgtctgtctcctctgccagcacacagagactctgaatattgtgtttgtaacctacttcagaatattgaagaaggcccagaggtcacctctcctgccagcagttctagaaggtcttgccaagtaagggctgtgtaggttgaaatcttttagattccttctaaataggaaagaccaaagaattttcgagagttccctaatgatggccyattatcctcagttctcattccttttctgattgtcaccagcctttacttgaagctattcataacagtgggcttttttgattttctcatctcaaaccttttatttttaaaatctcctttaccaactccttctttctgcctactaaattctaggtgttcctaaggttaaatctctcagttcttgactctttctgcactgtgtagtcaattgcccatcgtcatagtttgagtggatcatgcagatgactcttaagtctattttaacccggctgtacatcatttctctagttctgtgtaatgtgtttctgctaagatagatcttttggtgtattcactcaacactaatggccttgtcaggatgtgagctagagtaagggttgtggttgtcatgatagcgttccacaattttttgaggtggtatcctatagaacattgctattcggtaaaaatataatgtgaacttacatatataatttaaaattttctattagccacattaaaaagataaaaagaaacaggtgaaattaatttttatatattttactggatttgatttatctgaagtattttaacacaatattaaacattaatgagttgtttggtgttttttcataacatattttcgaacacttatattttacgcttgtgtcttaatttggactagctacattttaagtgcctaacagccacatgtggctagtggctaccattgttgggcagtacaactttaggaatagagttggaaataggactgatggctagaagatatagaaaaggcaagttctgtttatcataagaaattactttctaataactggagctatttggcaatggtatgcatttccttatatggtgatacggtccttgtggttaaaaatcttcagagaggctggtcagagaagggattattcctacattgtgtaggacttgctgtttttatttttgtttttaaatagagacaagctctcaccatattgcccaggctgatcttgaactcctgagtgagtcatcctccagccttggcctcacaaagtgctaggattacaggcgtgagccaccatgctcgacccagctatttgttttttaataactaattcctttatttaaaaaagtttaaaaaataatatatggtcatttaaaaaatttaaataatgcaaaagaatatacaatttaaaattgcaagctccccctcctatatatgtatgtagtctgtctgcgtgccatctgccacctttttttttttttttggagacactgtcttgctctgttgctcaggctgggttgcagtgacgtaatctgagctgactacaacctccacatcccaggttcaagcagtcacctgcctcagcctctcgagtagctgagactacaggcatgtgccatcacacctggctaatttctgtatttttagtaaagatggggtttcctcatgttggccaggctggtctcgaactcctgaccttaggtgatccatccgcctcggcctcccaaagtgctgggattacaggcatgagccatcgcaccgggcctgcctgccatctttcatgcaaatggaatcatgctatgtttagtgtcctgtaacttgcttttttttttttttttggttttgtaaacagttacttttggtacctctcccttatcacatatatatcacttaatttttaaaaaatttatagtgctccatttyatagatatattgtactttatttggtcagtcgcctatttgcactgggaatacttgcgcacgtgtgtgtgtgtgtgtgtgtgtgtgtgtatcttcatgcatgtgtgtgcatgtagtgccagatcaaagggtatgctcattttaaattttgataaataattgtcagattgcttctccaaaaagttgtaccgatatgcatggaatatgtcactcataaggtcttttattcttctaagatttacatagatcaaagacttcttgctaatattgaagagatgtcctgactttaacctacttcagtgtctactatagtatatggagtaactctcaaatttagcagctcatatgattcttctttaaccctattgggtggtctcagttatttctacaaatagaggcccaggacagtgaagtgagttacctaggatcacgcaggtaattaagagcagagcctgaactagatactggggtccagtattctttccattttatccttaaagctgtcataaggtccatattcttgtaagtagcagaatctttccttgtctctcttcccaccacctgttttcttagaagccgatcctgccggatacctcctaaactttcctcaggaagttgtttgcttctagtaatttctttctcagtgcagaaggatttttgaaatatttttggtttgttcagtgccttatatatttctactgagtttagtgttcaatggtgtatgaattgttgaagaggccaatctgaattaatgaaaagtatcaataattgccatgtctttcatagctaacatttcgaaataaagaatattaaaaatacagttttaaagtcaagcttaatttctaccagctttatttctgcttttagttcactgattaactgttttgtttgattccaggtttgctcaccttataaatgtggaattttttgatgatctgttagtagttcttcatactctcattgagtctggtgtaagtaataataaattattttttaaaagatataaatggtaattactattttaaaaatttttcaggtttattgagatatattttgtatacagtaaaaccccttttagatgtacagtttatgaattttgacaaaggcctatgatcatatgattaccaccacagtcaagatgtagaacgttttcaaccattggagagttttaagcaggagggttgtctgacctgttttcttttttttttttttaaattgatgcataatagatgtacatggtttcagggtatatgtgataattaaatatattcatataatatagtttgtaaatattttacttgggatatcagtcaccttaaatatgtgtctttatgtgacaaccattcaaattcttccctcctagctattttgaaatagataatagattattgtaaactatagtcaccctgtaaatctgcctcatactaggttatcttaaagataacctttataggtcttttttttcttttttgagatagggtctcactcagttgcccaggccggagtgcagtggtgcaatcacagctcactgcagccttgaccttccagggctcaggtgatcctcccactttagccttttgagtagctgggactacagatgtggggcaccatacctggctaatttttctatttttttgtagaaatkttttttttttttttttttgagagggagtcttgctctgtcacccaggctggagtgcagtggcgtgatctcggctcactgcaagctccgcctcccgggttcacaccattctcctgcctcagcctcccgagyagctgggactacaggcgcccaccaccatgcccggttaattttttgtatttttagtagagacagggtttcaccgtgttagccaggatggtcttgatctcctgacctcgtgatctgcccgcctcggcctcctgaagtgctgggattgcaggcgtgagccaccgcgcccggccctgagagatgggtttttgccatgttgcccaagctggtcttgaactcctgggctcaaatgatctgcctgcctcagcctcccaaattgctgggattacaggcttgagtctttgctcctggccttaaagttcttttttaaagctataaatggcaattaccattcttaatattccatccccctcaccccccccttttttttttaaaggacctaagctatcaagaaagtcttcactgtgtccagactgcttttcatattctttctggacaaggtatgatattttcttaatcaagttttgtttgccttacctttgaatgctataacatacctaattggtgtttrttgtcatttcaaaggtgatgttctgaatattgatccattgaaattctacacacatctctacaaaacactgttcaaattacatgcaggtatgtatgtttagataatgtttcttttatatgtatttatgttttaagaatatgttatgacccatcattgtagacaaatgagaaataggaacaggtacataaaatggtgactttccagtgccatgcatctgtatttaatcttatgtaagacttggagaaagagcttctggaattgactggagatgcagtaagtatagcccgctgtatctccttagcagtatagcactacctcattgattagagaaatggtttgggacaggtacaaaagtttatcttgggtttatctgaagttcagtccagttgcgtaatgaaaaagtaatgagaacagctctgaagaatatgtctgctgttttaggtgctaccaatgaaggtgttgagattgtactccagtgccttgatgtcatgctaactaagcgcagaaagcaagtttctcagcagcgagctcttgccttcatcaaacgcctttgtacccttgctcttcatgttcttccaaattcaagtattggcattttagcaactaccagaatattaatgcatgtaagtagtgatacaaatgaacagagctaagttcttataatgcaatgattttttttgtttgaggcatgtcttttccccccttttatattatttcaattacagaagtaattcacacttgtaacaaaatcaggtgacaaaagaggtatataaaattgaaaaaaagcattttatacctattgacacttctcagtgtcattaggtgggtatccatttaccatttggtgggtatttttccagcagccttttaaagttcatatataaacacatacacatagaaacaactcaactttgtattttaatggaaagaggattatgctatatattctaccacttttttaaccttagcatttaatcatggtaaacacattataatgtcactaytctctttatgtaaggtttatttaattctttgcttaacaaacaccatagttctgactatgtgccttccagttataaatgccttacaaaaatttaattttcataactctgaggtagctactattcttgttcctattgtacatgtgggaaaactgaggtccagagaggttaagtgtcttggcttgagtagcagtgccagtcagtggtagaagtgatattcaaatgtaggcagtctggtttttctgcttctttctatttctcttgatataggttatttctttttttgctattacaaatgatgctatagtgaatatctttatgtatttatctgatgtaattatttctatcagatttctaaaagtgtgattgcaagatgagaagcatatttttttcttttgcaagataaaattaattttcaaagcaagcaaagataaaatttttttttgcaactcttgttcttactatataaacttaaattgttttttattaaatctaggtgtaaagactttatgcaaagctcttatacaaccataaatttaaatgcaaatacaactacaaaccagtaacacctcttatattaacaatgttaatttaaccaattctttttatgtgacatttttgcagactttccccaaaacagatctactgcttgacagtgaatctcagggaagtggagttttccttcctgaactggatgagcctgagtactgcaatgctcagaacactgctctgtgggaactgcatrctctgcgggtaagagtggccctggtttttttctttttggggatgtttgtgaataattgttttccagtttttcttcaaatagttgttattgccagagtacttaattatattttgttctggggctgccttttttagaattcctgtgttagtatgctacattttactttgctgttactattctttaagctgttgaggtacattttctaaggaagcagaaaacagtgtcagttctgtagggtgcagttgtggaagatttactgaaacctttccctttattgaaatctttccctaacactcttcagaggatttgttatcaggtacatttctgttgagtcttatccaaggagactttagtaagccctgtttcaagatggtttcacctatgcagtgatcctacagtatggacagcattagagtgagacttgtagaaaatagaagtggcaggtaacctgttgtaaattaacttttttcactctgaaagaggaattgctttttgatttttctatttatattgtaaaagcaagactaaactacttcactggtaacttgatttgtgttttaatcctattagcaaagataatattctttctgtgggtatgtgcttctaatgaattacatatactgtacataggtgatgaaaaaaaatttggtgtaattttatttaagaaaatctttgctgtggctagtgttttttgtaaaggactgacctgtgcagaatgtgattgtcccgttttcccttcagaggcattatcatcccatagtgcagagatttgcagcccacctgatcgctggagcaccttctgaaggctctggagcactcaaaccagagttgagtcgaaggtaatatttagcattgccttattctaaaactacagaattgagctgatagccacttactatgagaagactgtttcataaagtaacatactacaaaatgtaaagtgccagttgggtatctggattggtcttgcttcatattcctgaattgttctgaaagaaaacatgctatgattttgttgatcacttaaaacattttttttcttcttctgtcattcaacttgaaaaacatttttttaatcgtgaaaagtttcgcacatacaggatagtagaatggcatagtgaatgtccatatgccccccatcactcaggttcaacaatgaataatctatggctataggtgcttcatgtgaagataaaacacaagtcaaccaaattaagcttccttgctttctcgctcgctcggtcttttttttttttttgaatggccctgttagggcaggatgaggagaaaaaaaaaatgaggagagggaagaaaagaggtgctttggaacactgccatccagaagggcagctttttctttttttggcccttgcagagtaccttctgacctataagcagcttggatgggtacttccagcatctacctcacacccagatggggaaaaggtcctcctaaaagagtcttcttttccctgaactgtttacttacaaaattttcacaagtacagaaaggtgaaaaatagtaattactttttttttttttttttgagatggagtctcactctgttgtccaggctggagtgcaatggcgcaatttcggctcactgcaacctccgcctcccgggttcaagcgattctcctgcctcagcttcccgagtagctgggattacaggcacccgccaccatgcccagctaatttttgtaatttttgtagagatggggtttcaccatgctggccaggctggtctcgaactcctgacctcaggtaatccacctaccttggcctcctaaagtgttgggattacaggcgtgagccactgtgcccagccagtaattacctttttttaaatacagacaggaaatacttaagttatacagagaaagagagaaaatggtataaaaaatccctcagtccatttatggtgccataaaaaatgcctaagactgggtaacttataaacaacagagggccaggctcagtggctcacgcctgtaatcccagcactttgggaggccgatgcgggtggatcacctgaggtcaggagttcaggactagcctggccaacatggtgaaaccccatctctactaaaaatacaaaaattagccaggcgtggtggtgggttcctgtagtcccagctacttgggaagctgaggcaggagaattgcttgaacccgggaggcggagattgcagtgagtcgagatctcgccattgcactccagcctgggtgacaagagcgaatccgtctgaaaaaaaaaaaacagaaatttattttctcagaattctggaggctgggaagttgaagatcaaggtgctggtaggtttggttgactgatgagggcgcctctctgcttctgagatggcatcttgttkctgcatcttctggaggggaggaaccccatgccctcacatggcagacaggacagaatgggagcagtgccacagcttcacttcatgaagcctcttctataaagactttaacccatttatgccagaggttgcaaattttttttgtgtgtgaaaaatcagaccttggcgatgaccttgagcagtaggatataaataactcctacaagcttagtgttctgataatggaacactagtaggcataaatgggttaatcccattcatggcttaatcaccttttaaagcttttgcctcttaataccatcacattgactgttaagtttccgtatctgaattttggaggggacacattgaaactatagcaccttacaatgtactcattacccagaattaatattttgctgtaggttttttccgtttgcaagcccattggtttctgtaattcagagatcatagtttggtgacctgtgggccaggccgatttttctggcctcaagagtttgaaaaaaattgaattagttgctgtcttttaaatattgaaagaattcatcygaaattcacatttcccgcttttcttgaaatactgggaggtttggtgacattggcttgtattttacatgacagtagtcagtcagttgctgcctcctctacatgaggcaagagctctgcagttttccatgagccctttccttctgagtaggatggagataacttttggccttattaaataaaatggccatttactttttcttccctcacacttctcacctgtccccagtcttcaccccaccagcctttttttttaaaaggaaaaaaggagaaaacaattctttgtcactcttcataatgattattttatggcatgttttccttagcagttttgctaaggaaagatgtttcctttgtggagaaggatgaggaatgagcttatcccaaaggcttaagaaaggagactcatagtgggcttctggagagtgggtattgggatgtgagcctaattgctaccttcgtaggcccttgcctatgtgttttggcgagtgtgaactaattccaaatcattaaggattcatttacacgccatgggtatagacatgtattctgtcctgaatggcctttccttgtttttcatccaggccagtagctgaagagttgagctgtgttctaagtctgtggagaatgactccatgcttcagtcctctggctcccatgactaagatatacttagttgcattatcagtgggttgggatttgatcacactgaactggagttcttcagcttagctttctctctggagtctatgcctgtattgctaaatgtataccaaacctctctgaggtggatttagttggataatgttgacattacaatgggaatttagaatttgttaagtgactggattggttggttagtttcaaatcttataccttaatatatgggttaagaatgaatcattctctgagtataatctaattatttttgagttacacagatgtggtggtatctttacattttttgtgtttgtgatttagatctgctactgaactttttgaggcatatagcatggcagaaatgacattcaatcctcctgttgaatcttcaaaccccaaaataaaggtatgggatatttttcatttttttaaaggaagaaatagaaaccaatgtatctcaataactctaactccagtttgcttaattattttataggtagttttttttttaatgtttaggatttcatcataggatggatttctgaggttgaaattctatagagatgatcatgaaactgttcgttcaatataggatatgtccaagaccttaccaagcatctgtcattgtgttgcatgtgttggtgtcagctgttgccattttcaacttggttcacaggttggckttagcttatagcataagtaacttctaactcatactttaaatattttcctagggtaaatttttacaaggggattcatttttgaatgaagatttaaatcagctaatcaaaagatactccagtgaagttgctactgaatcgcctctggatttcacgaaatatttgaaaacatcactacactagtagaggaatgaagtcagtggactttcttgtatatttgtgtgtgcagatgtacataaagatgagttgttaacttaggatcttttctttttatacaaggaaagcttcctaagaatgtctaggaagaagaggaagaatgaccctttgcatggcacagggttctgcccctattctgaatatgtcattccatcaaggagatcaaaagcctttttttctccccagtatttggaaattactttcttgatgatgctgccttttaaaagcttcacgtacattatagttttttaaaaaaatctttggactgsatcttactgaagtgcagttgctatattaaaattagggcatagagcacagaaaaatcaagaccatgagaagacattttaccatttagctactttttataactaaatactctttaaatatttttatttcaatactgtggatggaaatgagaagcattctaaatttgagttaatatatttttatgaagatatttgagaaaagaaaaaaatagcttgtattcaggttcattggcttttgctggatgatccacctaaagaarttacctaatttggccttttaaaaaaggtgttagtgtttattatagctactttcaaggaaagtttgaatatgattctagtctctaaagttcttcacgtwttctgacattccctggagggtgactggggaagaattgctccagggtagaagaaccaggcccaagactttaccattctgatctagagacaaaggatactcaatgaggagcttttttcccctcttggaacaggtaaaatgctttttcttattaatataattataaaacagtattttatgtaacagctattcccatattctaggagtggcctaagaaatgcgtgtttcagtgactagattataaatattctctattgtgaatagttgaataaaacagctgtttttttctgcttcctattcttgtgatatgataattttttgaaaaaagcacagcagtccaactaaagagatctcttactgtttgaaagtcatagcagccagttattttactctggagcttagagttcttttttcacatgaagtaaacgaaagtagaaaattcctttaccattccagcagagtgagaggatatgagcttaacagtgtatgtcagtcttttagcatattatatatgatttttaaaagtggttctgaggtcacattttttaaggcttgattatttaatgagaaaggtatgattcagcatatgaatatttgcttttagtccaccttttaggtataaaacaaagtccaggaawgtgataaatatttgtgtggataaccaaagggtctaatccccatcagagcacaagtgaccaatacatgtcacaaattatttattttccacacatatacaaatacatttatactttactttggcagcagaaactatacttctggtgaaaaatcagcttaaaatagaaactcatcagctatttcacagctgtattatgcctttaattttcttgttatacatatggagaatcacagtgggactacaaaattatacatctatatttgagtatcctatgtgaatttgaggaaatatatttgtgcattaacttacatacgcttatatgtaagcttatgtttaaacacacacacacacacacacacacacacacacacacacacaggcacacacatatcctgaggctatattaagctacagccttaatttgttttttaactagacaaataatgagcacctactgtgtgtttagcactatgctggcacttaagagtggggtgggaaataatgggtgtaagacaacctcagtcttccatgctgagtcaaatcatccacataacgcttttgaaaaatgcgacagtacccaattcagtgttagaattacttgtgtcaaaagtttagagacctatgtcatctgcaatagggaaggtttcagagatctgtttggtgacaggcttgtgcatagtatgttttgaatctaagagatgtataagagtaggtaggccaggtgtggtggctcacgcctgtaatcccagcactttgggaggctgaggcgggtggatcacgaggtcaggagttcgagaccagccttaccaacatagtgaaacccccgtctctactgaaaataaaaaaaattagacggacatggcgcacacctgtagtcccagctacttgggaggctgaggcaggagaatcacttgaacctgggaggtggaggttgtggtgagtcgagatcgtaccactgcactccaggctgggcaacagagtgagactttgcctcaaaaaaaaaaaaaaaaaaaagaataacttggtaatcatagagactcagtatgtgtttcaaagggactcatttcaggtattcctatgtcagaatccatagccatcagccaaggattgcttttaggaagctgctacataaggatggcagagaacacataaattattaacaatggatcatggggaatattgacccaagtctagactctgtataagagacaatctcccttttctctctaacttttttggggtcccaggtatatcttttctggcctcactgctgatatataagcaactgaaaaggggtcagagactttcaccatgagagcactttccctgcaggctgccaatgtaagatcaaagacaccagccaggaaaatcctactcttctttactagcatgggagcatagatgtggagttttgtgttttagagttaattcaattttattgggccagtaagcaagccctgataactttccagaattaagcaaggcctgtgggtctctgggcagaggacagaagtctatagagatattggaagaggagagaagaaaggaaggggacgatgtagttagcaaaaggtaaattgatacatatcatagagggcccactttcattaatgagcttccagtgtctccagaggtattgagatgggaggcataaaagcctcccataaaagaaagcaagtttgattaaaaacaagtcacttgtaactcaacttttgttgagtctagacttcatattgactcccaactggagaatttgtaaataacttttacttgctaatgatgacatgaaaagaagctttacccctcaaagggcactttctacccagataggatcattcctacagatttggcatcactgaatagagtgacagaattcatgctcctttctcttcactttcagtgatgcttcttaaaattttgtaatgaccccaacttgcatatttagattcttgtccacatcaactttaatgagaagagtttgctacccagatttctggtggcctaaaaagtgtgaaatggtaatgggtatagtcatagtggctatttaggataatttctttcacttggcataatatagctgtttaattcagaaagctttaaataaaacttaaatattttcagccaacatcagattgtgctggccatttgtgtataatagtagactagactctttactttttttttttttttttgagatggagtctcactcttgtacccaggctggagtgcagtggcacagtctccactcactgcaacctctgcgtcttgagttcaggcaattctctcctgcctcagcctccccaatagctgggatttacaggtgcccaccaccactaatttttgtatttttagtacccagctaatttttgtatttttagtagagacgggtttcaccatgttggcctcgaactccagacctcaggtgatccacccacctcagcctcccagagtgttgggattacaggcatgagccactgtgcccagccaactctttacattttgaaacaatgtgttctttctgtaatcccaaagactcaaatacaatgaagtatgtactttcacctcaaaatgtgataaacaactaaattgggatgcaacctaggcagtaggctggattctctcacttgctaaacaacctggtctcaacttcagtctcagatttatgttgtaaaacatacacctgtgttaaaggtcatggaggaggagtggggcagcgcttagcatcagaatcaaatgtgataaacctaaagagacgagtcttttcatcttgttactctgcacagttttcatttggcctctagccacttagaccagcaactcagttttcaacacgtggtagggcaaactgtttggcatgttcacttatagaggcttgataaagtgtttccggaatatttttaaaatggagcagcattgtgcatttgttagaatgaatatttgacttaaaactgtactactgtatagattacatcaaactggaatagcctgaattctgttgacaagaaaatggtagttctagccttaaggctttgacccagtaagaactttcaatgacatgaaagctgtatggtgtttttttttttttttttttttttttttttttttttgagacggagtctcgctctgtcaccaggctggagcgtggtggtgcgatcttggctcactgcagcctccacctcccaggttcaagtgattctcctgcctcagcctcccgagtagctgggattacaggcacgtgccaccacgcccagctaatttttgtacttttagtagagattgggtttcaccatgttggccaggatggcctcattctctgtcctgatccgcccatcttggcctcccaaagtgctggagttacaggcgtgagccactctgcccagcctgtgtggtgtatttttaacacttctgtttttagaatatgcaagaaacacatggggatggttttatttttataattggttaaaaaagtttctcaaagtgaagtttaggagtgagttttagtgttttgtaatttgaagaaaagtgtcttaaaattcaaagataccaatggaaagataaaagtttgggttttagaggaatacatatttcatttttaaaattcataatttgcttcatactaagaatatgaagaatcctttacacttaatggttttgtacagcaaagtttaaaaataatttacattaaatggcaagtatgacttggatcaatagctcttcagttaatgagaaatgaagcaattttacttgaaagtctagcccatttcagatgttcagagcatatattttctttttagaagtttgtcttcaagtactgagaactaatgcttctaatccatggcaatatcaagagagcgatgtataataaatatataagtatagtgtcagtacaaaccttgcaaaataaatttaaacgccaactcaatctacttttgctttaaaaaattgttaggtttcttgttaagacattgcaattcagtagatattaaattatacgtcattctaaattcattttgaaaaccaaaaatgagtaatctaatctatgattaagcaataaccttttttaaagcaaccctattaactgaataggcaataaccttaaaaaaaacccaatattatttctatatgtaaaaaaatcctaaagaggagtgcactgtggtacacaatacaggaactaaattgaattttaatgactcttatgttataggacatatttacacttgaaatgccccaaagcttctaattctaagcttctaattctcggccataaaatgtatggctaaacttcctttcctgttttcagatctttgtgctccttgttcccagttctcttctcttagttgtgttggcaaattaaggtccttgggccaaatctagcctgccacctgtttttgtatggcccctgaattaagaatagtttttaagtttttaaatggttgaaaaaaagtcaaaacaagagtatttgtgacatgtgaaaaatatatgaaattccaatttcagtgtccataaataaagttttattggaatacagccacgttcgttcatgtatgtgttgtctatggctgcttttgcactacaatggcagaattgggtggttgcaacatattttatggcccccagccctaaaatatttactgtttggccctttacagacaagcttgctgacccttgctctaagtcaattcgtgacgatttttccaactgctgacatttataaaatggcagtcccctgggcttcattcatcagtaaattggttggtggcaactagccctgtgccattttgcttctcctcagcatggatctcacatgtgtgaaggcttcagttcagaaatcatcaatttccagtttaagtctgatgaaaataattatattttttccaccatgttcactctttaacttcttgcttaaagatcttcacctgtaatgttgtatacagaggcttattagtatactgaaaatgaagaaacagaaacacttgcggtataccaagggttcagagttttccagccacagctctagtggctaggtttggggaagagactgtttcctctgtactcacaatgttagaacatgatgtttctaggaagtagaacattaggttatttctgccttggaaataaatatttcacattctttagaaagtttgtttttttaaaaaagatcacatcaaataaactgttcaactttaagaaaaggtggaattccttcagctaactactacttcagatagatgaatatgttctttaaaaatctgtagattattgaaactttaaaagggatcattttagaacaaatatgaaatatgttacctaaaaagtggaaacaatactaaactaactttctttttgctctctctccctcttgtctggctggactgctgcctccaaagttcaagcaattctcctgcctcagcctcctgagtagctgggactacaggaatttttatattttttggtagagatggggtttcaccatgttggccaggctggtctcgaactcctgacctcaagtgatccacacacctcggcctcccacagtgctgggattacaggcatgagccactgtgcctggtcctaaactctaaacttcttttcttatgagctcttcttttcttttacaagtgctctttcttgaaaagaccattgtaaaggaggtcataacatgggatgtcaattcacatagatgcaccaatgactataagagaagcctccctagcttttgttttgagacggagtctcgctctgtcgctaggctggagtgcagtggcgcaatctcggctcactgcaacctccgtctcccgggttcaagcgattctcctgcctcagcctcccgagtagctgggactacctgcgcacaccaccacgcccagctaactgttgttgtatttttagtagagacggggtttcaccatgttggccaggatggtctcaatctcttgacctcgtgatctgcccgccttggcctcccaaagtgctgggattacaggcgtgagccactgtgcctggccaggcctccccagctttaag

SEQ ID NO: 98096 - DNA, 62966 bp, Homo sapiens
  misc_feature (1)...(62966): n = A,T,C or G
atgtggttgatagaatttgctgacagatgagacttgggatgtaagaaacagagaggagtcagaggtgagttggaggttgttgccctgagtaactagaaagatggaattgccatttattgatataggagtaggttttggaggagaagatcaagatcaatttggggcttgttcagtttgtgatgtgtgttagacatctaactgaaggtatcaaattggcaattaaatatacaagtctagaatgaggggagagttctgggctggagatagaaattttggaattcactggcataggtgttgtatgtaaagccacaggaatggctgagatcgccaagggaagtgcatgtggacagaggggactgagctcctaacatttggtggttggtagaactggcaaaggagaccagaaaagggctcactgtatgccaggtactggtttcagcactttgatgtttataagctcttttaatcctcactttaactctgggacataactattactatgtcaggggaccttaagtacctcacgtagctctcacagtaggtgacagagccaagtcaagcacaggccatgtgtcctacagcctgccataaccaccaggctatccttccccccagcgactataccaaatgtttatacttttacttatttaacaggatgggtttctagtgcagagtgacttaaacaggatctgtgtgcattaactttactctgaatctcaatttccacattagtaacatgccagcctgcctctttcataggactgtgttaaaactaacaatggtagtggaattgtaaacctcgaagtgcagtatctacattacactgtgtcacaagatctctggggatggaggaggcccttgaaaacccccgaattgaatatcatccccttcctgatgcatgtcacgataacatccctatcataccttgtactgcctctctgcttgggccctttctctttctacagttctgtttgtaaggaacatctttaagccaaaagacccttctaatttctactgatcccatataactcccccctccctgagatgctgaggataagtctatacatgaataacatgcttataggcccttggatttctccaggcacccctctgattgtcattttctacttgaacccagacatatttttccaaagcacttggaatccgttagtcaccggcaagaaaaatggaaagtattctttttctttaaaattttattttattttaagttctgggatacatgtacagaatgttcaggtttgttacataggtaaacgtgtgccatggtggtttgctgcatctatcaacccatcacctaggtattaagccccacatgcattagctatttatcctgatgctctctctcccaaaatagaaaccattctggatagaacagaatggctgaatacagggagccagttacacaggtgatgaaagaagctgagacaataaccctgaggcaaccaagagtatcaacagcaggaagtcaccattccagccaatggaagggtaacaggggtgtttatttatttttatgtatcttttctgagatgaagttttgctcttgttgcccaggctggggtgcagtggcacaatctcagctcactgcaacctccacctcccaggttcaagtgattctcctgcctcagcctcccgagtagctgggattacaggtgtgcgccaccacgcccggctaattctttgtatttttagtagagacagggtttctccatgttggtcaggctggcttcaaactcccgacctcaggtgatccacccgcttcagcctcccaaagtgctgggattacaggcgtgagccaccacgccaggcaacagtggtgtttattagagtctaagggcctgagtcacctggctgaagctaggaccacaaaaagcctttgtatcaggggctggagccatggaagggaaactgtgagaggcagagaacagggaaaaaaaagccctggcttctcccttgccctgactcctgaaaatgcctcctgctaaggtatacatgtaaatgattgccagccattattctagaggtcacaagacattgcaacttccccaattactcctgcagataacgtcactatcgtagaacctcagcttggctttttgaaatgtcttttcgggttttttgcatgtccgacactgatggctccacctggacccaccaatcactcctgtggcccccacccagcagtgactaagtgcactggaggaccatttcccacacccctgtgattgcaaccccaaccaatcaatagcaagcacccacccctatcctatcccacaaactacctttgaaaacccctggcccccaaatgcttggggagattgatttgtgtaataactctgtctccctgtggcctcagtcagttaaactctttctttactgcaatgccatggtctcagtgaattgatattgtctatacagcaggcaggaagaacccatcaggtggttacactacatgcccctagtggtcctctccactgacactgccttctgcttggcttcagcctagggcctgtgtactgtacctgtgccttctgcctgtacccgcacagaccatcatgtgctagtcccttcttgtcatttaggtctcaactcaaaagtaactgccatcaggaggcctctcttgacatcccccagatatattagcatcctaccaccctggcccatgtcttccacctttttataaggacgagtcatattggactgagagatcaccttactccaatatgacctcatcctagttacatctgcaatgaccctatttccatctaaggtcacattctgaggtactgaggtctaggtcctcaacatattttgggggaacacaagtcaattatagcaggaatctttagggtatagatgataattcaagccatgaggctagaggtgaccacttcactagcccctacggagtgaatagaaaggaggtggaaaatctagctttggggctgggcgtggtggttctcgcctataattcccccagcactttgggaggctgaggtagacagatcacttgaggtcaggagattgagaccagcctggccaacatgacgaaaccccgtctctactaaaaatatgaaaattttagccaggcatggtggcaggcacctgtaatcccagctatttggaaggctgaggcaggagaatcacttgagcccgggaggcagaggttacagtgaaccaagattgccgcactgcactccaccctgggtgacagagcgagactccatctaaaaaaaaccaaaacaacaacaacaaacctagctttgggaaagtccgccctgtagagctgagatgaggagaagtcagcagagaggctgagaaagagcagtaactgtaactgtaataggcctgttgcctgatgtgtgcagcaagtcaatatgccaagacggagttgcagtagaaaaagaggcttaccaatagggcctccaatcgaggagatggaggggaacctcaaaccctctctcaaggagtttgcggcttttctaagggtttttaaggagtaggctgaagtgtggagactgctgattggccaaagggaacagggtgaaatcattggacagagagagaagcagctgtattctcatgctgattccattcctctgttggtgtcttcaaacttgttggtgtcagctgtttcactggaatttgtgatctgaaaaacattttaagcaatttttttttttgagacagaattttgctattgtcgcccaggctggagtgcaatggtgtgatcttggctcactgcaacctctgcctcccgggttcaagcgattctcctgcctcagcctcctgagtagggaggctagggaggctgggattataggtgcccgccaccatgcctggttaatttttgtatttttagtaaagatgaagttttaccatgttggccaggctggtctcgaactcctgacctcaggcaatccgcccgcctcggcctcctaaagagttgggattacaggcgtgagccactgggcctggccttaaacaattcttaagcaaaagccttatgattccaatgtcagaaatcctacctgtaggagcagtggagatgcaaatggtcagtatctagtgctacatgacttttggctacaaggaagtgggtcaaattacagcctgattaatgcttaattataactctatttctgtgcagaattcgtgttaaccctgtgaggatggcttcaaagtgaggtaggagcaagccgggagtgtgtggtgtcctggaagccagggaggaacgcgtatcaaggaggagggaggatcagccaagtccactgtggctgataaatcaagaaagaggaggatgggaaaatggccatctgatgtgacaacactgaggtcacttgtgaccttgacaagcactgttccagtggagtggaggggagtaaagcctgactggtgtgtgctcatgaaggaatgggagagaggacttgggggctgcaaggacagaacattatttacatgtttatgatctgtctctccacagttgcatgaaagagccacgaaagccaggacccaagggtatcttatccatttctgtatcccagtgcccagcacattgtatttgttaagccatattttatattttattagccagtatctccttcaaatgtgggagcccataattttccagtttggtcacaccaacaaagactagagaggaatgacagggttggaatagaattctctggttccttccagctctaatattctatgatggtgtgaacttgttctatcaagtaccattgtattaacacagtaaggaatttaattagtggtctgctattgttaatttgttttggtaagcaactgttaaatgaaatggctggaatcagtgttccattcataaatttaacaaacatttgtcgagtgcctacaatgtgttaggcactatatatattgtcccatataacagatttaagagcagagggcctaggataggggtgagtggtcaggagaggtgatggggacctcccattgctaatgctccaggaggtccagggttctttgatgtggctggcactattctgcttatcactgaggagagaagaggctcccagtggcctgagtggaggggttaccaagctgcagctgcaagggacacagagcagcattcaccaaggcacaacaagcagcctctatctgcttcaccactgaggagccgagggccctcacacaacagctgtttcaggcagtgggaggagaggaagatgtggtcttcaggtccaccctgccacagggccaacaccagatttgacgccacatctagcgcttgaggcttcttctgtggctgaacagcggctttaggctttctctgcacgatccttcctttctgctttcatgggccttgtcaggcagggcagggtttagcagttgcattctaaggcgaggagaggagggctcagagcattgcaagacctaaaggggagggtcagagccaggacaagaacctaggggtactcctgcccctggaataatggagagaacatgggctccgcagtctacccctggatgaaataatcttcatttgattaccgctccacccgcatcctttctgaaacaaagtacctcagtttcctcatttgtaaattagggagaaaaatgtccttcttacagggttccttgcagaatcaacggcataatgtgagtgagagcgctttgtaactaacatacaaagtgctctccagacatttattaccgttttaaaccgccaggccaagcttcctcttgcaattatagattaggggctcctactcatctgactttgttccactttccactcctcttctccgtccctccccctccaacaaagagaggaagtgagagacgcagaggcacgcgtctaaggaccagcttagctggcccagggtcacatgcaggcctccgccacaggggtgagagctggtgtgaggggcgcccccgcccagaactacatttcccatcaacactttcgcgactcctgggcggcagcggccaggcgcatgcgccgagtatcgccacgcctggtctctgggacgcccctccggaccsgtttcgcctcgcggakccggtaggtccaggtgcagcggccgcagtgctgcgtccgtgcgccgcgggctggggcggtctcaggtgtgccgaagctctggtcagtgccatgatccggcaggagcgctccacatcctaccaggaggtacgaggttgtgagagacggaagggaagtttgaggcggaggagcagggtcccgggggcctgggcggatgcggggcggggggtgtcggggctgcgcggcagagggctcttccgagggaccgacgggtgcgtcaggggagggctcccggggtgcagaggagcggcccaggggcaggaaggaagcggggcagcggagcgggcgcccagcgttctccgtatgctgcgggttgcatggccgaggtccggagtagggtccccggcgccgcgacccgtaaccagcaggtgaatgattgaagctacctgaggcccagccttccgcgctccccgccggagcggcagcccaatggcccagaggaacccggcgttctttgcaacaagtggagcgcccgcgccctcctcccggcgagatctgatgcgcggtcggcatcgtcggcatcctccccctccaagcccaaggcctcgctgtccccgcggctggtgacaggattgattacctgttttttggtgaccacctaactttgaaaaagtgccttcatggactctgctagttctcgctcctcttcgtctctccctccagtctcacctcctcccacgactttatcactttccagttctttgtctcttctctgtcctgcgctgcaggctgtgcgtccagcgcttccttcaagcaagccctgcctcctcacttctccagctgtattagtgaaactgctctcctcctccgcctccacttctcggcccccaaaccttggtcatctttggcaaccgtcctcttctgtgcccctccatcgtgccgcctcattggccaaagtcaggcagttccaggtcggtcctcctccagtttgtgtccctgtgtttgctgtaacctctgagtgcgatactgtgttaccatcgctccctttagtctcttatactctccagatttgccttgaggccctgccttcacctcggagcattccttttttctcagacctgacgctgcccttcgtctgcccagaacagtccagacttctcagcaggctcccaaagctctgaacagcacagcagccatgtctcccattacctttgccacctcctaacccacctagggtctggcacagtggaaactcagttttaaaatgtgctcctgcctctgtgcgtgtgctcactccattccttcatcaacgctccgccaagctccattgggtaaaatgcccccagaagtcaagggctacctcaagttccatgtrttccataggggtccgctttccagacccgtctgcatttctgtctgtccttctcataatgaacttgctgccttctgtcttagtcaatagttactgctgtacrtatctccctttgtaaaagactgattcacagaagggctttgtggactatataaagcaggtggcttagccctacagtggagggagaagccaacttgaaggcagatgagatttgcctaaggcttgccattttttagtgtaggatcttggctggaatctggccttggacagatttctatatttctcctcccatcccctttattccatctgtttcctttgtctgaaaggagtctgagggattttaaccagtgctgtggattccatgacccctagattctgyaccctaaacagtgggggaatcctggggaatgagatgtgtctgaaagtttttaggtttatagggtgtggagcacagtggataaaagtcagaaagcccacgttcgtgcckggctgtgcctcttgctgtttgtgtgacttttattgagtcacataactttctgagcctcagtttctttgtctgaaagatgaagataataaaagtccctacctcccagggttgtttggggattagataagttggtgtggaaagcgcttggctcagtgtctggcaaatggtgaccccacagtgaatgatagctcttgttaacggtgtgggcagctcctgcgtccaggatgctttggggtcctggcttagcaggaacatgtgcctcaccatccacacatagccagcctagcagggcttataaaatgtttattaaaatataggcacttaccccgcttggagggccaaggcccagggtagactcagtttctctttggaggcatctccaaagtgggaggcactggaagggtgccctccccttgccttcttcagaggcctgttctggagtccctgtctctcacttcctcagagaatggggccacccagaaaatggccggcgtctttcttcctgaaccattctgtgagtgtacctagctctgagtaggtttatttgctgaggggggatttttccttggggagggtgggatatactgagaatttggccaggggcaggcaaggaggcaggctcattatggctgtgggtagtcaggaagggaacctggtgggagggtgttagcacctgggtcagggtgaacctgagtgaggcttgaatcagggaactttgagatttcccaggactaacatcctcctctccctttggccagtgagacctctttatctgtgctcctgctagtggcttatatctcttggtgccttcaccagcctccctgccctttcccactggttgcttttcttttctttcttttttttttttgagactgagtttcactcttgtcactcagactggagtgcaatggtgcgatctcggctcactacaacctccgcctcccgggttcaagagattctcctgcttcaacctcccaagtagctgggactacaggtgtgcgctattatgcccggctaatttttgtatttttagtagagatggggtttcaccatgttgaccaggcaggtctcgaactcctgacctcaggcgatccgcccacctcggcctcccaaagtgctggaattacaggcatgagccaccgtgtcaggccccgcacctggccttttcttttgtgcttcgagggctttaaactggagattttgcctgattctaaggggcaggagtggagtcgtggagagggagatagaagaatagattcrtaagagatgtttttcacttgtctcttggaggtgagtttttaatgaaaatgtctagaaaccttaaaaccttaaacactgatgctgtgaacctgacaaagtgcttgggaaagctgtcccctctccctcccaattcagggatggcttctcttctaagctctggtcttgagctctcttgccctcctccttaatcctacagagacttgttgattatcatggtatcctttccgtccttcttcccttctcagtggtataattttccccatttgacaggtgagaccactggtgaagtgaggttgaggttgctggctaccaggctgctgattataatcagcacctatccctgtggtggactgcctgcccttcctgctgtgttctgccatttgcagcccaagtcagtggacttcagccagagtgccagagagagctctgacaccaccttcactgttccctcttttctctcagcagactctaagccgtatttcctcttcctttgggaagtggttaagactatgggctttggaactagaccaacttggattttactcctgccatatctttccctggctttatggccatggaaaatattgtgggttgaattgtgtttccttaaaaaagatatgttgaagtcctaaccccaggtacctcagattgtgaccttgtttggaaatggggtcattgcaggtgtaattagtgaagatgaggtcatacaggagtagggtgggcccctaatccaacatggctggtgtccttcaagacgatgaccatgtgaagacacagagagagcacaccttgtaaagatggcagcggagagtggagattggatgcctctacgagccaacgaactccaaggattgctggctgtcaccagaagccaggagagaggcatggaacagatttcctcaccactcrtagaagaaggagccaaccctgccaacacctcaatttcagacttctagcctccagaactgtgagagaagacatttccgttgttttaagctgttcggtttgtggtacttgctacagtagtcctaggaacacagagagcagaaagtttattgagctttctgagcttcggtgtcctcatctgtaaaattgctgtaacacactctatgtcatgtggtttttggtgacaattaagtgacaagcagcttctgctttcttattctagtgtagaaaagcaaggctgacatagctgacttgtctttgctctctttgcttctccctttagctgagtgaggagttggtccaggtggttgagaactcagagctggcagacgagcaggacaaggagacggtcagagtccaaggtccgggtatcttaccaggtgagtgcgtttggtgctttgctgtgctgttgctgcagctggacaccccagtctaggcgccttgccaactgtgggagaggaggagcccccttccctgcaccctggtgtcaggtctcaagtattgccctagttttaaagccatacatatttaaccagccttggaacagaggatatgtctaggctggtatctgctcttaactccaatttgagccacttcctgaggtcaggtcattgcatacaatggcaaatgctttggatctctgctcttctgttcctctttccctggaaactgctagcaggtgagcctctaatatccgggtcaaagaagatctaataggccccctctttcagatactaggcctgtccagtaatgctgctcagttgggtaagcagggtcccatcagtcagttggcatcttatggagccctacggcaatgtttgacactgctgactacttcttccgcccggatacacgctgctcccttagcttctgtgatgcagcatttctcaggccactccttccaggctccattgcggtcactctccagctcttgggcatgaaatgttggttgcaggcccctttctctcactctcatagacagttctacccaggcctgctcccttgcttcagccactgcttgctcacacgtgactcccatgtttacatctctagcccagaggttacctacaaaccgcaaatttatatatcctgtatttccaactgcccatgtcatagttctgcttggatctcccaaagcttccctcaactccacatgtccaaaattgacctcatgatcatctcagtcccagcttggtcctctcccagtatttcctgtttgcaggaatggtactaccacttaacgcagttgaacttcagagtagttctccatyccttccttcctctcatcccctttttctctggccctcagccatgctgatctttttttattttaggcctcattccctctcaccacagggcctttttgttgttttatttctctgcctggaattcactttccttcttcacatagttaatgcctaatcattcttcagctttcagctcactcatttttttccacagagccttctctaaccttctggccagattacctcccaccctccagcaccgtctcatagtccacgcgcctctcctttccggctattgctgttggaatggtgcgtttgtttgtctgactaatgtctgtctgttctactacagcagtccccaactttttggcaccagggaccggtttgtggaagacaatttttccacagatggaggttgggggatggtttcaagatgaaactgttccacctcagattatcagacatagttagattttcataaggagcacacaacctagatcccttgtatgtgcagcttacaataggatttgcactcctatgagaatctaatgctgcagctgatctgacaggaggtggagctcaggtggtaatgctcactcactgctcacctcctactgtattggcccagttcctaacaggccatggacccgtattggtctgtggcctgggggttggggacccctgttctactagaatgaaactccctgagggcagagaccagtctgttttgctcaccagcctagccttgaccacgccataaagatttgttgagtgaatgaatgaagccccagcctgacttcaacttcttggatggatcccatctgtttgtgggagaggggaacaagacaggaactaatgtggttctgcctgctccttacagaagactgcatggaagggaccgggcacggtggctcatgcctgtaatgccagcactttgggaggctgaggcaggtggatcacctgaggtcaggagttcaagaccagcctggccaacatggtgaaaccctgtctctactaaaaaatacaaaaattagccaggtgtggtggcacatgcctgtaatctcagctacttgggaggctgaggcaggagaatcgcttgaacccaggaggcggaggttacagtgagacgagatcatgccactgcactctagcctgggtgacaagagtgagactctgcctcaaaaaaaaaaataaaataaagtaaaaaaagactgcctggaaggaaggaggctggaagggcagctaacatttcctgactgcttctcctgtgccaggatctgtcgtaccccatttgccccatttaattctcacatcaaccctgtgaagtggttatcccccttttacagatgaggcccccaacctcagggaggttgagtaaagcatggggaggtcatatagctggtaaacacagactgagtcaaactctgcccaaccctaaactctctctactacaccagtggtgttttctttttttttttttttttgagatggagtctcactctgtcacccaggctggagtgcagtggcacagtctcggctcattgcaacctctgcctcccaggttcaagtgattctcctgcctcagcctcccaagtagctgggactataggcgtgtgccaccacacccagctacttttttatttttagtagagatggggtttcaccatgttggccaggctggtctcaaacccatgacctcaggtgatccgcccacttcagcctcccaaagtgctgggattacaggcgtgggccaccgcacctggcctacatcagtggtttataaaaactattttaagtggtggtaatcccaacactttgggaggccaagatgggaggatctcttgaggccaggagtttgagaccagccttagcaataaaatgagatcctgcctctaccaaacagacaaaaaccaaaaacactcacacaaaacaataagcattcttttattaaagcccaatatgtaaaagatagtagcayggctaatcctccctctgacatgaggcattgcctctaaagccctaaggctcccgggagaacaacttgaaagacctgtatattagttttctattgtttctataacaaattaccaaaaacttagtggcctaaaaaaacacaaatttattatcttatagttctggaggtcaggagtccaaaatggatctcactgggctaaaattaagctgtcagcaggcctgaattcctttctaggggcttgaggagagaacttggtctttgccttttctagcttctggaggcctcctgcattccttggcttgtggccccttcctgcagcttcaaaaccagcagtggctcgtcgagtctttctcacatgacatcactctgatgctgactctcctgcctcccttttctgtgtttaaagggcctttgtgatcacatcgggcccacccaggtaacccaggataatctccctgctttaaagtcagctgattagcaaccttagtcccatttgctgccctaattccccttttccatgcaacttgacatattcacaggttctaaggattaacacttggacatctttgggagcctttattctgcctaccacaccttgcactaccctcttgcccccaaccagaagtgcatagatggaggcaggagaaagaagaggagggaggccagacttggaaagatgaggcttgtctttgtgtttcctttcatagagaagtgcccaggtaaatcaggaggtggccctaatgtccttggaccttagcagcctctcttttgcctcagattcctggggctgcaaagcctggggtcaatcagaataggaagccaggcctcaggcagagcaaattttgggtagttccatcaactggcaagagcattcccacttgctttggggtagccttcccagttgctttgggggaaccagatgagctgggctcatctcctttctaaatcacagaagattcagatctcaggagtccatttggctgggtcagtagtgagttggctcaaatttgatggactgatacacaactctcagagctcatttcttgcctctgactcttcttttttttttgagacagtctccctgtgtcaactaggctgcagtgcagtggcacgatcttggctcactgcaaccaccacctcctgagttcaagcagtcctcatgcctcagcctcttgagtagctggattataggcacttgcaatcattcctggctaatttttgtatttttagtagagacgaggttttgccatgttggccaggctggtcttgaactcctaacctcaagtgatccacctgcctcagcttcccaaagtgctgggattacaggcgtgagccaccatgcttggcccctttgagtcttctaataataataataaaaataatggtaatggtgatagtggttgccattttgggggtgctttcatgtactaggcctstgtagggctttagggctttttttttttttttttttttttttgtggggtgggaccttgctttgtggactgggctacagtacagtggtgtgatcatggctcatttcagcctcccgagtagttgagactacagacatgcgccaccatacctggctaatttttaaattatttttagagacaaggtcatgcagtgttgcccaggctggtctcaaactcctgggctccagtgatcctcctgccttgacctcccaaagtgctggaatcacaggtgcaagccattgctctgagcctatagggctttttatatacactttatcctgtaatcttcacagccactctgtgaggtgaacggttagtcctagtttatagatgaggaacccaaggcacagacgttaaggaatatgctcagagctcatgagtggcagggctcaaatccrtacccagagctgtctcgcaaggtgttctgactctggctcagttgttcctagatgagagctttcctgctccaaattctcccctccctgtagcagatcaattaaggactgcttcacttgttatgccaagtgctgacaccacaaagagggtgagtaagttcctccaggaactcaggcatatagagacagaaggccggttacccaaggaagaacttgtccctccttctgagccttccttgacttccctgatgaggtccctttctccctgtgatatgctttcctttgtaacagttaacacagttgataggtcacatttattgagtttaattattcagttaattgttatccatcccttggcactgccctacaagttctgtgaggcacacagattttgtcttctcctcctttactgtaactccagtgcctagtgtggagtgtagtatggaagtatgactccatagaagtatgagtactgtaggtactcagtacctatttgtcctctgggggagagcagtggagatttagagcaagagagcctctcatctaggagcaactgagctaactggaatgaatgaatgagggccaaagaaatggtagagtcaggtgcttcaaaattaatgaaggggcctggcgtggtggctcacacctgaaggggctcacactgtggctcatcccagcactttgggaggccaaagcgagcagatcatctgaggtcaggagttcgagaccagcctggccagcgtggtgaaaccccatctctactaaaaataccaaaaaaactagccggggcatggtggcagatgcctgtaatcccagctactcaggaggctgaagcaggagaatcacttgaagccgggaggcggaggttgcaatgagccgagattgtgccactgcactccagactgggtgatagagcaagattccatctcaaaaaataaaaatacaaatacaaaaattagccaggaatgatgcacgcctgtaatcccagctacttggaaaaaaaaaaaaaaaaggaaggaaggctggctggtttgagaaagtgggactactctgaaggaaaggtaacatgtaggtgaaaaagaaggggctggctagggaagggagatgacatgagcaactgtatagagatgggaataaaataggacatgtcagagatcatgaatagcatggtatggttggggcagagggctggtgagcaaagtagagggagatgaggtaggaaagatagacttggtcagattatggaggggtctgagtgtcagggtctgtacattatctagtagggagcagggagtatttaaaaggattggggctgggtgcggtggctcatgcctgtgatcccagcactttgggaggctgaggtgggtggatcacgaggtcaggagatcgacaccatcctggctaacacgatgaaaccccgtctctactaaaaatacaaaaaattagccaggagtggtggtgggtacctgtagtcccagctactcgggaggctgaggcaggagaatggcgtgaacctgggaggcagagcttgcagtgagctgagatcgcgccactgtactccagcctgggcgacagagcgagactctgtctcaaaaaaataaataaataaaaaataaaaggattggaacaggacagtaagaggagtaaagtgaggattcagatgaatgtggctggattaaggcaaagggagacaaccatgctgcggcaaaggctgatgtgagagggtgctttgctgtagcagagggggagaaggaagaatcaaagaggattcttaattttgaagccaggcaaacgggagaatgatactacatagagatggagcctagagaggcaaatggcttagaaaagaagatggccaggtgtggtggcacgcctgtaatcccagcactttgggaggctgaggcgggtgagtcacttgaggccaggagttcaagaccagcctgggcaatatggcaaaactctgtctctacaraaaacacaaaaattagttgggcatgatggcatgcatctgtaatcccagctacttgggaggctgaggtggaagaatcgcttgagcccaggaggcggaggttgcagtgagctgagattgcactgctgcacaccagcctgggcgacagagtgagagaccctgtctcaaaaaagaaaaaaarcctatttgttgttggcatacggtcagttgaagtcgagatggcccagaggcagtgacagttacaggatggacaggagagaagggagggctggagttgtgcaacctggagaaatcccatgggggcaaggtcacagggacagatggaaaatgagcaggggggccatgaagactgaacctcacaaacatccctgtttgggggccaaaagaggagctggggctggaaaaggagttgaatggagggcctggaggtaggagctgcaagaaaggaggacagtgtagcagagattcaagttaagcacccaaacgtgcagggttgtaaatcagttttattctctggaatacataattccataccataatgcactaaaagctttagtctattcatttcctgtctatcaagtgaatcagaaccaattagtattctgttcaaagggagaaatgacatcagacatgctaatagaataagcactttcttacatcagagatgtaatcaaactgaggaaaacccttggttaattagtcattacaatcagttctccatagaaacaactgtatataatgggatagacaaagaaaaaattcatagattagaccttatcaagatgaaaaccttggctgggcacggttgatcacgcctgtaattccagcactttgggaggtcgaggtgggtggatcacctaaggtcaggattttgagaccagcctgaccaacatagtgaaactccacctctactaaaaatgcaaagttagccaggcatggtggctcatgcctgtaattccagctactcagaaggctgaggcaggagaattgcttgaacctaggaggcggaggttgtagtgagccaagatcgtgctgttgcactccagcctgggtgacagagtgagactccattcccgtccccctcaaaagaagaccttttgtgtatcaaaggacactatcaagaaagtgaaaagacagcccacagaatgggaaaaagtatttgcaaatcatacacctgataagggactggtatttagaatatataaagaacacctacaattcaacaataaagacaaataactcagtttaaaaatgggcaaagaatctgaatagacatttttccaaagaagatatacaaatgactagtaagcacatgaaataatgccaacatcattagtcatcaaggaaatgcaactctaaatcacgatgagatagcacttcacacccactaggatggttataatttttaaaaagtggataataagttttggcaaggatgtagagagattggaacccccatacgttgctgataggaatgtaaaatggtgcagctgctgtggaaaatagtctgacagttcctcaaaaggttaactacagagttaccatatgggccagcaattccattcctaggtgtatattcgtgagaaatgaaaacttacgtccacatgaaaacttacatctccaaaaaatgtgtacatgaatattcatagcagctttatttgtaatagtcaaaaagtggaaataagccaaatgactatcaactgatgaatggataagtaaaatggtacattcacacaatagaatattatttgacaataaaagaatgaggaactggctgggtgcggtggctcatgcctgtagtcccagcactttgggaggccaaggcgggtggatcacttgaggtcaggagttcaagaccagtctgaccaacatggtgcaaccccgtctctaacaaaaatatgaaaaattagccaggtatggtggtgcacacctgtaatcccagttacttgggaggctgaggcaggagaatcacttgaacccgggaggtggaggttgcagtgagccaagatggtgccactgcactccagcctgggtgacagagggagactctgtctcaaaaaaaaaaaaaaaaggaactgatgcatgctgtaacttggataaatttttttttttttttttttttttgagacaagagtctctgttgcccaggctggagtgcagtggcgccgtctcggctcattgcaacctctgcctcctgggttcaagtgattctcctgcctcagcctctcgagtggctgggattacaagcatgtgccaccacaaccagctactttttgtatttttagtagagacgaggttttgccatgttggccaggctgttctcgaactcctgacctcaggtgatcctcccacctcagagtcccaaagtgttgggattacaggtgtgagccaccgcgcctagctgtatctcgaaaacatagtgagagaagtcagacacagccacatatatgatgccctttatgtgaaatgttcagaacaggcaaatccatagggacagaaattagattagtggttgccaggaaaggggaagtaaccactcttgggtatggagtttctttttgggtaatgaaaattttctgtagatagtggtggtggttatacatcttgtgaatatacaaaaaactgctgaatatatttactttaaaagggtaaattgtatggtatgtaaattatatctaaaaaagagaaacaaaattgaccacactaaacagaaaaaaaaggtaggcaaaaaattcagaatgcctcttagcctagtgctccctgcaaggtggagtttcacaggattatggcagacaaccaagcccccttcctctaaatagaggttccatgatattttcagtaactgaattgcccatcacagatccccttagtggatgaacttgcattctggggcaagtttggggttttgaaggaattctgtcttgaattttacaaagcatataaactacctttcccaggaacatcttgtgcattatttttgtcttcctactaccctgagtttgcattcatttaaaggatgatacttttaaagcacattcatccagtttgccacaaaaagccagtgttagttttctcactacatagtgcgtgggacattttatcaaataaccagcactgttttttttttatgataaagtataatggtgtctagttttggaattggagtgttacttatagcaagtgtggaggataagtaaatagttttacagtttttatttagatcacactcctatttgtggatcaagaagaggcctgtaaagaagctaaacttggcttctgtgagtaaaacagaagagaaggcttttggtcaatgttcccatgcaagtaatttgttccaagtacctctcccagatgaattgcagtgatagaattggcatgtgatcttcttgttttatgcctatttttagaattttcaggaacatgtagggagaacttcatctctttccttaaccaaggccatcatgaaggcaaaacatttcaaatcatgtttatctggcttaatgcagagtggacacacctgtccacagatgccagtcatcgttcgtctttattatattgttcagcctggatgtagtatagagtttgtcttagaagttttctgggccaggtgcagtggctcatccctgtaatcccagcactttgggaggctgaggtgggcagatcacctgaggtcaggagtttgagaccagcctggctaacatggtgaaagcccgtttctactaaatatataaaaaattagccaggtgtggtggcgcacacctgtaattccagctacttgggaggctgaggcaggagaatcactggaccccaggaggcggaggttgcggtgaaccaagattgcaccattgcactctagcttgggcaacaagagtgaaactccgtctcaaaaaaaaaagttttccaggtcaggtacagtggctcacgcctgtaatcccagcattttaggaggccgaggcgggtggattgcttgagtacaggagttctagaccagcctaggtgacatggtgaaaccccatctctacaataaataacaaaaattagctgggcatggtggcatgtgcctgtagtcccagctactcaggaggctgagatgggaggattgattgagcctgggaggtggaggttgcagtgagccaaaaatcatgccactgcgctccagcctgagtgacagagtgagaccccacttgagtccaggagttcaaggctgcagtgagctatgatcacaccagcgcactccagcctgagtgacagagtgagaccgtgtctcttaaaaaaaaaaaaagtgtttcagacttctctacttgttacgaagttatattctttcaattacatcttttattattaatgactgtaattgtaaaaatgctcacagttgtgtagggaaagagcattgggctaggagtcaggactcttaagactctctcattctgattgtgccagttactggctgtgggatctggattgttgtacaaagagtagagttaggccagatggccttttaggtccctgtcaactcttaaaaattagattcagatgttatgcaacaaatcagtcacttcagagttccttcagttttatcttgtgatcttttcaaaccccgttagaatgtagtaagctggtactcattgccactgcagttatgagcagctcatgacagtgaatgtattttcacccatcaggttttgaaggatacccatggtcccatttggaccatgggagttggttgtaccttccaagctaaatagctgtgggtaggttcctgtgcatagatcctgtggccctgcagcccagctacagctgactgctcaggggtcagcacccaagaaagggaagccatctataggctgggcttgaaggaggtcagtgtcttgtgaggtatctggtggaacaccctatacaggatactttctcggggagaatttgagtgcaagactcacggagaaggacttagtaaagtggagcagggtcaagagagaaacatggagagaaggcagatagcaaagccatgaaggagcagaaattgacacagtgtctattagcaataggtagaggcaaaagtgaaatcaaacacaaaagaggctgagatgagaaagaattgccttaattccttttggacarctagagctgctgtggaccttggtggcttagctctcagctacccattgggtttccccagttctcacttatcctcgtacctgtagagtaaacctccactgcccacagtaacctgttccttaaaacctaaaggggcctcactgacagttctggaaatttgcatttctgtgtaaagtgaaaaccttctaaagtattttgccaaaaaacagcaaggaacattcactggtttatagttttacatgcttgattgcactaatattctctgatggattgagttagcatggcaagacttagttcatctattatttaggttatttattcattcgacaaacatggaaacattacattcctactatgtgaaagatactatattctgccctgcctccattttattttcaatgtatatcttttcagatttatttttcaaaagagattatagttctatgatctttatttttgctattttcataaatgagcacttcattttttgaagggtagagggtacattctgtttctttggtaccagtaattgttaccattgagcaggcactgtgtaatgcattttgcagcgttctgtcatctgcttctctcaaaaatcctgtaaaatggaaatgattattttctttttacatgaaaaatgtaaggctttaggagcactgagtaacttgtctaggatcatggagtagttagtagcaaagctgcagctggagctcaaaactctgactctaaagctcatgctcgtaaccactgcacagtatatctgctctttcagtcagaaaataaatgaataatggaaaccaaattatttcttccttaaaattctccttgtggtttaggtgcagaactaacatgaccccctccacagagtctttgctgataactgcccttctccctgtgcttcccattcttcctgcagttgaaggaaacctcatgttttatatccttatatgtttctgaattctgtagcactttggattagagaccatcagtcctccatttgatatctccctgaagcacctagtacaaaatcatgcatgtagagttggtgcttgatcttgtagaagtaaagaatgaattatttccttgtctttaccaacccaggagactttgatagttctgtgctgagcctgcttttgtgctttaaataaagtaaaattaaataattatgagcagatattcttttgtgtctttgtatttgaaatctgctatcaaagcatatggttgggttttattcttaatccagactgacagtctctgctttttaattggacggtttagtccatttacatttgatgtgattattgatatggctggatttggctctaccattttgctgttttctacttgtcttgctgggtttttttgtttgtttctctgttttttctttcttgcaagttataaaccttaccatattgttgagtaatttctgctgtaggcagtcttaattttttttaagtagctttttgttttactcacttatttaacattttcagtgctctttacatctgagagttaccatctagtgtcaattccttttagctttcagaatttttcttagcatgcagtttagtgcaggtctgctagtgatgaattctctcagccattgtgtttcaaaatatctttatttcatcttcatttttgaagttttgctggatagagaattatactggtagacaaaaaattttttttctttcagcatttgaagatgttccattgtcttctggcctccattgtttctgttcagaaattagttgtcgttaatatcagtgctctatatgatagatagatagatagatagatagatagatagatagatagatagatagatatttttttccctcactgccttcaagatttttctcttttctttacattagcactttgattattatttgcctcgggatggttttttttttttttttttaagttatcctggttggcgtttattgagcttcttggatctgtaagttgttgtctttctccagttttgggccatttttttttcagatttcttttttttcaatatgtatatgtatatttttattatactttaagttctagggtacatgtgcgcaatgcaggtttgttacatatgtatacatgtgccatgttggtgtgctgcaccaattaactcgtcatttacattaggtatatctcctaatgctatccctaccccttcccccaccccacaacaggccccggtgtgtgatgttccccttcctgtgtccgagtgttctcattgttcagttcccacctatgagtgagaacatgcagtgtttggttttttgtccttgtgatagtttgctgagaatgatggtttccagcttcagccgtgtccctacaaaggacatgaactcatccttttttatggctgcatagtatgccatggtgtatatgtgccacattttcttaatccagtctatcattgttggacatttggcttggttccaagtctttgctatagtgagtagtgctgcaataaacatatgtttgcgtgtgtctttatagcagcatgatttacattcctttgggtatatacccagtaatgggatggctgggtcaaatggtatttctagttctagatccctcaggaattgccacactgtcttccacaacggttgaactagtttasagtcccaccaacagtgtaaaagtgttcctatttctccacatcctctccagcacctgttgtttcctgaatttttaatgatcgccattctaactggtgtgagatggtatctcattgtggttttgatttgcatttctctgatggccagtgatgatgagcattttttcatgtgtctgttggctgcataaatgtcttcttttgagaagtatccattcatatccttcactcacttgttgatggggttgttttttttttcttgtaaatgtgttggagttctttgtagattctggatattagccctttgtcagatgagtagattgcaaaaattttctcccattctgtaggttgcctgttaactctgatggtagtttcttttgctgtgcagaagctctttagtttaattaggccccatttgtcaattttggcttttgttgctattgcttttggtgttttagacatgaagtccttgyccatgcctatgtcctgaatggtattgcctaggttttcttctagggtttttatggttttaggtctgacatttaagtctttaatccatcttgaattaatttttgtatacagtgtaaggaagggatccagtttcagctttctacatatggctagccagttttcccagcatcgtttgttaaatagggaatcctttccccattkcttgtttttgtcaggtttgtcaaagatcagatagttgtagatgtgcggtattatttctgagggctctgttctgttccattggtctatatctctgttttggtaccagtaccatgctgttttggttactgttgctttgtagtatagtttgaagtcaggtagcgtgatgcctccagctttgttcttttggcttaggattgacttggcaatgcgggctcttttttggttccatatgaactttaaagtagttttttccaattctgtgaagaaagtcattggtagcttgatggggatggcattgaatctataaattaccttgggcagtatggccatgttcatgatattgattcttcctatccatgagcatggaatgttcttccatttgtttgtgtcctcttttatttcattgagcagtggtttgtagttctccttgaagaggtccttcacatcccttgtaagttggattcctaggtattttattctctttaaagctattgtgaatgggagttcactcatgatttggctctctgtttgtctgttgttggtgtataagaatgcttgtgatttttgcacactgattttgtatcctgagactttgctgaagttgcttatcagcttaaggagattttgggctgagacgatggggttttctagatatacagtcatgtcatctgcaaacagggacaatttgacttcctcttttcctcattgaataccctttatttccttctcctgcctgattgccctggccagaacttccaacactatgttgaataggagtggtgagagagggcatccctgtcttgtgccagttttcaaagggaatgcttccagtttttgcccattcagtatgatattggctgtaggtttgtcataaatagctcttgttatttttagatacgtcccatcaatacctaatttattggtgtttttagcatgaagggctgttgaattttgtcaaaggccttttctgcatctattgagataatcatgtggtttttgtctttggttttgtttatatgcrgattatgtttattgatttgcatatgttgaaccagccttgcatcccagggatgaagcccacttgatcatggtggataagctttttgatgtgctgctggattcggtttgccagtgttttattgaggatttttgcgtcgatgttcatcagggatattggtctaaaattctcttttgttgttgtgtctctgccaggctttggtatcaggatgatgctggcctcataaaatgagttagggaggattccctctttttctattgattggaatagtttcagaaggaatggtaccagctcctccttgtacctctggtagaattcggctgtgaatccatctggtcctggactttttttggttggtaagctattaattattgcctcaatttcagagcctgttattggtctattcagagattcaacttcttcctggtttagtcttgggagggtgtatgtgtcgaggaatttatccatttcttctagattttctagtttatttgcgtagaggtgtttatagtattctctgatggtagtttgtatttctgtgagatcggtggtgatatcccctttatcattttttattgtgtctatttgattcttctctcttttcttccttattagtcttgctagctgtctatcaattttgttgatcttttcaaaaaaccagctcctggattcattgatattttgaagsgttttttgtgtctcagtctccttcagttctgctctgatcttagttatttcttgccttctaccagcttttggatgtgtttgctcttgcttctctagttcttttaattgtgatgtcagtatgtcaattttaggtctttcctgctttctcttgtgggcatttagtgctataaatttccctctacacactgctttaaatgtgtcccagagattctggtatgttgtgtctttcttctcattggtttcaaagaacatctttatttctgccttcatttccttatgtacccagtagtcattcaggagcaggttgttcagtttccatgtagttgaggggttttgagtgagtttcttaatcctgagttctagtttgattgcactgtggtctgagagtcagtttgttataatttctgttctttttcatttgctgaggagagctttacttccaactatgtggtcaattttggaataggtgtggtgtggtgctgagaagaatgtatattctgttgatttggggtggagagttctgtagatgtctgttagatctgcttggtgcagagctgaattcaattcctggatatccttgttaactttctgtcttgttgatctgtctaatgttgacagtggggtgttaaagtctcccattattattgtgtgggagtctaagtctctttgtaggtcactaaggacttgctttatgaatctgggtgctcctgtattgggtgcatatatatttaggatagttagctcttcttgttgaattgatccctttaccattatgtaatggccttctttgtctcttttgatctttgttggtttaaagtctgttttatcagagactaggattgcaacccctgcctttttttgttttccatttgcttggtagatcttcctccatccctttattttgagcctatgtgtgtctctgcacgtgagatgggtttcctgaatacagcacactgatgggtcttgactatccaatttgccagtctgtcttttaattggagcatttagcccatttacatttaaggttaatattgttatgtgtgaatttgatcctgtcattatgatgttagctggttattttgctcattagttgatgtagtttcttcctagcattgatggtctttacaatttagcatgtttttgcagtggctggtaccagttgttcgtttccatgtttagtgcttccttcaggagctcttttagggcaggcctggtggtgataaaatctctcagcatttgyttgtctgtaaagtattttatttctccttcacttatgaagcttagtttggctggatatgaaattctgggttgaaaattcttttctttaagaatgttgaatattggcccccactcttctggcttgtagagtttctgctgagagatcagctgttagtctgatgggcttccctttgtgggtaacccgacctttctctctggttgcccttaacattttttccttcatttcaactttggtgaatctgacaattatgtgtctgagagttgctcttctcgaggagtatctttgtggcattctctgtatttcctgaatttgaatgttggcctgccttgcttggttggggaagttctcctggataatatcctgcagagtgttttccaacttggttccattctccccgtcactttcaggtacaccaatcagacgtagatttggtcttttcacatagtcccatatttcttggaggctttgttcgtttttttaaattctttttttctctaaacttctcttctcgcttcatttcattcatttgatcttccatcactgataccctttcttccagttggttgaatcggctactgaagcttgtgcattcatcatgtagttctcatgccrtgggtttcagctccatcaggtcctttaaggacttctctgcattggttattctagttagccattcgtctaatcttttttcaaggtttttaacttctttgcgttgggtttgaacttcctcctttagcttggagaagtttgatcgtctgaagacttcttctctcaacacatcaaagtcattctctgtccagctttgttccgttgctggtgaggagctgcgttcctttggaggaggagaggcactctgatttttagaattttcagtttttctgttctgtttttttccccatctttgtggttttatttacctttggtctttgatgatagtgatgtacagatggggttttggtgtggatgtcctttctgtttgttagttttccttctaacrgtcaggactctcagctgcaggtctgttggagtttgctggaggtgcactccagaccctgtttgcctgggtatcagcagcggaggctgcagaacagcgaatattgatgaacagccaatgttgctgtctgatcgttcctctggaggttttgtctcagaagggtacctggccgtgtgagatgtcagtctgcccctacttgggggtgcctcccagataggctactcagggttcagggacccacttgaggaggcagtctgtctgttctcagatctcaaaccctgtgctaggagaaccactactctcttcaaagctgtcagacagggacatttaaatctrcagaggtttctgctgccttttgttcggctatgccctgcccccagaggtggagcctacagaggcaggcaggcctccttgagctgcggtgggctccacccagttcgagcttcccggccgctttgtttacctactcaagcctcagccatggcaggtgcccctcccccagcctcactgccgccttgcagttggatctcagactgctgtgctagcaatgagcgaggctccgtgggtgtgggaccctctgagccaggcgcgggatataatctcctggtgtgccatttgctaagaccattggaaaagcacggtattagggtgggagtggcccgattttccaggtgccatctgtcacagctttgcttggctatgwaagggaattccctgaccctttctgcttcccgggtgaggcgatgcctcaccctgcttcagctcacactcggtgcgctgcacccactgtcctgcacccactgtatgacaarccccagtgatacgaacccagtacctcagttggaaatgcagaaatcacccatcttctgcatctctctcgctgggagctgtagactggagctgttcctattcagccatcttagaacccaatatcaatagtcttttttttttttttttttctttttgagatggagttttgctcttgtttcctaggctggagtgcaatggcgtgatctcaactcactgcaacctccgcctcccgggttcaagcgattctcctgcctcagcctcctgagtagctgggattataggcatgcaccaccacgcccagctcatttttgtatttttagtagagacggggtttcaccacattggccaggatggtttcgatctcttgaccttgtgatccgcctgcctcagcctcccaaagtgctgggattacaggggtgaaccaccacacccccggcctcagatattttttgtgacccattttctgtctccagttacatgtcactacactgctagatactgtaacaattttccgggctccatttggttttttttttccttcaatattttcttcaaattggatagtttctgttgatttaactttgagttcacaaactctttctctgccatcttttgctattaagcctatacagtgaactttttatttcatttatttcttgtcagatctggaatttccatctgtttttttaaattttatgaaacatttttacagtggttagatacacgtaatgtaaaactcatcatcttactcattaaaatgtagagttcagtgatattaagcactttcatattgctgtgcaaccatcrccaccatccatctccacaatgctttttcatcctgcaaaactgaaattctatatatttggccattgttattagtttctgtttctctattgatcttgtctttattccttattcagatattttcctttaagtgctgtaaattttctctctgctaaattgcaacactgggtcatcttggtgttggtttctatagattgcttttttcttgagtacaggtcacattttcttgtttcttagcatgtctagtgatttttgattgaacactggacattatgaatgatatagagattctggattctgttatgatcttcagaagggtatttttttttcttggcatattgttaatatggcaagatttaagctctaaactcctatctccmctgcattagccgtagttgaaatctccatgcagttctttcaatttccagttgttactttttgctggccccccctgggttctccagccaaggatctgaacatatatttagttgcagatttgggagtttcaccccctgtgtggctccctccctttcatggttttgtcttaactttctggctgctcttccagccctgaactttgtccctgtcactctgaaccatgccttatagggattggcatgtattcttaggcaaaaagctacagatgtataaatctcaccaagtacagttcttctctttcaagggtagcctctctttcaatttctacctgcttttgatcattctcccagtgccttcaaataatttaaaatatgttgtccaaagtttataattgttttctgtggaagggtgatgtgacactgctactctgtcactgttggaagccagatgccaagcagataccttttggggcttacgttcagatgcttcccttgttctcagccttgtgctcagctgggctgtggaggaaataggacttcttctcagggagctccattttcagctgaggagcagagagggcacagggagccctgtgggagtatcttagtcagctcagactgctgtaacaaaatgccacagttgagtggcataaacaacagaaatttatttctcacrgttctggaagcgagaatccaatatcaaggtgccagcaggattgaattctggtgaggcctttctccttggcttgcagatggctgccttctcattgtgtcctcacatggccttttttcctgtgtgcatgtgctcctagtgtctcctcctcttataaggattctggtcctattggatcaggcctcatccttatggccacatttaaccttaattatatccttgaagtccctgtctctaaatatactcacattgagggttagggcttcaacctgaatttgagggtgggggatacagtttcgtccataacagagattaatctagcttctagcctcaggattttgtgagggaggtaggggagacagagttgtgttgtaccaatagcatcaggacgtgttcaatcagtcaccatgtaaatgcagaatgttccaggcatagcatgaagggctaaggattcagttagggataagactggccccatccctgccctcatggaactcacagcctaggaggataaaagatgtatagacatgacattgcagagtgatgaagtaggggacgtacagggctccctgggaacactgaggaagaggtgcccaaataaaggttaggggtcaggagaggcttcctcaagaaaatgtctttctttcttttttcttttttttttttttttgagatggagtttcgctcttgttgcccaggctggagtgcaatggagtaatctcggctcactgcaacctccgcctcctgggttcaagcaattctcctgcctcagcctcttgagtagctgggattacaggcatgcgccaccacgcccagctaattttgtatttttagtagagayrggggtttcaccatgttggtcaggctggtctcgaactcccgacctcaggtgatcctcctgcctcggcctcccaaagtgctgggattacaggcttgagccactgcgcctggccaagaaaatgtctttctaaattaaaatgcttccatggaaggatggcgtgaccaagctactctgtcactgttggaagccagatgccaagcaaaaagctttcggggcttaggatgagtgaagcatcagctgtggaagaaaagaaaatcaagcagagggaatggtaagtgtgagggaatcccgggttgagaagggcactccagaagaacagaaagtcgatgagtagaggtggagctagagctgggagaactggggaagtggagcagtgagggataaggccagagaggtaggttggggccagctcacttgttggattgtaactgcctatccctctagagagtaaactccttttttctgttctttttgtttgttttttgctttttcttttaacatttttatcgttttttatcttttatcttttttcttttgagagtaaactccttaaagacaatgaataagtctccttcagcttggtgtcctctacctgrcagagaagctgtgtagtaaatgtttacaggtgccctttgttatgatttgtggggtgaggtggaaaggttgggcgtgcaggtgacttcacctccttggtgaggcaggcaagggcctggaggttgctggccatctctgtctgtaccttgtccctgtgccctgggtcacatggtgttttgttgttgtcaggcctggacagcgagtccgcctccagcagcatccgcttcagcaaggcctgcctgaagaacgtcttctcggtcctactcatcttcatctacctgctgctcatggctgtggccgtcttyctggtctaccggaccatcacagactttcgtgagaaactcaagcaccctgtcatgtctgtgtcttacaaggaagtggatcgctatgatgccccaggtagagcctgcccctgggccaggcatcagggccccagatctagggtgtcagctggcagatactccctgagctgccgttgtatttgtggtactacgggcagggcagaggagtccaaccaagcatagtctaggtatagagtctatgcccaaggagctgctgttgggagtgtgttacgtgctgaggacagaaatggacagagcctggagcagctactgcaggctactagaggggtcagggaaagcttggcagagaggtaggatttgagatgggcctcgaaaagcacatagatgggaagagagtgtctttgggatggggatcagcagagcgaaggggtgtctagggaggcagagggcttctctggagaggatgagactaacttggctggggccagagggcagggatgaggagaagcaggagtcaaggctggactgtggggtggggaggatggcaggggaggcgaggccattcaaccctgcctggagagggactcccaggccacactgggtatacctgtctcactggggtgtctggtccctgagtggggagtccactctgctatagagcaagctatctgctctgggctgcagggctggcactggatgttctaggggctgtagagtaaatgaggaggcatgagctgtgtgacttgggccctgtccacccagtgtgtgccacctgttctgcccacagatgcccctgagtaacctgtgggagggcctgctcacatggcagagccagagtccgggtgccctctctctggggcttcctgccagcctccagcagagtcaggtgtgctggtcatggctcctctgcccatctcttcctgtcttgtgtttgtccctcttctctgtgtgtctgcttgagtcttctttatctgtacgttttactttctctgtctggtgtcttagtgtctctgaagtctgtctgtctctgatgccatgtgctgctgtcttagcattgctgcccttgaggctggacagctactgtcagtagaggtgcctgggctgggaagagggagggactcttgggatgtgacttgcacacttggggctcccagtctaagagacaaaatgagttctgaggagttccacagtttagagcctcccagtgattctgcaggtgggtgttggcccagaggggtggcacaggggctgagtcaagagacactccttcggagggtgtggagcggggctctgaggtggagtgggttttgatgtgggcatcagggcggctggatcccaggttggccaggggcttactgaggaggggcttgtgccctctgctacagcggggctttctgaggccaggggatgtggctcctcaccctctgaaacccttttcttctcccttccctgcagtcctccagggagtccagaacgtaggttgttggtaggtgtgagatgatttcagggatgtggtcaggagtgtgatttctgacacttgcttttcctgtttgtgcccccaggtattgccttgtaccccggtcaggcccagttgctcagctgtaagcaccattacgaggtcattcctcctctgacaagccctggccagccrggtgacatgaattgcaccacccagaggatcaactacacggaccccttctccaatcagactgtggtaattcctgtctgcstgagctgggtctgggcagctgctctgttagccccgcaacccaaggccccaagtttcctttttcctaggagtccttcttccactcactcagtgtggggccttagtccccaaggagacatgcggctgtgccatgtggacacttggctgtggttggctcacttgcattcagggaggacagtgaggcctccagcctttgctgagtawtgctcagggattcctgacagtgcggtgagaccctgtccccaatggaagaatggcagggctaaagggtggggctggtgcgatatagcgaagtgggtcccatacctgaccacttgacagaattgccaggatactttttgaaaatatgaatttctaggttccatgtgaagccaactgaattataattccttaggtggggcctgagaatccatagtttgaaattaatacgccagcgtaaaggagcgtcggtctggggacaaggactcctgggccctgggctggccatgctgtcgtgcacaacacagcacggctgggaaggatgactgagggatggggttaggagcgccctggaggagtggcactgcacagggtttcaaagacagggtaggcgttttgtattgatttacatctcatctttttcatttcatattcttgcttcagaaagcattgaaaggggctacaatagttttccagatgaaattgggaaggaaaggttttctaggcagaggaaattgcaccatgacctaaagggaagagacgacatgttgtacttgtgcctctgggcacaattgcagttggtggggaaatgtttcatagggtcaggagccctggaagactgatgggtgatgaagctgtggacagagtaatggccagatgagaaaagaacatgcatcgtgctgtagagccacacttgctcccttgggtaacagggaactgttagtgggttttaagatgaaagaataacactaattttttttttgttagtatgtgaacgctaggccccctcctaaaatcctgctaaaatgattctctaaggaatgagatagaacagactagaacatcaataatagctttgcacgtgaagaaaggatatcaccagtggaccagacattttgaggaactggtataaagcataaaaaacagcttgggccagattggtggagcaaacaaattagagcaaatccctaacccaaaacagatgaaggagagacctgytgtagaggtacaagctttccttccaaacccccagcttggaatcagcaccgttagagagcagggtagtcattactggactgcctgttggctgggccagacacaccctataccctccccaggtatgcagagccgctggggatggttgcctctgggtaaaagaccctggaaccattctctacagaagcgaagggaagatgattctttgtgtaggcataggaaacagagcagacttctacaatggaaaaggagagagaactaaaggaaaggactcttcccagagtaaaacacactggaawactcagtgtgcttccacagagcatacttagctttcccatgcaagggagaggcctattagagaaacagaaatttactactttggaagaaaccaaaacccagacctatactagtcaacctaatccttcattcataaataagaatggagaattaatggtcaccagacatttgcatgaaaccaatgacagaaaaggaccaagatgaacaaatagaatggactctagaatagggaagtagaagctaattaaaacaaaaaggaaagcaacttttaaacaattccaatgtggagttatatgtataatagaagctctttgtctggattcccagctcccttcatctctctgtaaaacacgctaatgaaaactygtggctgcttccgtcccactaggtgcctattctctggatgccctcctctcctcccccagttgaagkgtatgcttaggaggagtcagtgagggtcatttccaaacctgtgtaggccagttgcacttgttacaatagttacataattcgactaaagagtgtaaaaacccttgaaataagggcacaaagagagagytgtttttatggaaatgaagttgaatgcagctactgcccccaastctgagtgttggttcatctcctccatcaatttcttgaagtccacaagctataaactaacagagaagttatctcctccctatccaccaagtttcctacccaaaccagcatatagcagtggaggaagaatatgatgagagcagtagagctcccatttggaaaaggaagaaggggaagggcccgcagctctgctctgcagcagtggtggaaccctgcagggtgggaccggtgagacgccttcttggcatgaagtaagctccttggtttgaacctgttgctgccctcagaaagagactcctgtgtgctctggcctcgtcccctgggagcttctgccttggtggtaatgctctgtggccatatctgaagtggacattagaaaatacgccctccctggtggctgcacagcttgtgccactcacttcctgcttgtgtgagcagctttagggctaaacaattgcaaacttggagggcggcttcttacctgcctcctgccactgcctatgtttgcagtgagatttcagaaatgtgtaggcttctggctgttcgcatctaatcaagttcatgtgaaagtgaccccagtcgagggtctcatcctgttgtatttgtaaaatcttcggaattttgctgattttctggtgctttctttcatgctctcaatttaatggtagttattttttaccaaatgctctgctctggcacaataaggtttgccacctttccagcctgcgggatccttatctatttccttactgcccgccattttcccactgcccaaatgtttggctgttccctcattttgattttttttgcaaccataaaacactccagccgggcgtggtggytcatgcctgtaatcccagcactttgggaggccgaggcaggtggatcacgaggtcaggagatcgagaccatcctggctaacatggtgaaaccccgtctctactaaaaataaaaataaaaaaatcaggcgtgtgtagtggcacgtgcctgtagtcccagctacttgggagggcaagacaggagaatcrcctgaacccgggaggcggagcttgcagtgagccgagatcacgccagtgcactccagcttgggcaacagagcgagacaccgtctcaaaaaaaaaaacaagaacactccagtgtcagctaacaaattgtgtattagtcagagtataggctaagctaccaaataaaaacaaaacctgcaaatacaatggctgagatgagggagaagcctccttctctctctsagaacagtcctggcatgcaggccgtgtggcgtagtgggcagtactgcctcataggatagtccagccatgacttttgtcttgtcactgtgctgtcccctgggcattgttctggtccatgtgggcagtgtgtgtgtgtgtgtgtgtgtgtgtgtgtcactgtgctgtcccctgggcattgttctggtccatgtgggctgtgtgtgtgtgtgtgtgtgtgtgtgtgtgtgcacatgcccaggcctgggaaggtggagggcaagcagttcccttttcaggaaatggggtggagttgaatgagtccccttttctttcacacattaggaactttatcacgtggctacatttgagggcagagatgaggctccagcagggggagtggattctgctgaaatctgggttgggaaagccattctagtactaaaggaagaaatggataatagaaaccagggacagtgctttctgttgcacacttaaaacaaaatggtacagaaaggttgaaaaataaatagatggacaaagctgtcttgagaagatgcaacgaaaaccagaagtgacaatattaatagtgtggaattccacgtgcaaaagtttgcaagaaggatgtttaatattgataagaggttcaactccatactctccactaagacgactgaacagttccaaaactttatgtacaaaacagcatgacatttatatattttaagcaaaacccgttagaagtaaaaaataccatcactttagagcacgatttaaacacccctctcagaaattcacagatcaaatagacaaaaactagaaaggataagaattgaatagtgcagttaataaatttagagtatgtatgtgtgtgtatacatgtgggggcacaaaactttgtaactgacagtgtactcactctttttcaaatctctgtagagcatttatttataaaagttgatgtaaaagacatttttttctaaaattaatctataaattcagtttctatcacagttaaaagtcccagtgaatttttttgtggaactaagcaagctagtcttaaagcatacttaraacacgttcaaaaataaccaagacaagtttggggatggggaagagtagtagggagagcaccttcccagatctcagaacagtggaaaaaccacaggaatcaaagtggcacagtactggacagagacagacaaatgtgtgggctctgctagggccagaagcagacatagatattggttctgcatggaatttagtataggataaaggagggaggggaagaggcttcaaaacctgtctctatgcattgtttgggaagtaggagttagagccctatttcacactatatacagagcttaaagccaggtatataaagtatctaaatgtaaaaaagattaaaaagtgctataaagaaatagaggagaatattgatataattttggctttcctcagcaagcaaaacccaaagccgtaaagaaaaggatttaaggttttactacgttaaatttaaagtttccataggacaaatgacattggaaacaaagttaaaagaaaaatgacagactggaagaaaagattggcacacataacagatgaaagtgatcatccttgctaaattaagagcttccataactcaaagaaccaatgagaaaagtggacagaggatgagctgcattcagctctggttgggcatcatatggggaaaactccccaggaatgagcatgagtcccagcccagtcctgttgttggctagtggtccctttggagaccactgggcaaggagctatgggctttccagtcagtacttctgccctcagacccagaggcctctgtgtactctcccaggactgagactctgtcctttttctctctgcagaaatctgccctgattgtccaggggccccgggaagtgaaaaagcgggagctggtcttcctccagttccgcctgaacaagagtagtgaggacttcagcgccattgattacctcctcttctcttctttccaggagttcctgcaaaggtgggcttttagagttcacagtgggcttactgtctactttttatcttattccagctgtgtatgtcccaaggctagagacggaggggtgagggcagggaagggaaggggcattctcagatgacccastggcccaggaagggacctcatgagcttggccggtccactcaacatcttatcacaaagttaagcaaatctggtgtggaggagcatgctggctctccatgcacatagtgctggctggttctagagagatcatttggtctcaccattgcctggggctgctgaggagtaggggaagttgcctttgatttgtaagtccctttgagagcaagttcttgtgtggttccttggtttcccccacagtgtgcacaggaaccacatcttgcccttagtgcgggcttaatgtatgtttgcctgaaatacagttggtccttgaacaacttggggtttggggttaccaaacttaaccactcctgcctatgcagccaaaaatttgtgtataacttttgacccccaaaactactaacagcctactgttgacagaagccttaccaataacataaacaacacatattgcgtggttatatatatcatagactgtaytcttacgataaagtaaactagagaaaaaaaatgttattaagaaaatcatggccaggtgtggtggctcacacctgtaatcctaccactttgggaggccaaggtgggcggatcacgaggtcaggagatcgagaccatcctggctaacatggtgaaaccccatctctactaaaaatacaaaaaattagccaggcgtggtagcgggcacctgtagtcccagctactcaagaggttgaggcaggagaaccgattgaacccaggaggcagagtttgcagtgagctgagattgcgccactgcactccagcctgggcaacagagcragactccaaaaaaaaaaaaaaggaaatcataaggaagagaaaatatacttactattcattcagtggaagtgatcattgtaaaggccttcatcctcatcgccttcatgttgagtaggctgaggaggrggtttggtcttgctgtctcaggagtggcagaggcaaaagaaaatccgcacgtgagtggacccagccagttcaaacctgtgttgttcaagggtctactgcatctctggtatgaggatataagctctgccacctctcttagtcttcgatttacagtgatgaatgtcccctgaccatcagaaagttcttgtctgctccacacacactgctttggggtcacaccgtggagcctagagggcaggagaattttcttcatgtgcctgagttgagagggactcagttcctaccaggtcctgctgagcccagaggctccattcagagcaagcagggaggcagctacaggggcagggaggctgctccccagctggacatgcagcgagctgcctccattccacaccaccactgctttgttcttccaccccagagctcggagcctctgccttagcattttccaccctttctgccacctagaattccctctcccttccctgcttcaagctggccatcttgccttcctcctggaagactttccccgggatcccrcccccactccacgctcctttcgtgagcttcctcggtatgctgctgcagtttttacttgtttttatgttcgctttgattttgctgcatctgcaccgtcttggggctgatgctgtaggtgacccatctggctgagacctccccaaggaaccctcttcccctctttgggccttccatgggagctgacaggctggtgagggcttcctcaggctctgctgaagtccagagttctctgaggagctgtgagcgccatgttctggggagcttctgccaacttcattgccgacagctttggtagccatcgataggaatgatgggaggagggaggaagatttctcccactgggagcttcaaggatcatgttcctgccttgaggccagtgactacccctccatttggaaaccaaatggagagaaaagagggatgggccttgcttttgctggtgactgacagccctgttgaggcaatcacaatttggagaggaggcagggagtgggcagcatcctggttktgccagcaaagaaaccagcttgcagtrggggcttcgactcctgctgccagacctgcattgacctggatcttccttctccttccttcctccaagcccaaacagggtaggcttcatgcaggcctgtgagagtgcctattccagctggaagttctctgggggcttccgcacctgggtcaagatgtcactggtaaagaccaaggaggaggatgggcgggaagcagtggagttccggcaggaggtaggtggctctgggtttgcttgaaactgctggtgacttttccacattygagtctgaggtggagggaagctttgcagagaaggctcctttgagcagggccttaagggtgagtaggccttggtcaggatgagaagggactcccatggagggcttcatatgctatgccagggagtctgtgtgtgcttctgcaggcagcgcacataccggccagtcctcacggaatgcatgtgtggggcagagatcattgtggcttgcagagaggtcagtaactcgcccagctgtgtctgatgtcttgcatctagcagcactttgaggggctggcagtggcctagcagattgattatttgcagggaagagagactagacacagtggtcccaagtgtgcatgttgatccttttcctaaggtcctcttcagctctcacaggtgtcacagcgagagatgccaggtgtatctcctggctgctaggccagtgggctgaaagctttttgatcagatttcccattagtaaaaactttttgatcatatactccatatacatataactctgcaggtgatataacatactattattgtcttagtgttatatacactttaaacattcaaaaatagaaatgttaaaaggatgagataaaaataaatagtaaaaaaagctagtcttttcttcttgtatcccagtggctcgggatgctcatctggagcagaaggacacactccagtcaactaggccatcactggccagaagttaggccggagaagactgtcttgggttagtcttaaacagggccctgtcatgagccctagctcctcagactagtccaggctggttacttggaagaggctcaaagccagttttcttcaaggaagcaaggctatttttcctgccttgggaagtgacaacccctcctggtgactggaccttaaaatcttcctgttttgtaagataactgtcatctcccagatttttacctccaaatttgctccaagaaattcaagtcctttcttatctggccccacagcagctctgaggaaggagactgtgttcacttaccttacaattaagttcaaccccatctaccctggattttctgatagctcccactgtgatccgaaaccaaagggtgaaaactctagtgaacctgtacattaaagaaattttagcatcttttattactgtctaaattggaagtcttttgttggcattatgagctcttttgaacaaaactaaaaaatgtgttttaaaatcacattttagagtttagagtgctctcacataggtatgcccctatactgtagtgacgtaggcattttgttcagctttgtgggtggcaaagctgaggctcagcttcgatgatggatcygagcctctgggtggagctggtttctgcctttgttacctgtctgctctccgttacaccacacagcgtctttagtaattgacaaccagatctcaccaagcacacctactaagtatttacagggaatgctcagctgtgtggatctatgcagctgtgctttgtccctgtaaacttgaagggttgaaacaarsgttgaaaattcagagaaatacttgatctgaaaaccaagtactttgaaatttggaatttttattgcttttaattgtgagtcttacatggtagtttgaatatggtttatttttaatattttattttttttggagacagagtcttgctctgtcccccaggctagagtgcagtggcactatttcggctcactgcaacctctgcctcccagattcaagcgattctcctgcctcagcctcctgagtagctgggattgcaggcgcccaccactacacctggctaatttttgtattttcagtagagacagggcttaaccatgttgaccaggctggtctcaaactcctgacctcaggtgatctgcctggctaggcctcacaaagtgttgggattacagacgtgagccaacatgcctggcctgaatatggtttaattgtgagtacagatacctagtgacaaatttcagtgacaatccaaaacacctattgtaaatcacagatcccatttccccagagaactgtggaaaccaaggtaaagccttggctttgctaccaatgtcaggatcttgtatatatgagatttttgccactctctctccaaaaaatagtgtgaggagaaccacagactatgatcccctgcctactctctctcctttcgctgggcacaggcaagggaagggcacacagaggtggtaacactgctttctctcctccacatctagacaagtgtggttaactacattgaccagaggccagctgccaaaaaaagtgctcaattgttttttgtggtctttgaatggaaagatcctttcatccagaaagtccaagatgtgagtatttaagattatgatagtattatttaagattatgatagtattatttaagattatgatagatgtattatttaagattatgatgctgccctgaagtcttttggctcattcttgtagactgataagtctacctacctgtcctcatcttttttcatagcacaaatcagcttgtaatttatatttatgacatcaatgttatatattctttgtgtttggtcttgtcttcatcactagactttctctgtaaaggagggggactttcattttgctcaccataatttatctgggatatagtggagtgcttagtgcaaagtagctgcttagtagtaatgttcgttgaataaattgagtagaaagcattaagttaccactatacaggttactgcagttgcaagttattctttttcttaatggttccctgtaggataaatactacttgtagtaagaacataatggtacaaataaaatattaacaaagcattaattaatgccatattttaaaaaaattgatacataatatacatatttatgtggtacatgtaatattttgataaatgcagacaaagtctaatgatcaaaaatcagggtagttgggttatccatcatctcaaacatttataatttccttgcattgggaacattcttctagctattttgaaatatataatacattcttgttaactataattgctctactgtattatcatgtcatctatcttactgtatttttgtacccattaaccaatttctcttcatctcctgcttcccccaacccttcccagcctctggtaaccaccattttactcgctacctccatgagactcatttttttttaagctcccacatgagtgagaacgtgtggtatttgtttttctgtgcctggcttatttcacttaacataatgttctccagtttcattcgttttgctgcaaatgacaggatttcattctttaatggctgaataatattccattgtgttttatatatatatatacacaccacattttccttatccattcatcctaagtgttgatggatacttgagttgattccatatcttggctgttgtgaatagtgctacagtaaacatgggrgtgcggatatctctttgatacactgatttcctttttttttttttttcttttcttttttgatttcctttcttttggatatgcacccagcaatgagattgctggatcatatggtagttctagttttagctttttgaggaacctccatactgttttttcatagtgagtttaataatgtaaattattacattcccaccaacagtatacaagcattcccctttttccacatcttcaccagcatctgttacttactgtctttttgatagtggtcattttaactgaggggaggtgataaccttattttggatttggtttgcatttccctgattgattagtgttgttgagcatattttcatatgccttttggccatttgaatatcatcttttgggataaatctctattcaratctcttgcccattttaaaattgaattatttggctttttttgctattgagttgtttgagttccttatatattctggttactaatcccttgttggatgcatagtttgcaaataatttctctcattctgtaggttgtctcttaactttgttgattgtttcctttgctgtacagaagctttttagcttaatgtaatcccatttttctgttttcgcctttgttgactctgctttttgaggtcttaccaaaaagatctttgtccagaccagtgtcctaaagcattatcccagtgttttcttctagtttcataatttcaagtcttagatttgagtctttaatctattttgagtggatttttctatatagtaagagataggggtctagtttcattcttctgcatatggatatccaattttcccagcaccatttattgaagagattatcctttcccaattgtattttcttggtgcctttgtcaaaaatgagttcgttgcatatacatggatttatttctagattctctgttctgttccattggtctatgtgtctgtttttatgccaataccatgctgctttgtttactataactttgtagtatattttgaagtcaggtagtgtgatgccttcagctttgttctttttgcccaggattggtttggctatctggggttttttgtagttccatacaaaatttaggattttttttctacttctgtaaagaatgtcattggtattttataggaattgcattcaatctgtagattgctttgggtagtgtggacattatgctagttcttccaatccatgaaccataggatatttttccattttttgtgtcctgttcaattttttcatccctatttttacagttttcattatagcgatttttttacttctttggttaaatttattcctaggtattttatatttttatagctattataaatgggattgctctcttttttattttattcttgcattgctataagttttttagattgctcgctgttagcatatagaaatattcctgatttgggtgtgttgattttgtatcctgtgactttactgaatttatcaggtctaccagttttttggtggagtgtttaggtttttcaaaatataagatcatatcatgtgcaaacaaagacagtttgacttcttttcaattcagatgccctttatttctttctcttgtctaattgctctggctaggacttccagtattatgttgaacaaaaataatgaaagtaggcacccttgtcttgttccagatcttagaagaaagactttgaatttttccccatatgatgttagctgtgggtttgtcatgtatggcctttattgtggtatgttccttctatactcagtttgttgagttttttgttttttktttgttttttgttttttgtttttttttttgacacagtttcattctgtctcccagcctggagtgcagtggcatgatctcagctcactacaacccctgcctcccaggttcaaatgattcttgtgcttcagcctcctgagtagctgggattacaggtgcacatcaccatgcccagctaatttttgtatttttagtggagatgaggtttcaccatgttggccaggctggtctcaaactcctgacctcaagtgatctgcccacctcggcctcccaaagtgctgggattacaggagtgagccaccatatccggcacattgagagtttttatcatgatagtatgttgaattttattaaatgcttttttaccatctattgaaatgattacatgatttttgttcttgattctgttaatgtgatgtattacatttattgatttgcatatgttgaatcatccttgcatctctgagatggatccctcttgatcatggtgaatggtctttttaatgtattattgaatttggttggctgatactttgttgaggacttttgcatctgtgttcatcagagatatcggcctgtagttttcattttttgttgtgtctttgtcttgttttggtatcagggtaatgctggccttgcagaaccgagtttgggaatattcttcaattttttggaatagtttgagtagaattgctattaatttttttttaatgttagatagaatttagcaacgaagccatcaggtgctgggcttttcttttattactgcctctgtcttgttactcatattggtctattcaggttttctgtttcttcatggttcaatcttggtagacaatgtatccaggaatttttccacttcttttaggttttcctttattggcatatagtttttcattaagtctctaatgatcctttatattactgtggcatcagttgtaatgtcttttattttggtgtgattttatttatttgggtcttcattatatttttcttagatagattttgtttaacttagattttgtttaacttttcaaacaactaacttttctttcttttttttttttttttttgaaatggagtcttgctctatcacaaggctggagtgcagttgcgatcttggctcattgcagcctacgcctcctgggttcaaacgattctcctgcctcagcctcccaggtagctgggattgcaggcacccgccaccatgcccagccaatttttgtatttttagtagagatgggtttcaccattttggccaggatggtcttgttctcttgaccttgtgatctgccggcctcagcctcccaaagtgttgggattacaggtgtgagccactgcgcccggcctcaaacaactaacttttcatttaagtttcagtttcatttatttctgctctgataattattattcygataaatttgggtttgttcttttctcgttctttgaggtgatcgttagcttatttgaaatctctactttttttgatgtaggcatttattataaacttccctcttagtactgcttttgctgtatctcataggctttggtatattgtttccattttcatttgttcaataaatgttaaaatttccttcttaatttcttcattgacctttggtcactaaggagcatcatgtttaatttccatgtatttgtacagtttccaaaattcctcattattgatttctagttttattccactgtggtcagacaagatacttaatatgattttaatttttctgaattagttgaaacttgttttgtggcccaacatatggtctcccctggagaatgttccatgtgctgatgagaaaaatgtatattctgtagcagttggagttttgagacggagtctcgttctgtcgcccaggctggagtgcagtggtgtgaactcggctcactgcaagctctgcctcccgggttcacgccattctcctgcctcagcctcccgagtagctgggactacaggcgcctgccaccaggcccggctaattttttttgtattttttggtagagacggggtttcactgtgttagccaggatggtctcaatcacctgacctcctgatctgcccaccttgatctcccaaagtgctgggattacaggcgtgagcctccgcacctggccagatgaaatgttttgtaaatgtcagttaggtccatttggtctagagtatagtttaaatcccatgtttgttgattttctgtctagataagctgtccatttttgtgagtcggacgttgatgtcccctactattactgtattgcagtctgtctctccctttagatctattaatatttgctttatatatgtggtttctttgatgatactggatgcatacatatttacagttgttgtatcttcttgttgaattgactccctcatcattacataatgatatttgtctctttttccagtttttgacttgaagtctattttatctgttacaggtatagttaaacctgtttttttatttacatttgtgtgggatgtctttttctatcccttcactttttttttttttttttctgagatggagtcttgctctcttgcccaggctggagtgcagtggcatgatcttggctcactgcaacctccacctcccgggttcaagtgattctgctgcctcaggctcccaagtagctgagattacaggcatgcgccaccacacctggctcatttttgtatttttagtagagacagggttttgccatgttgaccaggctggtctcaaactcctgatctcaagcaatctgcccaccttggcctcccaaagtgctgggattataggcataagccatcacgcctggcctgtctcttcactttcaatctgtgtatctttacaggtgaactatacgctgtatggcagcataccgttgggtcttgttttttaataaattcagcaactgtgtcttaagaatttggtccatttacattcaatattattactgatagagaaggacttactacggctatttcgttttttgttttttggttttgtaacttcattcttcttactgtctttgtggataaatgattatctctttaaattccttactttttatttttattatatccattataggtttttgctttatggttaccataaggcttataaaaaacatcttgcagttaaaacaagttattttaaattgaggacaacttaactttgatcacaaagaaacaaaaaacttttaaaactacacttcaactccatactcctcacattttgactttttattatatctatttatatttttgttttgcctcttttttttttttttttgagacggagtctcaccctgtcacccaggctggagtgcagtggcccaatctcagctcactgcaagctcccgggttcacaccattctcctacctcagcctcccgagtagctgggactgcaggcacccgccaccacgcccggctaattttttgtatttttggtagagacagggtttcaccgtgttagccaggatggtcttgatctcatgaccttgtgatccgcccgcctcggcctcccaaagtgctgggattacaggcatgagccaccgcacccggccaaggccattgactcttgatttacccttttgaggctattttctagaccttgtgagtgttcttcattcttttttttttatttgtgtattttcatataatttgtctttaagctcactaattcttctgcttgatcaattctgtgtttgaggcactctgatgcatttttcagtctgttaattgtacttttcagctctaggatttttatttgaatttttaaaaattattttaatctctgttgaatttctttgataaatttctgaattgagtctttgtgtttcattgaagttcctggagtttcctcagaacatctattttgaattccctgagtggtcacacatctctctctcccggattggtcactggcaccttagtctgtttgatgagattgtatttctctgaacttttctggtgcttgtgtacgtctgtctatgggcattgaagatttaggtgtttatttcagtcttcacagtctgcccttgtttatacccatctatcttcaggagattttctacaaattgaaaggtgactgatgatgagttccctaagcgtgtagtcagtcactgcagctgtttcagcactagagggcagtctaagccaagttacactgtgactatcttgtagacttctagatatccagccctgatgtacttggggaggatcagagagaatgccctgggggttcccaggcaaagtcccttatctttccctcaaggggaaggagtctctctgctctgagttgcctggagttggggaggggtaaggcaggtactcccatggctgtcacagctggcaccaccctgggtccctcctaaaccaatgcaatactggggtttgcttaaggccactttagtcagccagtggtgaagctggctggggtttgggtccatcctgctagggtggccrattgccttttggccagggtgggtttagaagtgccatttgggagcaatagcctataattaggggattcgggattcttcctggtgctgtggcagggctggtactaggttccaaggcaaagtccctcatactcttccctctcctttgcccaagcaggagtgttccaccatgctgcactgcctggagttgaggcagctggtgtcatgctggatcacaccccaaacccacagactcccagaccagtgcagtatcagagctgtggttgctatggcctggctgccactgaaattatttggggcctaaggccactttagtctattgtaaagtgggcccagacttggtttcctcccactggggtggtagatgcccctctgatctggggtgggcctaatactcttttcacgggctctagcctggaatcagggcctcagaattctgcctggtgctgttttcccttgtgaagttccaatgcaagttccagactcacttccctctcccaagctcacagattctctctgctgcactgcctaaggttgggggaggggtgtgtaggcagcgtgagaccctcctttctactcttcttcagtgtgtcttttcctgttattatactaaaccagatactgtgatctctcacctggttttttggctcttgtgtagatactttcttacatggatagctgagtttggtgttgctgcagaggactatcgctggagggttctctttagccatctggctccacctcctctaacgtcaaattctgactcatgatcttggaaggggaggaataattggacagctttgctaaaggaacatttaagacacaccgtccaccagagccaggcctaaatctagtattgattggcattcatgtcatcataatatatcctgatgtgatcatggcttacaggaaactgtttcatagctgagacccaaacgtgtaagcttccacccccaggtggggattctgtgatacggatgtgcttgctctgctatcacccactaccactattaattatggactggcaaggctttgtatgaagagggatgtgcagaggcttattgaatcaagactggggagaagggcttgcagctcgttgtgtaatgtgtgataaaacattttttaacctactatattcagtatgaggtacctattatgggccaagtggagcccagtacccgaggcatgctttactcagcttcacagcagtcaagtggtggtatcaccattttcatatgtgaacaatgaaatgcatactaaggtcaccctgctaaattgagcttagaagtattttatttgggaggctgaggcaggcggatcacgaggtcataagatcgagaccatcctggccaacatggtgaaaccccgtctctactaaaaatacaaaaaattagccggccgtggtggcatgtgcctgtagtctcagctactcgggaggctgaggcaggagaatagattgaacccgggaggcggaggttgcagtgaactgagatcgcgccactgcactccagcctggcgacagtgagactccatctcaaaaaaaaaaaaaaaaaaaaagtattcttaccaggttgtggaagtcagaaatccaagataagaactctgccttaaagagttacaactctgccttcaagagttagtgagagaacaatcctattgttttaaattattgattccagaccataaggaactgtgaagggcattcataggataaatagctctgctgaagtccagaaagggttttagcttagtggtcagggaaagctctgagactttgaaggatgagtaaacctagacaggaggaaagcatcgtagatggggaaaagagcagaggactggaggcaggaatcctcctctragtttgggaggaaagacagccattggactagaaatgaggaaacacttgaaactatggtaactatgagatgggaacaagaggagctcaccttcttatggactgggtatagttttagggaaattcatctcaaagcaaggtcacttattgttggattaggccacaaaattaaatattgcytatcttatttgtgcagagcttttttgaaaaacagctttctttcagaatcactttattatagggaggagtcagtatttttctcctcaaactgagctatggacattaaaagtatagtctgaatgaagtatatagagttatgacagtttcagaacccaggtatttttcttatagtcccaataatttgggaagggctcttgataataacactactaaacatacaaaaaattagccaggtgtggtgrcaggttcctgtaatcccagctacycgggaggctgaggcaggagaattgcttgaacccaggaagcggagcttgcactgagccgagattgcgccacgcacacaagcctgggtgacaagagcgaaactccatctcaaaaaaaaaaaaaaaaaaagaatcaagactgaagcaaaccagtaatcctgtttgtttctgtttgcttcacagatagtcactgccaatccttggaacacaattgctcttctctgtggcgccttcttggcattatttaaagcagcagagtttgccaaactgagtataaaatggatgatcaaaattagaaagagataccttaaaagaagaggtcaggcaacragccacataagctgaagtcacctcgcgttgtttagagaactgtccacatcaatgggagctgtcatcacttccactttgtaaacggagctatcaacaatcctgtactcacttgaagaaatggggccttgctgggaggaacagcatgtaaaactggaacttctaaccccgtcccaaaagaggcggtgtagagcctaatagaagagactaatggataaacctacaagttatttaaatatttaaattattaataaactttttaaagagctggccaatgacttttgaatagggtttgtagaagatgcctttcttcctgtttggttcattgtattgtattaggttaagctctactagggtaatgaaggctctacttttcactttttaaaagtggacaaaagagtgtgattttctttttccaaaaattcctgagtatcaagacgtgcaggtcatgctttggagcctatgcactgtacacaaaggcaaaaccctatgactttggcatcatctgccattgatgtccagcctctgacatgctctttgatttgttaaatgttaaatgagactttaaggctactagaaactagtaattaagtttcttaatggactgagtagccacctacttgtccggctagaatgtttgttgatgtatgagtttagattaacactyaaaagcactaggacagatgtacatagaaggtgcctactcattgtattttgatgatttcattaacaggtaaataaaagttaatacaaaaggaacgagtgtgacaatatgaatatctgctcaatcatcgggcacaattactttcatttggtgacttccaaggacaaaaaggtagtatgagtctggactcccaagatggatctractcycaaggtatgttctaactgcttccagggaagggtttgttaggcatggcaactgatggcaggtgtccagaaagagtgacctggtgtccccgaggaagctgggttaactctttactgtgtccacaaaactacccatcatatgaggaaggggyatacgcagtgtgaccctcaaaaagcttttagcctagcctttgacagaaatgagtatgcattaaaaaaaagtctatttttcacattaaggttctaaaaattgtttccagagttttaaattatttatgtgcctgttgcttcaaagaggacttggtagcatttcctaaattttgtaatctggcttccgataatccaaagggaataactcaaatgtatgaataggcattttaaatgggaagaaactgttttttggatgaatgattaaaagtgaactgtataaagaaatattccctgccacttttctgctccacagaagcatgagaattcaagttttagcctaggtctctttataaaatcttattttattgcagggcaaatgcaaagccaggcataaaagcttacattaacagtactgataaaaaggggagtgaaaaaggggggtgtgtttttttaaagcatgtctgacaatatgtcactttctctttttttttttttcttttttttctttggagacagagtctcactcactctgttgccaggctggagtgcagtggcgctatctcggctcattgcaacctctgcctcctgggttcaggtgattctcctgcctcagcctcccaagtagctgggattacaagcatgtgccaccatgcctggctaatttttgtatttttagtagagacagggtttcaccatattgaaaaaactggtctggaactcctgagctcaagcaatccacccgcctcagccccccaaagtgctgtgattacaggcgtgagccactgtgcccggccagtcactttaatattacttaaatatctaataaaatttgtttcaatgaacatactatattatactgtattgtagaaagttgagactagtgttctcttagacgccgactgacgcgtcagcaactctatctnnnnnnnnnnnnnnnnnnnncaagattaaatataaacagaaaaattaaaaatgaaatgagggctgggcacagtggctcacgcctgtaatcccagcactttgggaggctgaggcgggcagatcacgaggtcaggagatcgagaccatcctggctaacacggtgaaacaccgtctctactaaaaacacaaaaaaattagccgggcatggtggcaggcacctgcagtcccagctactctggaggctgaggcaggagaatggtgtgaacctgggaggcggagcttgcagtgagcccagatcccactactgcactccagcctgggcaacacagtgagactctgtctcaaaataaataaataaataaataaataaagttgagagacctattaaatctgctttcatgtaagcacataattaggaagtgaacgattttaccttttcagagagaaaaacctttattagctgtaacctgtcaaaatctactctggttgctcttcagtaaaagaaatatacctaaaccttctacagaatagacatttagacataaccttcactttctggaaaggcaggcgcttgccttttctttctgttttgtgtaggatcatcatttttaactgcgctgtcccccagctgtcagcaatactagctgaccctgggtgagtgtagagaatctagaaggaacaccttaacctgatggccatgacaagatgactctgcaatacctactacttgagaaaaacaaagcatgagctattgttgtaaaagaattttagtgctcttccttttggtacactgctttcatgatgacctgggagtagtgtgcatcccctgtgctagagtttttaatattaaagcagaagtaaacatcagtagcagataacactttattacaataatgtctgatttctttctctttttttgagacagaatcttgttctgtcgcccaggctggagtgcatcttgggtcattgcgggctcaagcgattctcttgcctcagcctcccgagtagctgggattgtagacgcccaccagcacgcatggctagtttttatatttttagtagagacagagtttcaccatgttggccaggctggtcttgaactcctgacctcaggtgatcggcccgcctcggcctcccaaaatgctgggattacaggcgcgagccaccgcacccagccaataatacctgatttctaactgtgccacaggctccctgctcttcactagaagtgctatttattatggattatgaaaaattagcttcaaagtaaattaaacccatcctcttaacatacaaggatatgaaagatgatggaaagatatcctagaacttagaattttatgcaaatattctgtaaaacatattttggtaaagggctagaacactcaaccttggcacacaatcttcctatttttaaattagacttcgtcccacaatttgtcttaaaagtttctataaatacacatatgtatgtaaaaaggggggcagacttctcctgtatgcctaagcttagagctaaaagaagcaaagatgacataaggcaaaatacaaacatagactttattaaatgctgctcaatcccccaatgaagatctttcattacaaaacagttttccacacaactgcaagttaagagattggaatggtactctgataacaaaagatgtgagaaatacttgaccaagtaaaaacatacaagacctctatatagtcaaccttttcagagctctacagaggaagcctactgcagttcctttaaataaagccaggcagtgacaactagtgctctgtatcaccacactgtgggactcaaagcctccatccctgggtcaggagggactaggtgaaggacaggttgtgaggactggaaaggccctgccttcagcctttgagaggaagaggaggaatgaattgagaggcaagctgggtaattcacctgagctgcctctacccatctgttaccactctggagaattgcagaggaagggggatattcatgaggaacaatctgaagaattttggtttactttcccagcttttatttatattttgtgctttaaaaagcctggagatttaaggttttgcctaaattccagagtacagtaatgtatttattgagggaggggttagggcaggtaattccccccatcatatttctgggtgagacaaagagaagggtaaggatgataccttagttttattttaggaagtattttttcctaggatgtaactaaggtttgcagcagtgtgaaaagcacattataaaagggaaaaatatacagagcagactaccatatctatgtgcaacacaatcaaagaagaattcaagtcataattcttaccactcccataattatctcactcatatcatagatgataaaattcattcatttctgtgaaacttcagaagtgacacaataaatccaatgattagacaaaggttacaatatactatggccatgatacagcacagggctacgtttagtccatatatttttccatttacagttgccagaaaaaattggccttttaattatattatactgatgaggtttgttttgtaatttttacatatttcaaaaaagcatacaaaactctgcctatccggcagaggtgggaggctttttttttattcggcacttgtattgctgagaatactgtgcatgttgtaagcactattctgtttttctagagctttctttagctttagctcctctaattttttccataattcttcacgttccaattccttctttttctctctgtagataaaccaaaatttttgtaatcagaaattatttcagaacccaaagagaggtgctgtttgacagcttactggagaacacattacttacccacatttcacttaaatccctctgctaaagctttggagtccacttacctggagcacctaatttcttcttgtcactctcctaaatgtactgagtctgtgcatctcctgtaccagctagacgttactacttgctttctgtcccctacacattatcactaccatgacactgtactttatagtcaacaaagtacttacacgtcaattttctcacgtaaacatcttgcagttgtagtagtctaatcagtattacaaaggctgaaggggctggccactaggtcagtaggaagcacttccttcaccacaccagacagaagccacatcatttttgccactaacagccacatctctagccactaaccagtttgtatcttactagctcctcttttacatgtcaaatgaaaactttagtttcagtaatctttctctagaacaaaatgaaggtcaaaatatttcatatgtcgtttcaactaattaatttcagttctaaggaaaacatttctgagtaacttgaacctgtctattctgaaaggctccatgaacatgtaaaacataggcttataattctgcagttatgagttaaaaggacaaatccttttaaaggatttgctgatttatgcaggtaagaaatgatgagtatattcttagtcatgtgaaatacatatttttcaaatacaagtttcctatgatcctagtcatcttattttcttcccattgcttcctgaggctcaaaacatgtacttaatttctattcctgcctgaatgctgctatttaaaggaaataatgcattgagttagttattaatgggctggatggctttgaagaaaggctatccattttctactttaagataaccataactaggaacttgtcaaaatagatagcttttctaaacagaacaggtaatatgcttattagaagtaaatggtaactgttatcctcaaataatgggtgggctcaggtacactggttactaaccacttaagtttaagaaagtgcttcttgagtttgaaataaacatatgagaagaaagtaactcttgaaagattattttatagtaatttatgaaattctcaaaaagaggtaatcactaggccatgttcctaaaggctgatacgtgctaacatttatactctaaaatacatattattgcaaggacaacatattaatagtaccctaagccatatcattatgtgacttccctcttcccaaaggagaactatgctgactttaaaataccaccttctgataatccacagcgtaagaattacctactgctaacaaagaacacttgaaaagtaaagctcactctggaagcccacgtggacaaaaaggattttcgtaaatgcatggataaaaaatcaaattgtacaaattgatatttaaaattcagcataaattatatttcatatgcagatgctaacagactgaggaaatctaaggctcagaatgagataaacaggatttatgatccacattaaaatcataatctaaccatttagaggaagtaaattatgtaactaccctcaaaaataaatgctactgctttttctgctttaacaaatttataaaaatactggggctagtttatctggaaatgacttatatgttaagagactttcacattgtaatgtttactataaggtaattaacttcttaaatatgaaaatctgaactgagagaagataccttcctgaactgaatcacattcaactaacataaaatgtatagataattttgtaattcaaaatatcaaatacctctgtctttcagctttgtatgagctagtaaggtcatcgaaaagcttgccattcatttccattagggttttcagcacattgtataccagtgctacaatggtcctgaaatgaaaatgagccagtcctgagttatgatactgctaacagagaggaaatgtaacactatggtctctaaaatgggttaaagcttggctgatttcatttaatccattttagagatgataaaactgaggctcaagaggtttgtaatatgctcaaggtcatacagcaagtggtggtagagacagtctaagaaaacttaaatcttttccattttatcatgcttacattaaactctagttaaaaatgttcactatagttatcttcatttctgctttacagtctcatgtctgaaatcctgagtaacaacattaaaagaagatgaaaaagatccaattaccaaaacttatgaaaagtagaaagccggataaggatgttaaagaagttagaatatattacccttagcacttcggctttcccctgggacagtgccatttatagaggggagactatacactgagagtagaccaacacaactctgcattaacggagtagtttgtgtatcctctgcaaatgttcagttggtctccccaagagggtttgaccacaacctccagggagatttgcaattttaaattgacatgaaggctgggcacagtggtacatgcctataatctcagcactttgggaggccaaggtgagatgatcact

SEQ ID NO: 98097 - DNA, 16700 bp, Homo sapiens
gcagctctccaacctgctcaacagcaagctcttcctcctcacggtgagggccgtgtggcgggagtgcccagtgggcaaggaggtggggctggggaactactggcctgagacaaaggtgggggaggagtggggcttcccaggatgagcctccgacccctgctcagctcatccacaccctggaggagcagcccagcttttcccagagggatcgctgccatgtggcttcgctgctgtcgctagcgctacacggcaagctggagtacctgacggacatcatgaggaccctgctgggtgacctggcggcccattacgtgcacaggaaccccaagctcatgctacgcaggttggccttgacctggacccggtggcgggggtgagggcttgccacagacctgcccccatcgcaccctgggcgggctctgtccaggggcgggtggggccaggaagccccagcaggtggggggaaggaaagtgagatgtcctcagcagggacacaggcacaaaggcctgaccctgtggccggctccccgcaggacagagaccatggtggagaaactgctcaccaactggctgtccatctgcctgtacgccttcctgagggtgaggggcactgtcccgcctgctcccagccctgagtggcagactcctcccctcttgccatgagggggctactgcctgcgccctacgtgacgaaggcccggcaaggggggctttggaaagggaaggactttgaaccctctccggggctggagacgaggcagaggcgagaagggctatcatcaatcctccctcgcttggctgatgccggctcatcttggcagtgcaggaggtggctggtgaaccactgtacatgctcttccgggccatccagtaccaggtggacaaaggccccgtggacgccgtgacaggcaaggccaaacggaccctgaatgatagccgcttgctgcgggaggacgtggagttccagcccctgacgctgatggtgctggtggggcccggggctggcggggccgcaggcagcagcgagatgcagcgcgtgccagcccgggtgctcgacacggacaccatcacccaggtcaaggagaaggtgttggaccaagtctacaagggcacccccttctcccagaggccctcagtgcatgccctagaccttggtgagagagccagccctgcccacccaccccagggacccttccctacccctccggcacctggagcccctcaactgtgtcttactatgagtgtggggcgtggagagcaggctgtagactatctgcttccctgactccctccagagtggcgctcaggcctggctggtcacctgaccctatcggacgaagacttgacctccgtgacccaaaaccactggaagagactcaacaccttgcaacactacaaggtgtgagcagggacggggcgaggcagggcggggctggggcggggcagggcgaggcagggcagggcggggctggggcggggcgaggcagggcggggctggggcgaggcgaggcagggcggggctggggcgaggcggggcagggcggggctggggtggggaggggcgaggcagagcagggcagggctggggcggggcgaggcacggcagggcgaggatggggcggggcgaggcagggcggggctggggcggggatggggggcggggcggggcgaggcaaggcagggaagggcagggatggggtggggcagggtgaggcgaggcagggcagggcgggtctggggcggggaagggcgaggcagggcaggatgtgggcggtgtaggcgcctggctaggggtcagcacagcctccgctccccatctctgccaggtcccagatggagcaacagtggggctcgtccctcagctgcaccgtggcagcaccatctcccagagcctggcccagagatgccccttgggagagagtgagtccctcggccctgacctggggccactggagtccaggctgggcaggcagaactcctggccatgcatctgcctcaacttcatcccccaccccaccgagatcttctgcccatctccttcctttcttccagtccccacactgccccaccttgtcgggggagtggactgggcatcccaggccaggggcagggggtatagccctgaagccaggctcctgtgccctcagacatacccacgctggaggatggcgaggaggggggggtgtgcctctggcacctggtgaaagccaccgaggagccagaaggggccaaggtgcggtgcagcagcctgcgggagcgcgagccagcaagggccaaggccattccggaaatctacctcacccgtctgctgtccatgaaggttggtgcggcctgggtggctgggcctgagaggaggctcagccagggaccccgaccgagccagggtgtgggaggggcaggggcagcctcagccgtggatggcccccacaccctgccctccacacagcccttatcccctgcctcgcagggcacgctgcagaagtttgtggacgacaccttccaggccattctcagcgtgaaccggcccatccccatcgccgtcaagtacctgtttgaccttctggatgagctagcagagaagcacggcatcgaggacccagggaccctgcacatctggaagaccaacaggtgcctttcctgctgccccacccctgctgtgcatatggtccactgagtcccagagagaccaggacattcccagggtggatgcgcccacctggggtttctggaacttacaggaagatctagggcccaggtcacctaggccaccaggccagcttccagcggcccctggctccgagtgtgttgccagtaggctggagtacatggggcggagatcacgatggcaggccagggcctcacgcccacgcctgccctgcgcccccagtctgctgctgcggttctgggtgaatgccttgaagaacccacagctcatctttgatgtacgggtgtcggacaatgtggacgccatccttgctgtcatcgcccagaccttcattgactcctgtaccacctcggagcataaagtgggccgggtgagagcagtgccagcagcagcagctggcaggggcttgaggaggaaaggcttatgggggaagcctagagggctgtgcacagagctctgggtgggcagtggcagcatcatgggggcaccttcacctccgagctcatgcctagcgcctcccctccctccggagcaggattccccagtgaacaaactgctctacgcccgggagatcccacgctacaagcagatggtggagaggtgggtgtcagaggcatcggggctgcggggaagggggctgccccacccctaacgaagtctgctcctccaggtactatgcggacattcgccagagctctccggcgagctaccaggagatgaactctgctttggctgagctctccggggtgaggcatggcccggggggtgcgcctgtccacacgtgggtggaaagactagcagagcagaggggggagacttggggcttgaggaccaggctgggacctcactgcccccctccacgtggtgcccccagaactacacttctgctccccactgtctggaggctctgcaagaactctacaaccacatccacaggtactatgatcaggtgaggcccagggcactccggaggggaggcacagtggagcgggaggcccgtggaccctcccgggggagcaggggtgccagcccatgctggcggggcccaggctggggaagggactcggctttcattctgattccccagggagacgccaggcagcccctgctggatccccaggctcctgcggtgatggaagcagggtgggtggccctgggccagcaggcagaggggcaggctcagacaggcaccctcctctgcccgggcagattatcagtgccctggaggaggaccctgtgggccagaagctgcagctggcctgccgcctgcagcaggtcgccgccctggtggaaaacaaagtgactgacctgtgagctctggctcagacagcagcaagccggatccaccaacaccgcagcgccttatgaccccggaaccgagccagccactgaggggagctggcagagcctgggggcacagggtgcaaagccaggcactgtgcccagcagtgggctccctgcctgccacctcccctgccagcccacccaccttccccccacctgagattgtttctaatttataaggatccccctccttccccctctccccattgtatttatttgcctgctggaaaatcacatccggaaataaaatagaaatatgtctttttattttattttgagacggagtctcgctctctctcccaggctggagtgcagtggcgcaatctcggctcactgcaacctctttttcccggagttcaagcaattctcctgcctcagcctcccgagtagctgggactacaggcgtgtgccaccacacccgactaattttggtatttttagtaaagacagggtttccccatgtcggacaggctggtctcaaaactcctgacttcaggtgatctgcccgcctcagcctcccaaagtgctgggatcacaggcatgagccaccgcgcctggccagaaatgtcttttgacaaagggcccaatccccagcccctgctgttccctgcaggagctgactcagtgctctcctgactgagagtccctcagccccatgcctataacctgctacccacggacaaagagaggccatcaggtacccgggcttcactttccctcccactctctgacctcgctggcccctccagcaatgcctggcccacccctaccagttcacggaccctggtacagggacactgcaccaatatcttgggacaaacaccctctctgccgagccccctccctttcattgggactcctctgtcaggccccagctggcctcccggctccaccctcgcctctccattcccttgtccttgaagtggccagagtgatcttttgctgagcagaagctcagtgaccaccccccaaccccatatcacccaagctccacattaagcctacagacaccaggcctctagtcctcgccctcgaaccatgcggcagccgtggccagcacgtgaagggctggaacgcgtcttggccgcaggccttgccccactgtgccctgtgctgccctggatgcttctggggacccaatttctcctggtctctcatgatgcagcccctgggtcacaggcccctcagtcaccaccgcactcatggggaagtggctatgggcttgcttgtccccagcagtgagcagcttcctgctgcctccctcatgtctggctatggagcagcccacgacaggcaccttgcaaatggtggagaggaagagcaggcgctgggagccagagcgccaggcagcgtcgcaggagcaggttctgggctggcaagctcccaggcctcccctcagcaggcctgttgcctctggtaggggaaatgaggggtccccagtgacgccacattcagagggcactggactcccagttgtcctaggggctgatgaaacatagaagaagcaggaagtggctgggagcagccagggacagggttcccatgggaatgagaagggcacctccaggaggatgcccacaggggcacaggtggtgggggcttggcctaaggaccaggttgccaagtggagcacatccccacagtccgcaccggagaacgggagcccgacctggggtacgggctgcttcacccccgcgtggacctccccctcagctggggtgcggaggctcagcctgggggcccagttgccccggtccccaagcagcagccccctctgcctccagggtgggcctggagcaggaggggggcctctgcccgggggccgggctctctggggccgccgtcgcgccgccccctccccgcaccgcataccttgcccacagccgagcagctgggaggctatttataaaggcgggtgagatcagcggccggccaaggctataaattcgcaggccgcggccgggccccacaggagcagccgcccggggcaccggagctgcgggctgcgtggccgggatgagcgccagcacgggcggtggtggggacagcggcggcagcggcggcagtagcagcaggtagggctcggctggggcacccggagcccctggcgtctctcatgcccactgccactcaccccacccgcagctcacaggcctcctgygggcccgagtcctcgggctccgaactagccctggccacaccggtgcctcagatgctgcagggccttctgggctccgacgacgaggaacaggaagaccccaaagactactgcaagggtgagacttggccttggggacatgcggcctcacggccactgcagggacccagggcagtcctgggcccacatgggccagatggtcaatggggccgaggtgttcgggggcccaggggagtgagaaccccctccaccccaatctacatctcccctgggcaggcggctaccaccctgtgaagatcggcgacgtgttcaatgggcggtaccacgtggtgcgcaaactgggctggggccacttctccaccgtctggctctgctgggacatccagtgagtgcctccttcgcctccggggcccagcactggctgggatcctgtccctgggcttgcttggggccaccctgatccccgccrtgggtcctgccagggccacagcctacaagggtctcggtattgcaggcgcaagcgctttgtggccctcaaagtggtgaagagtgcggggcattacacggagacagctgtggatgagatcaagctcctgaaatgtgtgaggcacctccctaccccactcccagctcccctggagctgcctggggcctggcaatgcgggtgcaaggcctgccggggctctgtggggcagggcggggctccctgaggggcagcctccagctggctgtgcccaagggggaggatctggaggaacaggcgagggacaggaggggttggcggcctttcttccagcagggcccagctggagcaggagaagggtacactgaagggagctgtgggcttcagggcagggtggaaccatctgtggccccttggcttttgctccaggtccgggacagygaccccagtgaccccaaaagagagaccattgtccagctcattgatgacttcaggatctcaggagtcaatggagtccgtatcctttgcaggaagagcaaagcagtgtggcagccaagggccggcaaatgggggggccctcgctgctagagcctgtctgcagacccgcacaatgggcttgcatccctcccagtaacgggagcctctggcacgaccccgcccccrggtaactgtgtttacgtggaggcagtaacaagctagcgttgattgtccatggacgttgctattatccccaaacggcaggtgctgtctctgtggcactgccttccctttgggggactgccaagaggccctatggcataactagcatgggagtgggctggcccgagaggcctctgtgcctgctcctccagcgccacctctaggatgaccacaaaatgcaccatcccaactggcatacctgttgagactgacagggacactatcgatgatgacaccagcataatggtgaccaggactgcccaggggaggccctgcctccccacctccacacggcccaagccttgctgctcccctagctgagggtgggtggggcctgtgccgcagctggtgtccactggccgcccttcactcccagcccagatgtgtgcatggtgctggaggtgctgggccaccagctcctcaaatggatcatcaagtccaactaccagggcctgcccgtgccctgcgtgaagagcatcgtgaggcaggtgagtgccacccactgggctgcccagcctggcctgggcgggagttggaggaggtcaggtgcgactctcygcaggtgctgcacggcctggactacctccacaccaagtgcaagatcatccacacggacatcaagcccgagaacatcttgctgtgtgtgggggacgcttacatcaggcgcctggctgccgaggccacggagtggcaacaggcaggggcgccgcccccctcccgctccataggtaccaagggcccacatggggctgggtcggggcctctgggcctgaacccctgcctgagtctctgttcctccctgtccccccccmccgctccccacctgcactcccagtcagcactgccccccaggaggtcttggtaagttggggggcccctctctcccatgcctcctctcccatctgagccaactggaggccatctctggagccacagtggctccaccccccaccttcacgcactcccacggtggtaatcccgaaaggctgggtggctgggctgacggtaattcccggggggggtcaagtgccccaaactgctcttggtgaaaggatgctgtcttccccgaatggccacttccgcctgccttagcttgggctgagaggggacagagagcaccctgaggcgggccggccaggtcttcccactcctaatggagctgtggggagtggggccacaggcggggaggcagggagagtagtgagtagctggtgccaaggggcgctggcgccacattctggtgtccatgggagccctggggcccggagaggcctcttccctggcggctgtgcagggaaacctccacttcatgctgactggggcgggcgacaggaaccctggggtgaccctggctctgacagcagaccggtaagctgtccaaaaacaagaggaagaagatgaggcgcaaacggaaacagcagaagcggctgctggaggagcggctgcgggacctgcagaggctggaggccatggaggctgccacccaggctgagggtgagrggccacagrgggtgatgggccgtggagcgcagcaaaggctgcargrcatctgctcagcagctgcctccaccccgtctccccagactctggcttgagactagacgggggcagcggctccacatcctcttcaggctgtcacccygggggcgccagagcaggtccctccccagcctcttcctcccccgccccrgggggcggccgtagcctcagcgcgggctcacagacctcaggcttctccggctccctcttctctcctgcctcctgctccatcctctccggctcgtccaatcagcgagagaccgggggcctcctgtcgcctagcagtaagttgggtggcaagtggtgggcaggcagggctggcagtagtcggaccacttcagtctccctgctctgycttccccagcaccattcggtgcctcgaacctcctggtgaaccccctggagccccaaaatgcagataagatcaagatcaagatcgcagacctgggcaacgcctgctgggtggtatgagcaagtgtgggagagcagagtggggggccctgctccaagggtggaggcacagggccgctcttggggagccctaccccagtctgcagtgcacgtgaaccgtcggctgggtgggcactggtcctgcccagtcaacagcactggggccatggccaagggcaggggccactaggaagggatcagcctcagcctcacatcactgggcctgtccctcttggaggacctggggaccccgaggctcacagcaaaccccactgagctcctcgggtaggcggatcggggtggggcaggagtccgtgggggcaggacagccttggccccagcccgtccccagggctccccttgcttccagcacaagcacttcacggaagacatccagactcggcagtaccgggccgtcgaggtgctgatcggcgccgaatacggccccccggcagacatctggagcacagcctgcatggtacgcccgcccgggctgccctgtgcccagggccagcagcccaccagccagcagcctcacctcctcccccttccaggccttcgagctggccactggtgactacctgttcgagccgcattctggagaagactacagtcgtgatgagggtaaggggtgagggctctgggctcagcctcccggcctcccggcctgcctgcccccaacctcctctttctgcccacagaccacatcgctcacatagtggagcttctgggggacatccccccagccttcgccctctcaggccgctattcccgggagttcttcaaccggagaggtgagggcccgggcagcctcaggccatgtggctgcagggagggtgggacggggaccttggattctgcaacagagggaacactgggtcccaggagccagggcctaagcagaaggcaggtccagagacagggacagagcctgacgcccgctggcctgcccgcaggagagctgcggcacatccacaatctcaagcactggggcctgtacgaggtactcatggaaaagtacgagtggcccctagagcaggccacacagttcagcgcctttctgctgcccatgatggagtacatccccgaaaagcgggccagtgccgctgactgcctccagcacccctggctcaacccctaggcccggctrtggctccacctccagctctccgtgccttaagggaaaagcgggacagctcccaccaccctgctgggcgccagttctccacaaccacagggcagagagacgctggagccaggcccggctctcagagcrtgttctgcctgagacccccgtgagggctctcggagaaagtgtgtgtattcctttcttaataaagtgtggactgaacatcggtgcctggagtgagggaggcccacrccaagtctagggagaaggtgctttattctgggatctgcgtaccaggctggctggggtgctggagtgggaaggggaatccaaggagcaaaccaagaaggtcctagggccagcctaggcctccacggcccggccgttgatgacgcggatgtggcggatgacgtcctggatggcttcagatgttgtgccctggcccccgatgtccggagtgtgcatctgtaggacacaggcaggctcggcacacaccaggccctgccaccccccgctgtctcctgtgacgtgcaggactgggattgccacaggagggaagtggcaccagctaagggccagaagatggggccagatccagtaccatcctcccctgggggctgtggtcagtgcatgaggcgggctacaggaggctgcagggggagactgggcggggcagcagggtagggtgcgaggggaacctcacattctcattgtccatggatgccaggacagccttacggatggaggtggcataggagtgcagcctagaggatgggacagccagccttcagtccctggggcccggagggctggccaggggcttgcggggcactgggagccactcacttgaggtggtccagcatcatgcagctggccagcagggtggccgtggggttggcgatgttcttattggcgatactcttgccggtgttcctcgtagcctggggaggcaagacgaaggagagtgggtggagggcagaaggatgccgggcagtgactctgctcctgtgacacgtccagaagaagccactccacagggacaaaagcccaccagcgggtgccaggggttgggggaaggtgtggggacagatagcttatggggacaggctttcctcgtggggtggtgaaaatgttctggaatgacctggtggtgacggcagtacaaccctggatatccaaaaaactactaaatcatgcattttgaacgggctaaccggatgggatgagtgtgcctcactaagtctgtgaacaggagaaaggcggcaagccgcggcactgccaccggcactcactgtttcaaacaccgcgtacacatggccatagttggccccagccacaaggcctgggcccccgaccagtcccgcgcagacattgttgacgatgttgccatagagattgggcatcaccatgacatcaaactgctggggccgggacaccagctgcgggacaaggagggggctggctgaggagcagattcggaagcatgggtgagagaagcccagggcactcagggcagggggacagcactgggcaggctaatacctgcatggtggtgttatccacaatcatgttctcgaaggtgatctgagggtagcgggctgccacctccctgcagcactggaggaaaagcccatcgcccagtttcctggtggggggttaggaataggacaccagcttggccatcgcaacagtcagccagagggacggggcgtgcagagggccccaggaggctggggtctgaattctaacctgtccctcaccagcaaaatggacagaatcccaccccacctcccctaagtgtgggttctggcaaggcctcgagggcaacagggcactcgcctagggtggcacctcggtgggtagctgggcttttggaccacaaatccctcagagcaggcccaagcaggccactgcagctgcttctggactgctcgcagagaggtcaggggacatacatgatgttggccttgtgcacggccgtcactttcttgcgcccgctctcctgcgccagcttgaaggcatactcggcaatgcgcagggacttggccttggtgatgatcttcaggctctccaccactcccgccacactctgaggagggcatggggagaagagacccatgtgctactgaagagcagcactggccaaacaagctggcgcgaccgggccaccgtgggaagcaaccctgtctgcctatttctggcttctccctcgggcacagcccctgccctctaagggtacacctgtccctggttccttaagctctccccttaatcttgacgctgggggggctcatctcgggccccccatgcacacctcatgctccaggctgctgtactcgccctctgtgttctcccggacaatgaggatgtctatgtccttgtgccgggtcaccacgcctggaaggctcttacagtggatgacgttggcatagaggtccaggctggtgctgggaggggacggagaaagaggctgctaggcctgacaggtggctgactggagccagactccactggctcaccccaccttagccccaccaagcccccagcccgcacacccggatctcaccgaaggatgttgtttcgagatttgtgcgacggtggcaggttatggttggtttcgatgttgcctacaaaacacaacacaggcttagtggcactgcccatccccgccccacctcagcagggcagctgaaggctgccggggtcagaagacttggggagcaaaaatgtttcctgaacactagaatgctagaatgcaacttccagcctaagccccacgaggctacacgctcagggatctcgaagggcacctggtgcagcaggtgctccatgaataacccctgaacgacggaatgaacaagtcaataaatgaataaaggctggcaaccagccaggcagccatgccattctccatccaggctctggagcaacagaaagtgaccactctttactaacaggttggccggccaggctggagctagcaaggtggccttggcggtgttactgccaagcccccgcatcaaggcaccacactcagaggcaggcgggggctgcctggagaaggccacggattggccggaccctaccctacgacccaggacacctggaggaagggaagcagaggccagtggccgctggagacagcagtcagagggcgccaagcagaggccgcctgctggtgagcggtaccccacccagactgctccactcacagcgcgggggtcccctgtggctggcacaaaggcccctctacttgactgccagggcctggggctccccctgggttcatctttgctcacacgctcctcacacagtgcaagtaatgggctgagtgtgcaaaatgagcaatggaagtagtttaaggacctcaagtgaagccccaagaatccctgcctgggctgtgccatccacctccaggctggctgcagccgaggagccaggcagagggtcggaactgcatctctgtgatacctggtttgtgaagaaagatgctgagggtcaaagctgaccccagcagagaggactgtctcaggagggaaggaggggtgggagggaacccatcagggagcccgtcactggacaggctcacacacagctgctctcactcgaatcccagcatcgcagcgcaaacaggcccgaggaggcgtccacccagtctccaagcacgagggtcctctctagccagacaagccctgaaatcagagccgtggggccccacaagagtcagctcagagggaggtaaaagaaatcacaggggctgggcacgacggctcacgcctgtaatcccaacactttgagaggctgaggcgggcagatcacgaggtcaggagttcaagaccagcctggccaacatggtgaaacccactctctactgaaaatacaaaaatcagctgggcgtggtggcgggcgcctgtaatctcagctactcgggaggctgaggcaggagaatcgcttgaaactggaaggcagaggttgcactgagccgagatcacaccgctgcactctagcctgggcgacagagcgagaccccatctcagaaagaacgcaagaaagaaagcaagaaagcaaaaaagcaagcaagcaagaaagcaggaaagcaagcaagaaagcaagcaagcgagcaagtaagcaagaaacgaaggaagaaagcaagaaagaaatcacacctagggccccatcctggcccctggccctggagctcacccttcagggccacgcggttccggcggatggccatgatggcattgcgaatgtcctcttcatcagcattggaactcacgtgcacctcttcaaagtccactggtacacatgcgtgcctgaggcacggcagggtcagggaggctggcccagacccccccgcacctcctccaggaagcctgcccaggctacctctctcctgttgctacctgccctgacctggctctgactgagaagggactgggcccaccttcactgactgatggggacacgcttgaactccacaatgcacactgtggcaggactggtgccaccttccccgagcccaggccagtctggcgggatcacaggccatgggacgcaaggcctgggcttacaggtcgtcttgccatggcctcaccgagtgcttctgggcgcaatgcccctcttggcacaaagtcctcagggccccctggctgaggacaaggcggggacccaggagctccatacctgaagacggacttgacatgcagcatgagctctggcccgatgccatcccctgggatcatggtcaccgtgtgccgcccgccatacttagcggacggaggctgtgggaggcagagggtgaaggtgggccttcggggatcccacatgcccccagctcggcccccatgggctcaagccaattcccttcttcccactggcgctgaccccacaggctgccccgtcacaaggtgccaacttggggcagccccgtcccagacagggctgctcatccagggctcctgggtcagcagcagcccacccccacctggaatttagttaaccccaaagcaactaagagccccccaaacctaacaggcagagaagaatactcacaattgtttgttcctagaaaggatgagaaaggaagaagacacaatcagccaaggttccaagagcaaggccgtgaccaggaaagtgggaccttttcccagggggatgctggctagtacaactcccagaagaggggtgggtagcccctggagaccacgtctcagaggacaggacacaggccgtgcacacacgcgcacaattgcggccacatggagaaagacacatgcgtgggcacgggcaggtacttactgaaaagatgttcctcgaggggacctcgtgggcgcctagaacctggcagagaccaaatgccagcggttggtttgatgtctaacccagaaagccaagttggaaggaaaaacggaccgtccccactgtgcccaggcaggtcccctgtctgtgcagcatggcccactgccaggggcacaatagataattagctccaaagcctcagtccccagggccggcccgctggagcacctggaaagtagaaggcgctccagcctcctgcctccttccgctcttcagaaaatttcttaaaaggcgtgtccctgccctccctcctcttttttgcttctgattatttttttggccagttattcccgctcagcgatgtttgtaacatgcaaaaactggcaaactaaccctggtacagcagggaaatcattacaacaaaccacagatccatgacaacagtcacgttatcacttcgccgatcactttttcttattacaaaagcagcatgtggtcgctacagaaaaagcagaatagggagataagaaggtagcacccagcctccggcctccctgagacaagcactgctggccccctggggaatggcccttcggcattagaaatcgaaaacaaatgtgtagggacatccagccatttctggaaggttgataacagaaacccaactctaggaaggccttcggaaaggactgctggatgccgaatgtccccaacgccctgactggaaatgccggacagcttcagagccaaagctgcctgagccaaatgtgccaggtgccaagtgacctgctgtcctggaagaagccccacctagaacacacctgagacggtggcagagccaaggtcttccctgtcacttggggatgccctgccacttgaccaccaggcagcagcaaagtgttccagccaatggcagaagcatcatagccattggccaaagagccatgccttc

SEQ ID NO: 98098 - DNA, 16888 bp, Homo sapiens
aagagacccatgtgctactgaagagcagcactggccaaacaagctggcgcgaccgggccaccgtgggaagcaaccctgtctgcctatttctggcttctccctcgggcacagcccctgccctctaagggtacacctgtccctggttccttaagctctccccttaatcttgacgctgggggggctcatctcgggccccccatgcacacctcatgctccaggctgctgtactcgccctctgtgttctcccggacaatgaggatgtctatgtccttgtgccgggtcaccacgcctggaaggctcttacagtggatgacgttggcatagaggtccaggctggtgctgggaggggacggagaaagaggctgctaggcctgacaggtggctgactggagccagactccactggctcaccccaccttagccccaccaagcccccagcccgcacacccggatctcaccgaaggatgttgtttcgagatttgtgcgacggtggcaggttatggttggtttcgatgttgcctacaaaacacaacacaggcttagtggcactgcccatccccgccccacctcagcagggcagctgaaggctgccggggtcagaagacttggggagcaaaaatgtttcctgaacactagaatgctagaatgcaacttccagcctaagccccacgaggctacacgctcagggatctcgaagggcacctggtgcagcaggtgctccatgaataacccctgaacgacggaatgaacaagtcaataaatgaataaaggctggcaaccagccaggcagccatgccattctccatccaggctctggagcaacagaaagtgaccactctttactaacaggttggccggccaggctggagctagcaaggtggccttggcggtgttactgccaagcccccgcatcaaggcaccacactcagaggcaggcgggggctgcctggagaaggccacggattggccggaccctaccctacgacccaggacacctggaggaagggaagcagaggccagtggccgctggagacagcagtcagagggcgccaagcagaggccgcctgctggtgagcggtaccccacccagactgctccactcacagcgcgggggtcccctgtggctggcacaaaggcccctctacttgactgccagggcctggggctccccctgggttcatctttgctcacacgctcctcacacagtgcaagtaatgggctgagtgtgcaaaatgagcaatggaagtagtttaaggacctcaagtgaagccccaagaatccctgcctgggctgtgccatccacctccaggctggctgcagccgaggagccaggcagagggtcggaactgcatctctgtgatacctggtttgtgaagaaagatgctgagggtcaaagctgaccccagcagagaggactgtctcaggagggaaggaggggtgggagggaacccatcagggagcccgtcactggacaggctcacacacagctgctctcactcgaatcccagcatcgcagcgcaaacaggcccgaggaggcgtccacccagtctccaagcacgagggtcctctctagccagacaagccctgaaatcagagccgtggggccccacaagagtcagctcagagggaggtaaaagaaatcacaggggctgggcacgacggctcacgcctgtaatcccaacactttgagaggctgaggcgggcagatcacgaggtcaggagttcaagaccagcctggccaacatggtgaaacccactctctactgaaaatacaaaaatcagctgggcgtggtggcgggcgcctgtaatctcagctactcgggaggctgaggcaggagaatcgcttgaaactggaaggcagaggttgcactgagccgagatcacaccgctgcactctagcctgggcgacagagcgagaccccatctcagaaagaacgcaagaaagaaagcaagaaagcaaaaaagcaagcaagcaagaaagcaggaaagcaagcaagaaagcaagcaagcgagcaagtaagcaagaaacgaaggaagaaagcaagaaagaaatcacacctagggccccatcctggcccctggccctggagctcacccttcagggccacgcggttccggcggatggccatgatggcattgcgaatgtcctcttcatcagcattggaactcacgtgcacctcttcaaagtccactggtacacatgcgtgcctgaggcacggcagggtcagggaggctggcccagacccccccgcacctcctccaggaagcctgcccaggctacctctctcctgttgctacctgccctgacctggctctgactgagaagggactgggcccaccttcactgactgatggggacacgcttgaactccacaatgcacactgtggcaggactggtgccaccttccccgagcccaggccagtctggcgggatcacaggccatgggacgcaaggcctgggcttacaggtcgtcttgccatggcctcaccgagtgcttctgggcgcaatgcccctcttggcacaaagtcctcagggccccctggctgaggacaaggcggggacccaggagctccatacctgaagacggacttgacatgcagcatgagctctggcccgatgccatcccctgggatcatggtcaccgtgtgccgcccgccatacttagcggacggaggctgtgggaggcagagggtgaaggtgggccttcggggatcccacatgcccccagctcggcccccatgggctcaagccaattcccttcttcccactggcgctgaccccacaggctgccccgtcacaaggtgccaacttggggcagccccgtcccagacagggctgctcatccagggctcctgggtcagcagcagcccacccccacctggaatttagttaaccccaaagcaactaagagccccccaaacctaacaggcagagaagaatactcacaattgtttgttcctagaaaggatgagaaaggaagaagacacaatcagccaaggttccaagagcaaggccgtgaccaggaaagtgggaccttttcccagggggatgctggctagtacaactcccagaagaggggtgggtagcccctggagaccacgtctcagaggacaggacacaggccgtgcacacacgcgcacaattgcggccacatggagaaagacacatgcgtgggcacgggcaggtacttactgaaaagatgttcctcgaggggacctcgtgggcgcctagaacctggcagagaccaaatgccagcggttggtttgatgtctaacccagaaagccaagttggaaggaaaaacggaccgtccccactgtgcccaggcaggtcccctgtctgtgcagcatggcccactgccaggggcacaatagataattagctccaaagcctcagtccccagggccggcccgctggagcacctggaaagtagaaggcgctccagcctcctgcctccttccgctcttcagaaaatttcttaaaaggcgtgtccctgccctccctcctcttttttgcttctgattatttttttggccagttattcccgctcagcgatgtttgtaacatgcaaaaactggcaaactaaccctggtacagcagggaaatcattacaacaaaccacagatccatgacaacagtcacgttatcacttcgccgatcactttttcttattacaaaagcagcatgtggtcgctacagaaaaagcagaatagggagataagaaggtagcacccagcctccggcctccctgagacaagcactgctggccccctggggaatggcccttcggcattagaaatcgaaaacaaatgtgtagggacatccagccatttctggaaggttgataacagaaacccaactctaggaaggccttcggaaaggactgctggatgccgaatgtccccaacgccctgactggaaatgccggacagcttcagagccaaagctgcctgagccaaatgtgccaggtgccaagtgacctgctgtcctggaagaagccccacctagaacacacctgagacggtggcagagccaaggtcttccctgtcacttggggatgccctgccacttgaccaccaggcagcagcaaagtgttccagccaatggcagaagcatcatagccattggccaaagagccatgccttccagctagaagtccagaaaggctcgggcggagtctgacctctccctgtctgtgtgtccctggccggcactcatcagtccaagccaggggctaggagagggtgcccacaaggaccagagccccgaggatagctcagctgatctgtgtggcacctggatctgcaagcacaggcacggtcgggacttttctgtcttctctctagcgcttatcaacgggtcgggacttttctgtcttctctctagcgcttatcaacatctgaaatcatcttatttgggggctcttgtaagcacgcagaaagcggcttcgatggaccttcctccagggagctttccctgatgccctaaggctactgagctgggaccctaaggccctacttacccccttccctaggttatcactgcattgctccctcctcaacccctgagcccgagaggaggggccaagtcagtgtggtccaatactgtcaccctaggacccagcacagtacctggcccagagctggcacataaggaacatttcctgagtgaacaagcacatcagaaaatgaaaaaagatctggagactagggaggcctcggtccaaatccaccatccactcttcttgagatggcttcatggcctcatctgaaattcacagaacggaggtacctactttccgtgactgttggaaagattaggggacaggaggtgtgtgagctgctcacagtagctagtgccacacagcacgcctgccccttcaccccactggcccctcaggtcagagttcaaggctggtgtccctgggaggtcacgggtggacccctgcagctcccagcagtagttcctcctgggcttcagctgtggcagcaagccaatctcctgagagcatggacctccctcacagatggcaacatcaccaccagggctgagctgaacctctctgccacccggtccctgtgccaggtgttcctttgggctttggcaaaagacccagagagcgctccagatggacttccctgaccttactgtacagatgcaggcaccttccttcaggaggtcgcaaaggctctgccttgtgccctgacttccctgtgaagccaccaatcaaaggagccaagtgtgaggcaggatgcaatatgtacacgcctcccgctctcccatcaccctttcatggttccatggaaagaaagaacatccacaccccacatcttatgcctgctgaggcttctgtctttggcatatttctgttggaccatgtgtcaatggtggctgcatgttttcctatggcgtccaaatcagtgggattcaagacctggggttcctctgtaagggttctcacacccaggacggtcagtctcagggcaaggcactgcccagctacccaccgttcactgtcccctactcccaccccaacgcacacacaggcacacacacaggggaggtcagggaggaggcacacatgtcttcaccaagagcctacaggagcccagttgctggagccatcagagcctctggaaagccactatatactgccgtcctttcagcagcaaggtgggagaagtcagcatcgtcaagagaatttcattaggcacaagcagtctcccccagaggtcagaaggagaaaacatggcaagtagagatgtccctggggagtggccgcaaagtcacggagttctggaaggtcagagttgacaggatcctttgagaacatgaagtctcctcccctctgggttccaaaggggaaactagaacccagagagaggaggaaatggcctaaggccacgcagtggctcagtgtgggagcatggcctagaggtcaaacctcttacccatcagggccaggtgctggctggcagctgcttcagatggtttccagcccacctaggacctaaattaacctcttcttaaataagtgtaaggaaagaagactcggacctgaatacgcaagaccgcacacggagaagagcagaagcaaaacccccgcagcctcagaaaccctagctccttcccattccaggcgcctcgaggggaaggcatctggggctctaagactgsgggactatgggggatgactggcaaagtccggttctttgccaccgggataggtggcaaagcggtccacgagagaggaaaccgtggagaaatttgagtcccggaaccggattcccgaagcggtttgagaaaggcgggccgggatacgtgagtgactgcctcagaagggctccttcaaggacactaaggaggtgacagccgccgtggcccactctcccggcccgtccggagggccccccgccacccgatgcagaccccctgggggagccggtccagggccaacttcggccaatcccctcagtgacagcggargcggccaatcaaccccggcgcgaagccctttccccgcccctggtggggcccctagccaatcggactccagactgcttcgggtgcggctaccccaccgctcccctgcgaccgctgccgcggtcccgtggctctttccctgctcacctcccagggacggcagagaagggctggcccgagcaccgccttcgcggcgctgccggcgacggtcgctaccttcagcgccatgacggaaagtgagagcctccgcacgtcccgacacgcagataccgctctcgcgagagttcgacggggtgcgaagtttcggggacaggcgcggacccggtactgcgcacgcgcgcggtcgcaccgattcacgcccccttccggcgcctagagcaccgctgccgccatgttgagggggggaccgcgaccagctgggcccctggctcagggaggggccacgtcagtgctgccagagacgtcacaatgccggcccagccgttcggtgcgcgattggctgccgctgccacttacgcgtcgctcttcctcgtttgccyctcgtgttcatgggagctcgttttcttttcctctaggcagagaagaggcgatggcggcgatggcatctctcggcgccctggcgctgctcctgctgtccagcctctcccgctgctcaggtagcggcccagccggggcttctttcttgcgagcctctgacccacggcaggtggtgttgggggcaggagggatgcgggggtccggcctttcagggtccgtcgctgcgggccgggccttcccccgagaggcaggcggccttgggacggggggaccaaagcacctcgcgcacgtttaccggcagccaggcttttccttgtctgcccatacgaagaggagtccccgagcctccatggtgcgcccggcccccaagctgcagcacggaacgtgacacatgtcccggctcccgctccctgcggggtcggaccggagcgaagctctgtagcgctgagcgatcgcggccaaaaacggggctggaggagccacataagctaggaagggacctcagtgaggagagggagcaagagcggggcgagttagatggggagccaaaggtgcgcagggccttgagtgccaggccgaagactggcttttccggagggccctgccttacccttaccagagttttcggcagagccgaccaggggtcccgtcgatttgcattcgtgaggggctgaggtctgaactccagagtgtgtttaggaggtggctgcagcagccagccccgggcccgggggccaggactggacaggggcggctttctccacattcccttttctgccgtccttcaggccagtagccttgctgcctgcaacgttttggcagcctaactggcctccctttccgcacactcctcatctgcccctcaggaattccctgaactatagtcagggacgtatccagaggacaagcctggccataaaacccttcgggggctcccctgcgccacaggaagcaggcccaacttaggcaggacacagaagggctggcgggatctagcccctgagaactgcctccacgctgttcctagggatctgcctcctgtggtccagacccagagccttctctgacgtcctctgctgaagccatcgttctgccagggcaccacatttggacagcgggtggctgagaacattcccactttggggagcctttgtttcacaccctctgatgtaggcggcagccttcctttcctttgggcctctggttatggagaaggctaaggcaaggtcctttctctcacagctaacaagttgtgcttctggaaccagagtctctcccgtttacttcttcaggaaacgctggggccagtcttcaccttctgtcaactggcsgggggcagagaccctttctctcatcttgaaagccccagtgcattgcctgcctgcagcccccacccccgatgtctctgctgaggatgccttcagtaactcgtccaggccgtttgtggctctgaattgaggctggcstggcccccgggcctccgtgtcataggtccaagtgttggcatgtattgtccagtgaatccagcccccacctgtccccagttcgctcttcctgcacacctccagaaagccggccttgcccctccccagccttccttcacagccatcccgcctacgttgccattgcatttgtgaccgagcacttggatctgtctcgcatatcccacctggaaggggcaggargagcgcatgggtccccagctgatccgtgctatgaggcagggccgggccatcctgccctcagaccgggatactcgagctggccttacccaggcatctctccctcttccccgcagccgaggcctgcctggagccccagatcaccccttcctactacaccacttctgacgctgtcatttccactgagaccgtcttcattgtggagatctccctgacatgcaagaacagggtccaggtgagacagtggggtttcagacaggagggcgggtggggggtgctcctcactgctagttgatgggggacctgtgtcgatagagggagaatcaagattccaactcttggggtgccggagagatcagggcacggtgatgccagatcctagccagtgttgacaggtcaccttcctcacctgctttgtgtgctgtgcctacacgaggtaaccctgggctcaccacccgctgtttcctgaatgagtatctggaccgggagaaagggccaggagtcagcccaccccggttgccattggccagtttgtctgtgtgggtgttttgtttttgtttttgttttttgtttgtttttttgagatagggtctcactctgttgcctcagctggagtgcattggcacgatcttggctcactgcagcctccacctcccgggttcaagcgattctcctctcagtctcctaagtagctgggatgacaggtgctcgccaccatgcccagctaagttcccataagtccaaagaaggaaatggggccttttttgggtatggccctcttagggtaaagcaccccttgggcagcccactgggcacccctgaccccagcacctcccttgtagactcaggaaatcactcagcccttttgatcatcccgcccctgctcacagtcaacrgggttcctatgcgtccagttaggcccggccatggggatctggccttgtgcccccgtagggaagaccaatgcagagggccagtcacgggattggtgagtgttacctggtacctcctgccagggacactgcagcycccaactgggcctagcctgcccacctgcaggccgtgtgagcagcgcacagggctcctctgcccacacccagagggggcagaaggtgacyctgcctttgttccctcacccagaacatggctctctatgctgacgtcggtggaaaacaattccctgtcactcgaggccaggatgtggggcgttatcaggtgaggggccaatggttcccttgctagggggctccctgctcccgggtgtgacctgaagccccaggggtggccggtcaaccagggccaggggccgtgggctctggctgccggagtgctgcagtgtcggcactggtggtcagggtggcccctccgtgtccactctgcccacactctgctcaacacccaacccaggtgtcctggagcctggaccacaagagcgcccacgcaggcacctatgaggttagattcttcgacgaggagtcctacagcctcctcaggaaggtgaggactcctgtagcccactgtgctcccctgtccctggggagcaggatgggctgggttgggaggtgctggcagcaagtcctgagctgggtggcctttctgtgatcctgtcccttcctcagtgtctcttgcccatttctctcctttccttttctggggcttgggccggtgttcctacctgtctttcccctcccctccccacccccacacgccaggcacccctgaccccagcacctcccttgcacctcccttgcaggctcagaggaataacgaggacatttccatcatcccgcctctgtttacagtcagcgtggaccatcgggtgagtggcctggtccctcctcctttttggggttgttgggctgagtgaaggttatcctctccacagccccagctctgctgctgggccgtgattggccagcatgtcttggttcccctggcggaaggtgaccagggctggctggtctgctcacctgtactcccctgagctggcttgtgatctcctttttttcagggcacttggaacgggccctgggtgtccactgaggtgctggctgcggcgatcggccttgtgatytactacttggccttcagtgcgaagagccacatccaggcctgagggsggcaccccagccctgcccttgcttccttcaataaacatcacaggacctgggactgcacaggacctggggctgctggcttgcgttattgtgccttcccccgactgggagagctgggggcccagcgtcctcttgtctgcctggccagcagaggcaccaggcaggaaaggggtgggctttggtctagaactcccgtccctcctcccaatgaagccccccgtctggtccccacaaaaccctgtatccaccttcccagtgactctctcctggttctggtgagggcagtgggcttggccacctcctccccaggtggccccacaggctccatggggaaacagccagcctggtcttcatcacagctcctgtgttggaagccccgggcccattccgcacgcagaggggtttccctgcactgctttcgggcacagcaagtgcccccaccctgcccatgcggcgtgcagctgtctgggcttggcccctccatactccacaccctgaccatgccacctggcttcccgtgtgctgtgccttcatgggatattgagaaaatacacacccatggccaggtgtggtggcacacacctgtaatccccacgctttgggaggccgaggttagaggatcacctgaagtcaggagtctgagaccaacctgggcaacatggtgagaccctgtctctacagaaaaaatagaaaaattagctgggtgtggtggcatgcgcctgtagttcagctacttgacctggagaggtcaaggatacagtgagtcgtgatcacagcagtgtgctccagcccgggtgacagagtgtgagaccttgtctcaagaaaaaaacaaaaccccacctgtgaggggtacatcacttcctcctagagacacctctcccaagagcacccgcgccctcaggacaccaggcaggcatcccggcctggcaccacgcctggagttcatcctgcacctctcccatcagcctgattttcagcttggcacatgctggctcctgaccagctaatggtattccttagtggcactgagggcccatgaggcagtgagggtcttggagtccaaagggactgggtggaaatcccaggtgagcccttcccagccatgggacccaagtcggtttgctcagctgcgaggcagtgacagtgcctactccaaggtgtcagggagtccactgggaccagccaccaaagtcctgacatctgggtcacccattggctgttactggagagaaatggaattctccagagaggctgcctttttcttgtttgtttgtttttgagacagagtttcgctcttgttgcccaggctggagtgcaatggcgcaatctcagctcactgcaacctccacctcccaggttcaaacaattctcctgcctcagcctcccgagtagctgggattacaggcacctgccaccacacccggctaatgttttgtattgttggtagagacggggtttcactatgttggccaggctggtctcgaactcctgacctcaggtgatccatccatctcggcctcccaaagttctgggattataggcatgagccaccgcgctcagccaaggctgaaaaggagggaaggcccaaaacttgcctgggaggtaggggctcctcagtacttcagctcggtggctagagagagcagcactgaggggccgggggtgtcaggagcaggtgaggactgcctgtgacctgggtctgtcagagtctcggggagggggtcatctatataagcagggagccctcttcccacccccaggccttgggaggggggttgggaggggccggctgccaagaataggtgggcttctaggaagagctgggcgctcaccccaggacagtgcagcaggagcgttggggctgaggggccacaccagctttgccagcagatgcagtttctagattccagaggagactcagcagcctgtgcagggcgggtggctggggcaggccgggtgcagcaggcaccggggcgactgtcgggcgcccggttgctctttttagttctggctccaccacgaagcctgatggccgtgggacccagacgtgaagttgctattccagggcatcagtagccaagtgctgccagccttcctggcgccacctctccctgagccagccaagggactccaggctccaggcccatatgagcccacatcccgtgaacactggagggcaccccaccattggaagaaggggggtgcctttaggaccatccaagtgagccccccagcagctagagggaggccaaggggacagtttgacctccatctccagtcaactccggccaattccctgtggctgggcccttggagccttgttcccccaagggacagggttagggagctggtcaagggttggatgtgccaagccctcatgggggtgaggccctgaggggtgggggaagccattatctccagcctctgccctctgctccccttcctgccatccagccagcaagcctcttcccctcttccctgctggtggggtgtgatatgccaggctttccctcccagagctgctgtgcggcagagaggcagctggcacccttgtgatccagccttccctgcagcgggactccaggcttctgggaacaggcactgggactttttccccccacagccttcttagcgtctaatccgtcactgacttgctgcccagatctcggcacttaagagaagtttaaacgaaaaaaaattttttttgagacgggggtctcactctgtcgccgaggctggagggcagtggcatgatcttgactcactgcaacctccacctcccgggttcaagtgattctcctgcctcagcctcctgagtagctgggatcacaggcacctgccaccacgcccggctaatttttgtatttttagtagagacggggtttctccatgttggccaggctgctctcgaactcctgacctcatgtgatgcacccacctcggcctcccaaagtgctgggattacaggcgtgagccaccgcacctggcctatattgtcttctttctggagaatttgaatgcctccttgaccacttccgctccttcatggcagcactgcccactccagggagtgccactcccatgagaggctgtgcccatgttttctgcggagttgtctttgaggccctgaccctgcccagcattgagcatggctcctaggacttgatagagcccgaaggtttgctgagagctcccaggatggaagggccctggcaacgacgcggttattcatctatctggccaagacatccactaggtgccttctgcaaactgagcaccttgctaggcactgtgggatcaccaaatggggagggcagcttccgccttccagagtggacggcatcaggccctgctgggagggatggggctggaacccacttctctgtggcatgtgccagcagcgggccccacctacggtttggcccatggagatgaccgtggcccttgcctggaggctagtctgaagtcaggcttctgccagccttctgcatctggtcaccaccctgtgactgtgacacctctgaaatgactcaggcgactctggtatatctcctggagtgccacacaattgtccatgggaggtcacagtcactgctcctgacatccaagacaaaccgagggctgcagcgtggctttcagttgaccctaaccctgcccccctcttccttctcccaccccaaactgacaactctttccccagcccaataagaatgaacacagggaggccacgattcaaccaagtacaaaggcagcttgctttattcttgagatgcagggggggaaggggtggtgcagtctgtctgcctccaatctggggctctccaagcctaaggggcaccccacaggcagcctagttcacacgtgcaaatcctgaggaggttgggggcctctccttcccagtcagcccaccgcctctcactggggtccaggttgcggatcgccaccaagtcctccccaggccgcatggcccgaggtcttccactgctgctcatggggcttggtttctagagccctcaccatctaagcaccttcctcagttcactcagaagagaagcccctgctccagatggtgtggggcgcagaacgggctctgtgacttcttggtggacaccctgcaggacccctccgttcctgcagtcttgctctctctgagtcactggggaaacaggtgccccccagaggctccccgttcccacacctcagagtggaagccaccagaacagctgcttcccattcctcccacctttccctccccttccctcccatccatccccagccctccctcccactcttcctccccaactcccttcccagccatcagtggagaggggagttccacttctgccaggctgcctgaaggagctgccagcccccagggcaggtccacaaaacaaaacaactattggcaagcacagaaagggagaaaaaccacaaaaatcaggggtgcctttgtctacaaataactgcagtgcgcagcggcggggagaggccgcgctcagcagcgaagccggacactctcttgtgctcctttcagctcagcttccctgtctgcaagtacacgggtcgggtggagagagcactgggtgtgtgtgtgcgtgcacgtgcaagcacacgcaagagcatgggggatggggaatgcacacgcacagctgaaggggtgcccatcacaggtgtgcccccagtgctggccactggcatggtcactttacttgggcagaaggaagaaaagcgtcccttctcctcaggggcttctctctgctaacaaagccctgtgcgcacacccagacgagatgtgtgcgtgcgcacagcgagcacgcgcgcgcgcacacacacacacacacaatctctataggagagtgagggccggggccccagggggttccctgggcctgggccgtgtacccgcccgggcagctcacacggtggtgactgagagaagagggttgtagacccgcttgccatcggcggagcgcgcgccgtgggccagcatctcctggatggtgatccagttgtccaggatcttcttgttccgcttcttcatggttttgcggtggctcagggcaatgatgttgagctcgggcttgctgtcgccattctgctgctcccgcaggcactccagccggctctgcatcatgaactcgcgccgcttccgctgctcacgggcccggatcaggtgctgcttccgctcctccttgctccagtagcggcccatcttcatctcgctcaccgcgtcgtcgtcggtcgtcataccgctgcgctcctcccggatcttcagggcacgggctttcagcagccgatctcgcacgggccgcttggccacgtagcgggttccgtcgctgcgcaccttcactttccactccatgcgcggtgcttcagtggccgcggccgccaccccgcccacccgagggccaccggccaagctcagggggccgtggcccagctcctccaggcctcgcgtcggggccagctgcacgcagctgtggtagtgctcgccctcctggccctggccgcggtggcgccgcgagaggtaagggctgctttcagggcccacacgctccagggtcaaccccgtcttggggttgcggcggccgcgctcctccgcgtgctgcctccggccggcctcaggatcccgggagagggaccggaacttggcggggctccccggtggaggagctgccttggcgggggtggcaacagcggggccgggaggggtccggttcaagttggagttgccggccatggcccgccgcagggggctctcgggcaggggctccacaagcagcggggtgctgcggcagctctccccagtgttgtaggcgctggtgctgtccttgtccgacttctcgggcagctcggagatgtcggacagctcgtgcttcttgggctcgctggccgccaggtcgtagaggctctcctcctccagcagccaggccttcatgcagcgctcacgcagctgctgcatcttctgcgcccgcagtatgttgcggcacttgaattccaggtgccttagctcctcctccagcatggccatctcgtggcccaggctctcgttgcggttgacgtccagggc

SEQ ID NO: 98099 - DNA, 36250 bp, Homo sapiens
tagctgggattacaggcgcccgccaccatgcacagctaattttttgtattttttttagtagagacagggtttcaccatgttggccaggctggtctccaactcctgacctcaagtgatccgcccgcctcggcctcccaaagtgctgggatgacaggcgtgagccaccacacctggcctattttatttattttttgggacagagtctcgctctgtggggcaggctggggtacagtggcaggatctcggctcactgcaacctccgcctcccgggttcaagcgattctcctgcctcagcctcccgagtagctggaagtacaggcgggccatcacgcccggctaatttttgtattttagtagagatgggattttgccatatcggctggggtggtattgaactcctgacctcaactgatctgtccccctcagcctcccaaagtgccgggattacaggcgtgaaccactgtgcccagcctattttattatttttaatagcatatagagtgacattttgatacatgtatataatgtataatgatcaaacaaggtaattagcatatccatcacctggaacatttatcatttctttgtgttgggaacattccaaatcctttcttatagtcttttgaaaatacacaagaaattgtagttaacagtgctcaccctacagtgcagaacagcaggatccattcatgctatgaagctggcattttgtatttgttatccgactcctccgaatctttccctactctctaatctttccagcttctaatacccactatgcttctatttccatgagcttgattttttaaatattttacataagaattaacacatacaatatttatctttctgttcctggcttatttcacttaacataacgtcctctaggctcatccatgttgccacaaataacaagatttatcttattagtttgtttatttctttgagacagggtctcgttctgtctcccaggctgagtgcagtggtgtgattgcagctcactgcagcctccacctcccaggctcaagtggtcctctcacttcagcctcccaggtaaatgggaccacaggcatgttaccatgcctggcaaatttttaaattttttttgaaagacagggtcttgctatgttgcccagactggtctcaaactcctaggctcaagcgaccctctcaccttggcctcccaaagtgctgggattacaggcgtgagttactgcacccagccaatagttttttattttttttattttttatagttggttttggttttttttgagacagggtctcgctctgtcacccaggctggagtgcagtggcacaatctcggctcaccacagcctgcgtctcccaggttcaagcaattctcctgcctcagcctcccaagtagctgggattataggcgcctgccaccacacctggctaattcttgtatttttggtagagatggggtttcgccatgttggccaggctggtctcgaactcctgatctcaggtgatctggccgtcttggcctcccaaagtactgggattacaggcttgaaacaccgcgcccgccaacagtttatttttaaatggctcaataatattccatcatgtatctataccacattttctttacatatcaatccactggtggacacttagattgcttccatatcttagctattataagtagtacaaaggcacgaagaacctacattggggaaaggatggtctcttcaataaatggcactgggaaaattggataagtatgtgaagaagaatgaaaactaggcccctatctctcaccacacacagtaatcaactcaacatggattaaagacttaaaagtaagacctgaaactataaagctactagaagaggccagcgcggtggctcacacctgtaatcccagcacactgggaggttgaggcgggcagatcacttaaggtcaggagttctagaccagcctggccaacacagtgcaaccccgtctctactaaaaatacaaaaagtagccgggcgtggtggcgcacatctgtaatcccagttactcagggggctggggcaggagaaatgcttgaacccaagaggaggaggttgcagtgagccaagatcacaccactgcactccagcctggggcgacagagcaagactctgtctttaaaaaaaaaaaaaaaaaaaaaaaaaaaaaaaggctgggtgtggtggctcacacctgtaatcccagcacactgggaggctgaggcgggcagatcacctgaggtcaggagttccagcccagcctgtccaacatggtgaaaccccatctctactaaaagtataaaaattagccagggtggtggcatgcgcctgtaatcccagctacttgtgagggtgtggcaggagaatcgcttgatcccaggaggctaaggttgcagtgagccaagattgtgccactgcactccagcctgggtttcagagtgagactgtgtctcaaaaaataaataaataaataaatacaaataataaaataaataaaataaaactactagaagaaaatggggaaatgctccaggaaagattttatggctaagaccccaaaatcacaggcaacaaaaacaaaaacagacaaatgggagtatattaaagtaaaaagcttttgcacagcacagaagcaatcaacaatgaagagacaatataggagaaaatatttgcaaatgattcatgtgacaagcactgtttatttttgaggtgcaatgtccatctgccctactgcaatttaggccccaaatgggtgggacagggtctgattccttgctcttcctcagatgcccagtgaagccctgctcaatttcaattcaattatattaaagaacaaagccagcacctctgctcccttttaccagtcctgtttgctatttcacttctcaagcaggtcctggggcccaccgcatcctcctgggcctcattctcagccttcttgccttggagttccgttgctgaggagggccaccaggcttggcatgtgggtgccccattgccctctgaagcatggtgttgccacacaggaaccacagtcctcactatcactccatacgtccttgcttcacacaagcctgccatctcagcatggggcacccgaactcctcctgccccgtcctcccagtcaaaaaagcctctgggtccaggggtgtgcacaccgcagccccagcatctttgagcagccctggatgggatcatgtctgccctggctttccacccttccatgaccagcttcccattccatgtcctggatcatgtcccaaagtcttggccagacttaaagtgccatccccatccagccctgtgagctcctcaggcccagctctgtcctggaagccctttgcccacttcgcctggccattgcccttgactcagctgtcatttcctctcaggcacttccccgttcagctcctgactccagctgagacaccagctgaggccccgcatggcgtctacaggtccttccctgcacccacctagggccccatggcacccatgctagtctgaccctcctgcctgccagcaagcagggcggagagctggaacaagagtcaaacactgtcaacttgatcgaggaagaactccaggaagggcatggaaagcaactcctctttccggctgcaggggttcagtctatctgaccgggggtacgggctgacagtgaccatgtaatcaaagcacctgtccaagacccccaggaaaaccgagctggttaccttatagcctagcttccctgtacctttgaattgccatgatccttattatgtgacactcaaatctcgtcacagcttcccccagcgcctggcatgggaaagccaacacctcaacagcactggcccctgggtctggggtctttcagggaagccctgggaagcctgacaatctcctggctaaaggccccagactctcccgcacgcgtttaaacagcaggcactgtcacctccaggcctttagcatttatggttagttatgtcccccgctccgcatgacctttcttgctgtctttctgtggataaaggaatatcaattaacattaatttagcttctggactgattccaggcaaggcccttggaaaccagcagctgcttttgtgtgtgtgtgtgtgtgtgtgtgtgtttttgagacagggtcttgctctgtcgcccaggctggagcagtggcgcgatctcagctcactgcagccctgaactccctggctcaagccatcctcccacctcagcgttccaagtacctgggaccacaggcgtgtgccaccatgcctccgggtctcgctatgttgccccggctaggctcaagcaatcctcccacctcagccttccaaagtgttgggattacaggcatgagccaacgcatcaggccttagttttcttatttaccatgggtgggggacttggggacatatgtgaggtaactagccaaggtcacaaagagcaggtggtggcacagacaggcaagaattcttctctttgtcccttctcaaatggatacttccaactgcatgaactaaaacacagacgattacaaaatacatgtaatatgttgagaggcgactttaaaaatattgttgaaaatgtgtgagagggtgacgtgtgcttctttactaacgcattaaattacaaggtcttccagcaggacgcataacttcagtaacttcaaagtaataattctgcccgccggtagatctggtagatcttgtaatttaactgaacttctagacgtttacaacaaaagccacaggctctgacaggaccggtctgtccatttctactggcgactgccgctcccgggcagcagcttgggtccccgcgctgcggcctgcgcgtggcagggcggatgccgccgccgccgccgccgccgccgcgcccgggcggcctcctagaggaggcgaaacgtgggggcgaggccgggacccacctcccagggctgcggtgagcacttacagtattggcgcgaaaaggccagctatcaccatacgggtatttcgcctcactcgcctcgctgggggaaattcaaatctccgaaaagggaggatccgagcagcgccggtgcgcctgcgcgcagggcgggactcgaagcctgggaagcgggcggggcgaggtgacgcgagatgacgcggacgcctcccgcggtcgcccgcccggctcgtgcgccaccggcccgactgcgggcctctcggcagtgggggcggccgagcgcgcggcggtctggggcgcgcggcccggctcattttgctgcggcgcgggcggaggcggtggcgcccgagggcgggccccgcagcctgggagcctgggagcgggcggaggctccacccccgggcgccggcgctcggctgcgtcgcctcccactgtcgccccgcccccggctcccccgcggcgcgcctcgggccgcctcctgcggctgctgggtgtgcagggcgcgaaaatgctcgcttcccggccgcaggcgcggctgcagtggctgttcgccaaccccggccacctgcgtgccgctgtccccagtgctggttaaaggcagttcttcgggcgtgcgtcccttatcaacccgagagaccgttcccaagggggcggggccgagcgcgtcggaggggttagcagtctcatccgggcatttccgaggatgccgccgccgccatctttgttttgtgctgaaagtcgctattgacgcccgcggacggccgggcgaggggaagtggcaagatggcggctcccagggcggaggcgtggaggctcgcccggtgggggggccgtggggcggggcgcgcctgcgcctgcacctgatctgagcgcgactcgagctttagcccagcgcgcggcagcgccgacccccacccccgccgcgaggcagcgcaggggtcctttaagaggcttgggcccaggggcgaagcggtgcgagggcgagtggggggaagcggtgacgtcacccggctccgcctcctcgcccgaccgccggcgccgctgccgccatgtttagttgttacttcttcacacaagatggcggctcccagggaggaggcatgagcgccctgccgttaccgcttcttctgccgtacagttgccgcttcggggcctaactctagctctttgaagcggctcctgtgggaaggagtcataaggcgggaagtgaggatcggacaccgccttgagtttggtgtgcagtggaagaactgacctaggaggaagagaataggggggaacggggagctagtctcaagatggcggctcccacggcggcaggcgcagcctgagcagcagaggcggactaaggggagaggcgcgagacttcacaagccgtacggcgcgagcccccaaacggccctcgagagctcgagctggttccaccggcctccggcccgcctccattcgttaggtgtgtcgaggctgtttcgggagcggcggctgcactaaggcgctgggcggggaagcgggacggtctcaagatggcggctcccacaattgtggtctgagcgccggcggggctgcgacgaccgcggcgcttgtggctcctttccacccgccccggaagccggccagtgctggggacttgggggtgtgggaaccgggccggggctccgccatttccggcgggggagggctacgactgaggaagggaggagagagaggcggctcaagatggcggctcccagggcctcccgcccgagcttgtaagcgggagcgcccggacaagtagtcggggcgacgggactcagcggcctccagcttcttgagcctaggcgctcgacagtttcgggcggctcttgcggagacggggtgagcgagaagaaagggaagagccaaagggaaggagggcagttaagatggcggcctccatggagtcgtctaccgctgtgtgagaaaccgcttctccgtgagagctgccttagacgaaagggggtgtgtgaaaggaattgaggggctcccttcccgcttgttgacttctccccaccgcaccctttcccggaactatggcttcggccgtgtcgcccgccaacttgccagcggtgcttctgcagccccgctggaagcgagtggtgggctggtcgggtccggtgccacggccccgccacggccaccgcgccgtggccatcaaggagctcatcgtggtgtttggcggcggcaacgagggaatagtggacgaactgcacgtgtacaacacgggtgagtgcaaagcccgctgggtcttcggctctttccctccctccatctcctccctctccctcctctttcctccctccctccatctgctccctccctctcctccctccctccatctcctccctcaccctctacccttccctctctctctcccctcctcccttacccgtccttctcccctctccccgtccccctcccccttctcccctcctccccctccctccccactgatcggcttgcccctcccctttgctgtgccgggcttcagtgcttttctctgatcttctccccgttcccttgtctctcccgtgtttgaggattggttttcgttagttaaaagaaagcccctagtccgactggtgagggagaggggctgtcgccagcggtggtgacttcagacccacaccgttacccagcgggctggggctggggctggggcgggcggatgtgtccccttggcgcaggcagagctcccctccctccctccctcccttctcctgcgcctgctcagctctccctcatctcgagtgcccattctggagaaatgaccatttctagattacagattcgttctctgtctctcgaaaaagggagggaagggaagcgctcttaggacgcagagtttaacatccgccgacccgggtaatgccggagccttggggacccctaggacgggccggcggcagggccgcctctccctttccacgtttacttctgcagcatttctttccaagtcgccccttctcctaatctggtgccttctggtttacaagctgaattccagttacccctcagcggcctgcgtagtcgtgtgtctccccgcttctgcggatccagggggttaccccacccgctcttctgcctccctgcaaaacccaaagcccgttagttgggaaggggaggaacctctctcttcaggtatggctgatgcaccacggccttcgtgggggccgtttgttgttgcctctgcctagtagccttgcttagtctctagggcagaaagcctgctgctgtccacgacagctttgtggcatcctttttcttggtggctacttggcccgttttgtgcccctagcacaagggtcagttcccaagttgcctactgactgcccgttggcccacaggaccctggccttgcccagaaggcagggtcagggtgagttcggtcccaggcaagagctggaagagtctgggtgagggaaaagccccctgcaggcggctgggggagggccttgggatgccctagtcctgagtggcaggcacggctcccagcactaaccccttgctcygcggccgttctctcctgggggctctagcgatcccctggcctcggtggtggccctgcagacaaaccctcgctgagtgggctttgtgtcctgagcggtgagaggctgctgttctttggctgagctccagtgcctcgatgctctgggggtgggaagctggagctgcctggagggagaaagttggtttagggagttgggaaggctggagctgggctcttgggtgccgcttccttccccaccccccaaggcagaaagtgctggtttctccacatctcggagattatcgccacctaccacgttgactttgaaaggctggtgggttgtctgtgaccgtttttcgttccaggtctctcagcacctgttgcctccagggagcagggcctttctcagcagcccccgggcgggggcgcttggtggttggtggtgccccgcgccagcccaggcagctgcagtagcaggaattagctcagtaagctaaggcttctccagtggtggggctgtttatagaggcaccgtcaccatgagcagcaccttctccactctgtggaccgactttcttctcataaggcctggagcaggctccctggcagggaaatgcaattttagaaagtagggcaggggcctaattacagtcggctccagagtccaccaccactgctgccttggcttcctggggcctctgcatattcattagtttattaaaatgaattgaccactttggcatgaattcattaccagtctgcaaagacaggttgtgcattagaggggtagcctgccttccaaagggctgcttaaaatgaagctctgggatcctccagggtagcagtttggaaactgtcatcggcaattcctcagacgagagagcagctggcagacctgaagccctcttcctcaccggggtttctgccccctcccgccagcccggcctcgtcacctttgtcttgtcttcttttgttgtgtttgggatgagatcagggcatattctcacgcctgtgccccttgcagttctgcgggatcagtcctcaaaaagccttgtacctttggagagagctgatctggaaggggttccygttgctaggataagaaagcttcagggggtgtgtgctttgagagctcttagggtagctactgtgcttgtccttagggaattttagttccatgtggcaagccaaaggattcagagtgctgccaggtgtggggggtgggggagcgagagctttggctacggtggctctgtaatgtccataggttcttggagctggagggagccttggaaaatacctagtggaactacttccttgtttctgcagatgaggaaattggggtccaagaggggaagtgacaggtccagggtcgccctcccagctggtggcggagttgggcgggagtgcaaaccttcatagaggccgttctgccacctgtctttggggcccatcacctttgaaatgcctccattctctcctctgtccctgtatctaattgttcattgcgttgggcaggcatcaaatgtgtccccttccacaccaagccctcctctcctcttactagactcttgcagtcacttcctgattggccctgctagtttcatttgtcgggaaatcctgttcacccttcaaggcccggctgaaacgtcacctcttctgagaagccctttccactcctgtcctcccctctccagcagtcgcactgctctgtgctcccaagggcccggcttggtcagagctcttctagggtgtttgtctcatcgtgggakgggggcatgcagccttcctaccccattgggagtatgagcacaagatcggtgtcctctgtgcctcccagcacgtcgtatgccacacaggaaatgctctaatgtgacaggtagaacagagaggaaggcagctcgttgaacttgaccggccacctcactgcatgggcaccagtctctaggtggtgatgggacagtggcaaccagggatggagcttgcagagcatgaagtggttgggggagctgatgaaacacagagaggccggggcacagccttgctcaggagaggggagctggagtggtcttcatctagtgcagggtcctttccccaccttcccctcccagctgagagccagcatttccaggatgaggggcccaaggattgggttacatgacaccccccagatgattcagrggtgactgagagcagctgtcacattgaaaagctgggagaagggaggagagcttgctcgtgtgctttcagggggcggaaccaggactcgtgggtgagatgaggagccgcaggtttgtcgtcacaccaggagctgtgctccctgacagacctctcttgacgggggtggggagggcccctgccctgcctggagtgttctagaatgagatcagcacctcttgggtcctgtrgaaggatctggtgagcgggatccccaaagatatcacagggcgcttctggcctggcccaccggctcactgatcagcgtgtgataggaaagctgcccactgaccccacgtgccatttagctttgtcccaaactctgacccgcagccccatagctgtgggctttgaccacgagggtgctcaggggagtgagggtggctgcctggacatgggaccctagggaaggcacagatcggttgcttcaagtcagtgatggggctgttgtctctgtctctgttttacgctgtgacctcaggtgtcgcttgccctcctgggctctgcccctttacctaccgagagcagttggcccaggcagccttaggtctcgttatgcgtttaccctggtagcttgcatggagctccctccagggattggtcaggacggctctccagtgcgcaaggctgttggccttggcagctcttgcttttctggggtggtttttgcactgggaatgagaaagaggcagagggccaggatccgagcttgcacatgcgggcggcacaggtgttgtccctctgctttagggaaatggcaggggagctctagtgctcggcatgtccgaggcccagtgactcagctgaatggctgcagaggctgtcagcctgctcgaagcctacccgcagagtgggtgctggagagcggggtgggggtgctctcgcctcaggaggagcggtggtggtacagttgtgctgtgtggggttttctgttttttttgtttgtttgtttgttttgaggttaggtcttgctctgttgcccaggccgggatgcagtggtgcggtctcagctcactgcagcctcaaactctgagggtcaggcagtcctcccgcctcagcctcctgagtagctaggaccacaagtgtatgccaccacactgagccagtgttttaaaattatttgtagagacggggtctccctgtgctacccaggctgggagttgtgctttggataagggctagccttgcacacggttccgcattgagccctgggggtgacagtgtgagactgggtgggaccagagtgcagtggggcatgcattcccraccatggtcagccgcctggccctgggtgcacacctgaatatggaaaaaaaacactgtttttcctcttctatggtctcacaacacttttggccaccaaactgaatagtctgtattatatcacaatatcacagcatccctgtgtggaagccttcccaccccacaggaatccccccatgccctgtcacgtcctgggggacccatcttgcgtcttgagtcatgtggaggggcctcagttccttctgccgtctgcttgctgagatctcacccaggccagctcagaggcacagagtcggggttgcacctggcccccagtttggggtttctggaaagagtgtggtgaatcctctgagggacccctcataggaggaggttttcggggaagccctggcctgccaggtgtgaggggagtcragtttgaggacatgagggaggggcctggtcccagctgaaggctggctgtgccatcctgtggaagcaaagcagtgcctaaggtctgatttccctctttcttggtggtcgcctcaccctcatgagcttttgagaagcttctgtcacagctctgctgagactgctgcctctggcttgcaagaatgttctggagtaccataggtgtggcagcaggggcagggagggatgctggtggaccatcacctaggagaccagaggaagtccgggaggtcagagcagaggccgggtctcatccccatggctcttcgtagcctgcagcggtcactgttttggccacttgaaagtgctgctctgggctctggctgtcctgaccctgtgatgaagggacaaaaatgtgggctccagggaggaggagcacaggcccaccaagagggtattttggggagaaattcatgtctgatcactgagtgctagggaaggaaggcagtggctagattcccagtagctgatgagggatcttgcacagtaacttcccgytcattaagatgaccttggcgagaagcagggtggtcacaggctcttttgcactggcctgaagtcgaggggtttggaagatggcccaggtagcgcagctggagttgctagagcgcccgcagggatggtgctggctcagcccctctcaccaagcttgacggctggcacatttggggaatgagaggaatgggggctcccgggtgttctgacttctgcctccttctgttccccagcaaccaaccagtggttcatcccagccgtgaggggggacattccccctgggtgtgcagcctatggcttcgtgtgtgacgggactcgcctcctggtgtttggtgggatggtggagtatgggaaatacagcaatgacctctacgaactccaggtaaagcagccccaggttctcactctgcctccttggccccatgtgacctgacggtagtggcttcagggttgaggcaagcgggaggtggaagggacgcttgagagtctgccaaggcygctctgaacttggcccacctcagaagaaggcagcaaggaccaacacccaggaccttcttgctccagcaaggcacctcgctcacccccggccatttcctcctccaccacaagttgccccgggtccctagtggtggccttctyatcccacggttcagtctccaggtcttgattttgcaggcgagccggtgggagtggaagagactcaaagcaaagacgcccaaaaacgggccccctccgtgtcctcgactcgggcacagcttctcccttgtgggcaacaaatgctacctgtttgggggtctggccaatgatagcgaggacccaaagaacaacattccaaggtgaggcttggtccttttctctggaamcccccgggtgggtgtgctctcacatgcacagggctccatggtgtcctaaagaatgtgcgcagcagagcccygtggccgggtccctttctcgtgctgggttgtaaatgagagagcggcaccggatgccctctcaggagctttcgggctccaaaatcgctactgaccctgagcaggcctcgtgggaggagggccaagctggaggtggaagccactttgccttgggctggcccagctctcggagtcggcttagagctgctcgcgttccttctcagcctccgctgcctacaagtttcctgatgggtattttccaaggcccgtggccaaggactctctgtctggaggtagtcccaagccagcgccccctcttgctctgcggagccctcatataatacccagctttgtgtgcatggcgggggcctgctgctgggtctggactcggggctgctgtgcagcctcacccaccctgtgtcccctgttccagttggactcatcctagggagcttctggcagccccttcctcaagagctagggtagaagaacttcagagctcccacagccctagcccctttgtgttctggggaggctgccactcactgatagccatccagcgaagcctctggcgtgaggagtcgagacttgccgtaactgatctttcctcgtcaggtacctgaatgacttatatatcctggaattacggccaggctctggagtggtagcctgggacattcccatcacttacggggtcctaccaccaccccgggagtcacatactgccgtggtctacaccgaaaaagacaataagaagtccaagctggtgatctacggcgggatgagtggctgcaggctgggggacctgtggaccctagatattggtgagcagggtggtagcaccccagcagccatgggacaaagcgggtctgcctcttggctggccccgtggrtggcgctgttgtatggtgaggtggggctcttagggagctggagcataccacttcgtgctttcctcttgtcatggtgggccagggtggggaaccctggatcgtccctaggtttggggctgttatctctgccctgtgctggctgagtgggctgaattggtctgcgggcttataagagaataagtcattaaggctttctagaatggaattctctggatccgggtagcattagtccctcttgactcgtcagtggtcagactgtgtggagtgctgcatcctggtctgactgctgtggtaccattggatgccggtaaaccgtgaggccttcggggactgcttgggccggtcaccaggtggtggtatcaggagtggctgggaaagattactaactgtggatctccggaggcctcttcagctgggagagaggagatggcgatgttgtcctatagatcagagtcggcactccaaagaagcagtttcccgtgagagaattttccaacagtttgccaaaatgtctgtagcctaaggtggttatggcggtgaacgtatttcatggagagttcggggtgtgcccaccactcctcccccagcacagagtgcagtcctggctcagggcaggtgctcaggatgtacctgaaggagcgctattgctagcctggtcgaaaccgcctgggtaacacaggaatctagctaccatgacaacagtcagagggcctsscgtaggctatagggaagccagggatggaattctstcactgagacagatcctaccttcctgagctagcttgaatccagggaacgacctgtgtgcagtctaccttgtgtaaccctttcccctcygtctctctgcagacaccctgacgtggaataagcccagtctcagcggggtggcgcctcttcctcgcagtctccactcggcaaccaccatcggaaataagtaagtggctgctcacctgcgtctctcttctctagactggcgtggcccctcccccgaagggctctcactcagttttgtcctgtcagaccctaaggcctgaggatgcctctttctggctgggctggcatttggcagccctgtttttccattacgaccctgggggaccaaggaaagacagattcaggggggagagggccacacacaagctgagtctgagaccctccccgggcctgtgaggctccgcccyatcaggtacagagtgttctaggtcctctgtgcaagcacctgggtgtctttgtggatgtccaggtcctaaagggaacctagaaactgtggacatgaaggtgagctttagatgagctgaacggcacttttatgtggtagaggtgacacagttctcctgagggctgagccaccaggcaggagagggccacgtcaggaggcttcacgcatccttggggactctcctggggagagccagaggactgagctctagaactggggtagcagaggtggcctctagcttggcaccaactctacaatcctttcccactcttccctcctcactcccagaatgtacgtgtttggtggctgggtgcctctcgtcatggatgacgtcaaagtggccacacacgagaaggagtggaagtgtaccaacacgctggcttgtctcaacctgggtatggcctcctcgggctccgagtggcctgtgggaggctgcaggaggctggcccttctcagcctaagagctgtgtggggtgtgcggggagcaagctgggcccccggctccctttggaatccactggaaggatccagtgggcagagctctctgaagcaatgttcygcctctgagttttttgaatgagctctccatccaaatggcccaacatccaaaagtgcaaaagcctctacggtgcagggcctccttccctcctcccggttctccggttctgcttctcagaggcagccatgtgggtggtttcctgtccaccctgcaggggctcttcatatctgagcattagccataggtccctttaaaaacaaacagtggcagcctggcgcacgcagtscsacacctggcctttctcatccgccgtatcttggagatcactccacgtccctgccccgcagcagcctccttcgagttgcggttgtgctgctgtaacttgtacaggcgccgctccgtgagtatccttgcaccrtctccacccgtgtgcaagtgtatcctaggggtgaaaacctagaagtagggttgctgtccgatgcggctgaactgccctgcacagaggctgtgcccacgtaggcgcctccagtggtgccctcacggaatggtcaggccactctttgccaagcctgatgggtggccgaagctccccctccggctcaccttgagccccagctgctgcgggcctgaaaataaaaatgccaggcgccgatggttgaagtttagatttcttttgcgtgagagtgtgtgttttttcttaagatctttctatcacgttttccctaaaccactttcccattgccgtctctttctgtgagttgtagtgttctttaacgggcaaggaggtaaacctctgactgtgtttctcatggttttcttagttggccgttggtggtttgtaattttattttttgtgttgctttttgccacaaagggtttctttgttttgttgtttttaatgtaataatccaataacttcttgattttaattcccatccttgacaacaaaagaaccaagggcaaccaggggtggygggtttcctccatcctccttgctgacctcccttgtctgccctcccccagataccatggcctgggagaccatcctgatggatacactggaggacaacatcccccgtgctcgggctggccactgcgcagtcgccatcaacacccgcctgtacatttggagtgggcgtgacggctaccgcaaggcctggaacaaccaggtctgctgcaaggacctctggtacctagagacaggtaggcccggcccagccgactcccctcctcccatagcctcccgccccttstsaccaactgcrttctcccacagaaaagccaccacccccagcccgagtacaactggtacgcgccaacaccaactccctggaggtgagctggggggcagtggcaacagccgacagctaccttctccagctccagaaatatgacattcctgccacggctgctactgccacctcccctacacccaatccggtcccatctgtgcctgccaaccctcccaagagccctgccccagcagcagccgcacctgctgtgcagccgctgacccaagtaggcatcacgctcctgccccaggctgcccccgcacccccgaccaccaccaccatccaggtcttgccaacggtgcctggcagctccatttctgtgcccaccgcagccaggactcaaggtgagccaggggaccagggacgtttgaaagtagggggctagcctccggggagaggcagcggccaagtaggggctgcgagacggcagcctagacagcaggccagcagccgggagctttgggcttgtctccaagggttgtagggggatgctaaagcctggccccacctgtggaaatggtcactctcagggcacagagaagagccagactcccacacaagcaggccaacagaagtggctcagggctgcctgcaaaggggctggggacatcgtrcagaaggtgatggctgacggctggccccttctctcatcaggtgtccctgctgttctcaaagtgaccggtcctcaggctacaacaggaactccattggtcaccatgcgacctgccagccaggctgggaaagcccctgtcaccgtgacctcccttcccgccggagtgcggatggttgtgccaacacagagtgcccagggaacggtgaggagtggtcactgggkcgggtgkgatttcctgttgatccagtggattaagttgcaagtgtactgaggggttcacatccctctcgggctctggtaccacgcaccccacacctttccctcctgggacgtgcagatggggaaacgctcctgcgaggtcatggtgggaattaataggttaatgcctagaaggyctaacctgctgcctgatcctaagagcatttgccacgtggactttcttgtcctgcagcctgagaggaggatctagccagctgggcttgccacaggcccatgagaatcaacggracctgactctggtctttagaaaggatccagagctcccagctgcctcttgccacgggggttgccgtgcatggtgggtggtgggagccctctgtgtctggggccaggagagcggggtctggcagtagagaaagctgagccatgctggcgggatgaggctcccaagagcagggcagcccctgggcaggttccggtgaggtccaccaagcagggaggtgggtggcwcctgtgacctggcctcacatgcccgtgcctgctgcaggtgattggcagtagcccacagatgagtgggatggccgcactggccgctgcggccgctgccacccagaagatccccccttcctcgssacccacggtgctgagtgtcccagcgggtaccaccatcgtgaagaccatggctgtgacacctggcactaccaccctcccagccactgtgaaggtggcctcctcgccagtcatggtgagcgtcttccggggcttgtcactgtggtcaaacaagcatagtcattccctccgggctttagagttagccgttggaccgtgggctgcagaataagctgtctccattaggggcgtcatggcctcaggtgagagctgcaggctcagcctcctcccttgcctgttaaaggaagggggaaccaagctgttcttgggcttgggagcaggaggaggaggaaggtgagtgttgaggcaggagctatgggcccaccgtggacatcttgggtggtttccccatcgctttctttgcctggcctgtcactcgtctctgcctcctccaggtgagcaaccctgccactcgcatgctgaagactgcagccgcccaggtggggacatcggtttcctccgccaccaacacgtctacccgccctatcatcacagtgcacaagtcaggcactgtgacagtggcccagcaagcccaggtggtgaccacagttgtgggcggggtcaccaagaccatcaccctggtgaagagccccatctctgtcccaggaggcagtgctctggtgagtgatgggtgctgccaggctacggccactgccagtggtgaatggccgccctgggccagctccaggagagtctcagccaggccatgyccttgtttggtttccagatcactccttgctccatcccttcctttttagatttccaatctgggcaaagtgatgtcggtggtccagaccaaaccagttcagacttcagcagtcacaggccaggcgtccacrggtcctgtgactcagatcatccaggtgagctctcagtctttgcacatacgcaagagtgggggcctgggtgccaggccacaggaagaactcatgtccctgcccatggaagatcccatgagcacacatggctcagcaagttctgctgctcactcccctygcccacagcctccagaacattccctgagccgccaaggctgccggcggagagtagccagaccacacttcccttcctggcagtgatgccggctcatgcacctgcttccccctttcagaccaaagggcccctgccagcgggaacaatcctgaagctggtgacctcagcagatggcaagcccaccaccatcatcactaccacgcaggccagtggggcggggaccaagcccaccatcctgggcatcagcagcgtctcccccagtaccacsaagcccggcacgaccaccatcatcaaaaccatccccatgtcggccatcatcacccaggcgggcgccacgggtaggggcctcccccgacataygagtgtctgcaagtcctcactggaggggaaatggagtccgggttataaggcgtgctgtgtttctgtttagtttacccttttctatcttctccttgctgccttttgtgtctaagggtagtgaggagatgggcagggctatggctgtgacttgtggatgttcattatagtctaggggcagcaggggcagccctcacagagcctgtctcccctgggccccactctcccatccaggtgtgaccagcagtcctggcatcaagtcmcccatcaccatcatcaccaccaaggtgatgacttcaggaactggagcacctgcgaaaatcatcactgctgtccccaaaattgccactggccacgggcagcagggagtgacccaggtgaggcactcccagccgtctctcagcccagtgtcctagtgcagtccaccccagcacgccacgcaggtcctcccgacaggcctgggaggggcagcatcggtggcatctaccagcctggtggtgacgttggtggcactttcctctggtgttccaggtggtgcttaagggggccccgggacagccaggcaccatcctccgcactgtgcccatggggggtgttcgcctggtcacacccgtcaccgtctccgccgtcaagccagccgtcaccacgttggttgtgaaaggcaccacaggtgtgtacccataggccaggtyccctgccacccctagattataacgaagcagggctggccttcaatccccatggcacagctgggtggcacagcagctcctctctcccgagccttctatgcaagcagctccagagtgccccagcctgtgcaggaggagctgctgggaaggagacagcagcagccttggcccaactcttgcctcctttccttcaggtgtcacgaccctaggcacagtgacaggcaccgtctccaccagccttgccggggcggggggccacagcactagtgcttccctggccacgcccatcaccaccttgggcaccattgccaccctctcaagccaggtgatcaaccccactgccatyactgtgtcggccgcacagaccacgctgacagcggcaggcgggctcacaaccccraccatcaccatgcaggtagggcagggcctgaggccacgtgtgggcgagggaccccacacaagtggaagcacgtgaggctcacgccgtcygtccacaggcctttccttcctggtgttgcgctgctgccgggtgcagccatggcaggcctttcctcacctggggcattttccctggtgtcacatggtccctgtgtcatagtccgtggtttggctgtcatggtttggccatgcctggtgtttgaacaccgggttcttcctctcgcagtgttctacaggacgccrcagctcgtctgcatgtgtgtgcagtgttctgttcatayatattaaggaaaacggtgaaacgtttgttgttggcctttgagcattgagggggatttccattctctgacaaaggacttgacttcagccagcctcctgccttccccttgccctgtcctcacagcctcttcctcatcccagttgcctttgaggcaaagtggtgcctcttccctggcctctgagcaagtcagtgtcttgggggcaggggtgagtgggtcttacgtctgccagggccgttgagaagtggtcagtggtcccagcctgtgtggtgacagtgcaggacagtgggagggacaggcagacagccagctgcagcactaactctcctcctcgtgtgtctccccagcccgtgtcccagcccrcccaggtaactctratcacggcacctagtggggtggaggcccagcctgtgcatgacctccctgtgtccattctggcctccccgactacagaacagcccaccgccacagttaccatcgccgactcaggccagggtgatgtgcagcctggcactgtcaccttggtgtgctccaacccaccctgtgagacccacgagactggcaccaccaacacggccaccactactgttgtggctaaccttgggggacacccccagcccacccaagtgcagttcgtctgtgacagacaggaggcagctgcttctcttgtgacctcgactgtgggccagcagaatggtagcgtggtccgagtctgttcgaacccgccctgcgagacccacgagacgggcaccaccaacaccgccaccaccgccacctccaacatggccgggcagcatggctgctcaaacccaccctgcgagacccacgagacgggcaccaccaacactgccactacagccatgtcgagcgtcggcgccaaccaccagcgagatgcccgtcgggcctgtgcagctggcacccctgccgtgatccggatcagtgtggccactggggcgctggaggcagcccagggctctaagycccagtgccaaacccgccagaccagcgcgaccagcaccaccatgactgtgatggccaccggggccccgtgctcggccrgcccactccttgggscgagcatggcacgggagcccgggggccgcagycctgcttttgtgcagttggcccctctgagcagcaaagtcaggctgagcagcccaagcattaaggaccttcctgcggggcgccacagccatgcggtcagcaccgctgccatgacccgttccagcgtgggtgctggggagccccgcatggcacctgtgtgcgagagcctccagggtggctcgcccagcaccacagtgactgtgacagccctggaggcactgctgtgcccctcggccaccgtgacccaagtctgctccaacccaccatgtgagacccacgagacaggcaccaccaacaccgccactacctcgaatgcaggcagcgcccagagggtgtgctccaacccgccatgcgagacccacgagacgggcaccacccacacggccaccaccgctacttcaaacgggggcacgggccagcccgagggtgggcagcagccccctgctggtcgcccctgtgagacacaccagaccacttccactggcaccaccatgtcggtcagcgtgggtgccctgcttcccgacgccacttcttcccacaggaccgtggagtctggcctagaggtggcggcrgcacccagcgtcaccccccaggctggcaccgcgctgctggctcctttcccaacacagagggtgtgctccaaccccccctgtgagacccacgagacgggcaccactcacacggccaccactgtcacttccaacatgagttcaaaccaaggtaagtgaaggtggccagcctggctttcatggtctcccagccccccaggctgaaaggccaagacaacgatggcgggggtccgtccagagtycaccagtcaggctccttggcacccaatttaccagtggggagagctggggcgtcctggctgtacctgaagcagacagaggtctccaggagcctgtcctgccttatctggccctccccttggtggtagaggaagcctgtggtggtcaagccaagtacaggccgggggggctcctgctgascagccrcctgcctgtcgmccccacagaccccccacctgctgccagcgatcagggagaggtggagagcacccagggcgacagcgtgaacatcaccagctccagtgccatcacgacaaccgtgtcctccacactgacgcgggctgtgaccaccgtgacrcagtccacaccggtcccgggcccctctgtgccggtaagagcccagggsgscgtgttcttccccgccttcccggcctacgcccgtgcagttccacactcagacgccagatgtcgctcttgtaccaggcatggggccgctcctggtcccttttccggaccataaaagggcagyctcggtgcctgctgcggcaggaggcaggagcctcaccgtcccccgcatctctggggcgcttttatttctgggactggttctcatcgcgtgtcacttcaccgcagcctgtataagacatggcgggggtctgagtgcccatttgtccaggccagggtgactgaggacgggttaaacctgaccgggggtctcaagggcctttctcctcatgctggtcagagaaccactgtcccctccctatttaacatgggctggagctggcccatcaagaatgaaaacttaggcccacaaggaaaggtgagggctggcttgcttctcagccctgctgcctggctctggcccctctcctcccctctgacaggggcttctctccctttctagaagatctcatcaatgactgagactgccccaagggctctgactactgaagtccccatcccggccaaaataacagtgaccatagccaacacagaaacttctgacatgcccttctctgctgttgacatcctgcagcccccagaggaactccaggtgtcgccaggtcctcgccagcagctkccrccacggcagcttctgcagtcggcttccacagccctgatgggggagtccgccgaggtcctgtcagcctcccagacccctgagctcccggccgccgtggatctgagcagcacaggggagccatcttcgggccaggagtctgccggctctgcggtggtggccastgtggtggtccagccacccccacccacacagtccgaagtagaccagttatcacttccccaagagctaatggccgaggcccaagctggcaccaccaccctcatggtaacggggctcacccccgaggagctggcagtgacggctgctgcagaagcagctgcccaggccgcagccacggaggaagcccaggccctggccatccaggcggtgctccaggccgcgcagcaggccgtcatgggtgagtgccggtgcaaccctggggaagccgggccgctcgggggagcaataggccgcggagacagcctgggaagaggagcccatttccctcgagggtggcatgagccagatgtgatggggaggacgagcacaggggaccccaggcaggccaagtagtagagactgccgtgtagaacaggctggctggggttagcgcctgggaaacaggcagggcccctcggccagggcttagcctacagtggagcacggtaggaggtggacggggtctctaggacaggctttgggggcctccgcccgggctgcccgcttctggccagccttcctagtaagtagtgtttctctcgaccctggagcaggcaccggcgagcccatggacacctccgaggcagcagcaaccgtgactcaggcggagctggggcacctgtcggccgagggtcaggagggccaggccaccaccatacccattgtgctgacacagcaggagctggctgccctggtgcagcagcagcagctgcaggaggcccaggcccagcagcagcatcaccacctccccactgaggccctggcccctgccgacagtctcaacgacccagccattgagagcaattgcctcaatgagctggccggcacggtccccagcactgtggcgctgctgccctcaacggccactgagagtaagcgactgagggcgaattggtgctggggtggtggggrcacccagggaggtgagggcaggacgggaggctcggtctcacttgggagccagrtttcccgmgtctttcccgctgacaccttctttcttcctaggcctggctccatccaacacatttgtggccccccagccggttgtggtggccagcccagccaagctgcaggctgcagctaccctgaccgaagtggccaatggcatcgagtccctgggtgtggtgagtcgggtgtgttggggctcctgagtccgtggcctggggggcagcactgcctctaggtgckgagggcctgatctcgtcgcaccgattctgtcttgcagaagccagacctgccgcccccacccagcaaagcccccatgaagaaggaaaaccagtggtttgatgtgggagtcattaagggcaccaatgtaatggtgacacactatttcctgccaccagatgatgctgtcccatcagacgtaagtgtccccaggtgctgatgtcctcaggtgggtgggtcttggctccaccaccctgagcggggcttacaggaaactcctccatctttgggccaagctgagtagccaggaagcctgaggaaggtgggcagagaccatcccccctgaagcagtagaaaaggagagctttggttccttcccgccagtaccgggccacagtcagcctcgccacgtccctccttgccgtgaggggccagccaccgctgacctcttttccctctggcccatagttaccatggacctgcagtgttcctggggtggcccagagctgccttctccacagtggcgttcatgccactcctcttttcctaggatgatttgggcaccgtccctgactataaccagctgaagaagcaggagctgcagccaggcacagcctataagtttcgtgttgccggaatcaatgcctgtgsscgggggcccttcagcgaaatctcagcctttaagacgtgcctgcctggtttcccaggggccccttgtgccattaaaatcagcaaagtgagtcttgctgtggggtggccgtctgtccctggttggtttctgcctgcctcagcacatgaggtggccgggggggggcataggagagctaggttttgagtcccagtttgtcttagtccttccacttgggggaagatctctttgaagctccttgaactaccacatggaatatctctactgtgttagaaaatggcttatgggaaccatgattagtcagttctggaagcytctagcctgttctgttgaccttctgaccccctggcttctagagtccggatggtgctcacctcacctgggagccaccctctgtgacctccggcaagattatcgagtactccgtgtacctggccatccagagctcacaggctgggggcgagctcaagagctccaccccggcccagctggccttcatgcgggtgtactgygggcccagcccctcctgcctggtgcagtcctccagcctttccaacgcccacatcgactacaccaccaagcccgccatcatcttccgcatcgccgcccgcaatgagaagggctatggcccggccacacaagtgaggtggctgcagggtgagtgtccttcgtggagctcttcaggcacagggaaggcccaggaagccgggtgcagcaggaggaactgtcaccatctgagattttttcccatgtgcggcgtctccctgcttcctttggcgcgcacacagccccccacgggggtggccatcaagtagagcaggggacccagctccgggcctgggggtgcaggggacgccaccccaggatgtttgaggggacaagcagtgagagggctggcgggaaagtgtaggtttccaggcccgaaaacagcacgtcccaggtccctggagtgcagcaggtgagggatggaggccagcctgcctcctgtcaggtcatgctcctgctccagctcccctggggctctgggacctgggagggcagtgagaggtgggagctgagctgagtgggtttctaacctacgtccagaggggagtgagtggtgtcgtgttctggtcccaaggagtggcgtaaaaggtgaccacccatagggcaggcgccccacccttgccagctgcgggtcatgccatgtggcaccaagagactctgcaggcgggcagggcgcatgtgttccttgctctcgttctgtcacaatgctsstcacgcatctctcccgttccttccagaaaccagtaaagacagctctggcaccaagccagccaacaagcggcccatgtcctctccagaaatgtaagcaggaagcccctctcgggaaccttctgagactaggggtggaaatagctgggttcagcctcttgtcaaatgactgggggcccctaaccggccctgcaccagcagggcctccagtggtgcagggcccacactaactttctctttcctttttctgccttccaaggaaatctgctccaaagaaatctaaggccgatggtcagtgagaggaagctgactagcccctggattcttctccagacccccctgcttcaggaacacccgccagggcccacccctcccaccccgtcccagcattcgcacttcaccctcgcgagccgctgttcactcctctcccctttctctttctctctgtttttaaaataatctaaagaaagcacattttaccattgctgttgggaggaagcagaggcagatgggaaagcagagagaggagcgcgcttcctttcctccccgctgccgcccaccctggggagagacttttgcggggagggaaggcggasstgaggacagccagctccccctcccaaggctgtgcgttcctgagggccaggtcgggggcaggcatggaggggaggaaaggcgtccctcttggccctccccagagtggctttcctggcaccctggcctgggtgtctggttctgttttcttttcttccccttgtgtttccagtcacctaacttcccttcctcaggctcccccggcccaccctgctcagtgaccccacaggaagcttacacattttctcagaggcctttgtgctcccacctcttctaccctccccctcttctttcccattttaaaaaagaaaagaaggaaaaagaaaaaaggggcaaggagccccgcggcggcctgggcagcgcctgtgcagacctccctgcaggccgcactgccaactgctgcatttgttgtgytttttaggttgcaattggtgaagttcacactttcattgtaattttagcgtgtggggttttgtcccttttttgttgttgttagctgtgtacagaatgtgtaatcttttttcttttctcttttttttgttttgttttgttttgtttttgtttttttacttttttcttcttggctaattcttggcagggatctttctggaggaaaagctggggccagccagggcaggagaggtgtgaaatctgccacgaggggcctgctgtttgccacccagcccaacttcctgttgctggcccctgccctctgcccttttgcctgtcctcaggccgctggaacaaaggaaggacagctcattcctcatgggcgatcactccgcatctatagggtcgagcctaggggagcttgagggagggctggggcctccttgtcctggatttccagctctccccatgccccctccctgagcaccaccggcaccgcctcccaaacagggctgctggtttccgcagccactgctccacctcccccaaatcgtcatggaaagggtggagaatggaggggaaccaggygtccttggaggcagcttgggagggtgactgtgtagtgtcacccacaagggaggctagggcaatggagcaggccaccagcagcagctgtgcagcatggaactcaggccaggctccgaggctgggggatctgcttggagttttctgccccccaccccaaacttctgtcgaggagcaaggcttgccagcaagtcagaaggatttgaaccgagcagccaatctttccagccctcccctaccgacctctgcctggagacgcagcagcctgtgtcctccagggcctctggtttgttgtattatagtatatttcgctgtggaaaatgtcacgtttagtcaccttggagcccactcacctggtcctgttgttttaccccatyccttctctcgcgcgcctattgatttgtttctgaggagagtacaccgttcactattgtagagtaacccctgtgactcaatattaccatagtgcgatgtcgttttgtgctattttgaacaattaaaagactttttttgaaataaccactaggtgtctcactgtgtcccggcatcctctcaggaagcctgagcgggaaggctgagacctgcccgaggctcacgggagccccctggagggagacctgagctctggtgaaagcgtagaaggccccagagtgaggcctctgctgtggcctccggtctttggaccaagtcggaccagggtccagcaggttgcttggtagctgccttgcagggcaagggccaaagagccccttgggcagctgctgctgacttcctgtgtctggggcccagatctccctccctcccctcctgcactagaggataggatggggcaagggcctggcaggtcaccagcggcagcctccttgggtgggttggggggaggtgggctgagtcaagtacaccacgggtactgcagaggtggatcccttcctctggcttcctcttaaatgtgagccatgcccccaagggaagaagcaagagcttgtgatccagactgaccacctagcagctgggtcggtaggacagctgggatcccgtgggctgaatttgtaccaggaggcccagaaagctccggggcaaggtggccggagcagcacaggcctaggcgggtctgaggggagtgacaccctgcttctggggcctggtgctcctggcgcacctgcattccccgccccctccaagcccctgccgcctgcctttgtttcccctacacacctctactgcccagccttcctctcagagcacccaggcactccgctaccagaagctcctggagtaaccaaagcctccgtgtctccacctgtggcatgggtgtgtgtgcaaggccctgtcgaatgcgacctcttctgggaagcctctgtcctgtggggtctgctgtgtcatgtgggggtggggggaagcagactggccagggcttgacaccaggagccatggctctgtcttacccaccgcaccaactgtgacctgccttggagcctagcctcgcagaggcccaaggagaggggtgggaaagtgtccttcagagcagagcggtaggagtcatggctggggctggtggaggccaggggccacatggggctggccccagaaccgaggggccttgcggatttgccatacctttggcaaatggcgttgtgggcgcttcgcctggtgggggtggtacaaggcttcttcctaccccacttctgtagctggcacctgtggggctacccaccctccgcattccttcagctcacttgtctcaccgcggctgcatcacactccacaaggcaagggccacatcagtcatgcctctggtgtttatctgaaaataccgcgtttccgtctgagggcaccactcagtctggggaggcaggagggaggctggacatgaacgtgaacatgacaggcctgtgagcagggcaggtagatacagcccggctgggcacaaagctcatcccctgagcatgagccgaggccgagggtgggtgggagcacacagaggatgcctccccagctgccaggggcatcagcctcattaccaagcaccccaaaggggaactgtttggggttgggtgggtcagcctgcagcagggactgagacagccactgtggcatcaaagaccagcagtgcagtaccacgcccagaggctggaaccattttgtgcactgttggcctggaaggtaggaaccacctcagcccagctgccttgtagcatcatcgggtcagtcatagagctacagacagatctgggcagctggaaaacaggcccagagaaggggggtgtgggctgttacctgcagttactgtctggccttagagctgtgtcacttgtgtaaagaagtcagtgccaaggccgagcgcggtggctcacacctgtaataccaacactttgggaggccgaggcaggtggatcacgaggtcaagaatttgagaccagcctggccaacatggtgaaaaaccgtctactaaaaaaaaaaaaaaaaaaaaaaaaaaaattagctaggcatggtggcaggcacctgtaatcccagctactccagaggccgaggcaggagaattgcttaaacccgggaagcggaggttatagtgagccaagatcatgccactgcactccagcctgggcgacagagcaagaccccatcttgggaaaaaaaaaaaaaaattagcgccaatggctgcccattactgactgttgaggtagttggtgacaaactgattcaaaagagaggacttgctaggctgggtgcggtggctcacgcctgtaatcccagcactttgggaggctgacgcaggaggatcgcttgagcttaggagttcgagaccagcctgggcaacattgcaaaaccctgtctccactaaaaatacaaaaattagccaggcatggtggcccacacctgtggtcccacctactcaggaggctgaggtgggaggatcgcttgagcctggcaggtcaaggctgcagtgagctgcctgggcgacaggacactgtctcaaaaaacaaagaaacaaacaacaacaacaacaacaaaaacagaacttgcctcctgtctaccctgtgtggtgacaggtcagagggacctctgcattcaggcccactagctgttccctgtcctgctgcacccctgccccacaggcttggtagggccaaggccctcagccgccctgccggggcccctggtgtagggcggggtgggtggcagccccgttccccctcatcccagaccctccggccatcccagcttttcccaccaagcaggatcttgagaccagagctcccagcaggggccctggagggactggcccattcgagtggagggtcgcggcaggaacaagtgcgggggcctcaaagccccgccccaggcccagcggaaccctgaagaggagggggagggtgagccgggcgcggctgtgtcagctgagtgacagtcacgggaccgcgaccaactctgtctggcttcctagaggagcaggagggatgagcaagggtctcccagcgcgacaggccagtggtggggtgcttggggggagtgctgtcttggagggtcccggggatggtgacgtctgaagccccgtgcagaggtggggagatccctgagggctggttcccgaggctgggggggcctaggtcccatgtgggggctgcgccttcaagccccatttcccctaggacatggagaaagagcgagagactctgcaggcctggaaggagcgcgtggggcaggagctggaccgcgtggtggctttctggatggagcactcccacgaccaggagcacgggtactcggcgtgcttctggagtcctcagcagggtttttgcccttcctgaggccccttctcactctcaggcacctcacagatttgctggccccagaggggcaggaggggctggcaaggcccgttccagactttgctaaccctgccttcccacaggggcttcttcacgtgccttggccgcgaggggcgggtgtatgatgacctcaagtatgtgtggctgcaggggaggcaggtatggtgttcccagcctggaagctcaggcacacggcccatcgcctcaaaggtctccccacctcaccccagccggccacttaagccactttccctcccgtaccccgcaggtatggatgtattgtcgcctgtaccgcactttcgagcgcttccgccatgctcagcttctggacgcagcaaaagcaggtaggtgcccccttcctgcccatctcccagtgactccgtccatgtttactcaacagggcacatgtgcggagttcctagagggatctagaagcagcgaaggacttggggaggctcaagggtggtgtgtgcggggcgtcctggccttacccctggcatgccaaccccccaacctccaggtggtgagttcttgctgcggtatgcccgggtggcacctcctggcaagaagtgtgcctttgtgctgactcgggacggccgcccggtcaaggtgcagcgaaccatcttcagtgagtgtttctacaccatggccatgaacgagctgtggagagccacaggggaagtgcggtaccaggtgtgtgagaggagggtgcccctgaagaccccaccctgcgaccctgccatggccacctgatgcattcccactcactacgcaagtcccctcccatggacccatctgtgggccaagtccccttcacctctgaacgctcccctacccccacaggggcgcagacggagagggccctatccacgccctgcccccaactgggaaaaggcccttccctcctccctgggctccctgtgctgccagaccctgaccccacagcctggaaggggctgcacccccagactgggagcagagtggggcggatctgactggcccctactggacgctgggtgccaggccccaagtaggccctggatgaaggtgtctctgggttcaggagaggaattggctctcccaccccagggccgtgtccagggggatggcacaggatgtagcctcagcctgggcctccccttgcctcctgcacccccagacggaagcggtggagatgatggatcagatcgtccactgggtgcaggaggacgcgtcgggactgggccggccccagctccagggggccccggctgcggagcccatggcggtgcccatgatgctactgaacctggtggagcagctcggggaggcagatgaggagctggcgggcaaatacgcagagctgggggactggtgcgcccggaggattctgcagcacgtgcaggtgggggatgcctggggagctggggtggtgggaggccttccactcccccactcccctgggcaccctggggctcgacacacctggagagacagagattcggggatgtccccacctggggaaggtggagggcctgagggctggagggaggatgcggagccccaggcaagccctgacagaaggagacccctcctgccccacccaagtcccttccaggcctctgggccgtgaaacccgccctgtctgtccccattcaatgtttcaccctcccctgctggagaggatcaggccagaagtgaggattacatcttcctaggcccgggctggacgcggtggctcgtgcctgtaatcccagcagtttgggaggctgaggcgggcggatcacctgaggtcaggagttggagaccagcctggccaatatagtgaaaccccgtctctactaaaaatacaaaaattagctgggcatggtggtgcatgcctgtaatcccagcctctagggaggctgaggcaggagaatcgcatgaacccaggaggtggagattgtagtgagtcgagattgcggccactgcactttagcctgggtgacagagcaagactctgtctaaaaaaaaaaaaaaaaaaaaaaaacaacaacttgctaggcccaagggagtgaatcagcccctccttaaatgcccctctgagcctggcccacccaagccagcaggtccaggggcttgggtaagagggagggaggaagggctttccggagctgggtctttctagttgggtggctgggtgggtgaaagggctggaggcaacattcccttctgctccttcccggtagagggatggacaagctgtgctggagaatgtgtcagagggtggcaaggaacttcctggctgcctggggagacagcagaacccaggtgaggggcggggtgggctgggggccacccaggaggaggggagcgctgagccttgtgttctgggcttcagatatgggagtgcctggcgggggcgccttgaggaggcagaggagcgaggatgggcttcccaaggctgggggtttctgcagaggagcaggcttccagggccagggagctcagagcctcgctcattgttagggagggagcagagaggtgccaggggcttttgctccctctgttccctccctcaaccccaccccccgccccccgcccttccgtactccacccctcaccaggccacacgctggaagccggctggtttctgctccgtcattgcattcggaaaggcgaccccgaacttcgagcccacgtgattgacaagttcctattgttgcccttcc

SEQ ID NO: 98100 - DNA, 31687 bp, Homo sapiens
ggctcaagcagtcctcttgccccggcctgccaagtagctggaactataggcgtgtgccccacacccggcaggcttggggttttcaggcagcagagggtggcaggatcggctgctctgatccaagaggctcccggctctcccccagctggggtcttagggggctgtagtgcatgtccactctacaaatggcaggggggctggaggtggctgtgcctacactgagctcctttgcagcctctcctttctccctctccagggaagaggacccagatgatgtgccccatggacatatcacctcattggtatgtaaggtccacccaggctctctggtgggggtggaagtgggggttagttggggcagccctcaaggtcccagtccctcaccccatctctgctcttctcccaccaggctgtgaagcgttcccaccggcgcctcggtctggctcagaaactgatggaccaggcctctcgagccatgatagagaacttcaatgccaaatatgtctccctgcatgtcaggaagaggtggaagccgggctgagggaagggggattgagggggagagatactgccttgacgggggtcctggggtacctcagcttttggtgaagatccaggaagtgggattggggggaaggagggaccaggaggaggggcaagacctggacgtgctacccctccctggccaaatccgtgcagctcagcagtgccttgttcccctgcagtaaccgggccgccctgcacctctattccaacaccctcaactttcagtaagtagatctcgatttttctaatgggctggggttgatcccaggtctggcccatcagggcacctgagaccggctgagttgccttccaggtcgggggtgggccggctgtggggaagaggctgtggaccccagcactgccaggatacctccacattcactcggcggctgatggttgaaaagccggcatggagacagcacctgcctgctgaaacgtgctccatgtgttgtgatggaggagctctggcccatgatggctgaggctggcgaagggcacacgggctgtttagtaatgtttgggaatagagaggtgtgggtccctggcgtgagcagatgctgaggagcaggactcaagcatgaccaagcacctagaagaatccaagagagagcagaatcgaggagaatgcacattcaggaaggaagggccagtggccaggcagcctagtggatgggggaggtctgcctgaggaccaggaggccccgtgtgcctagcacactagagagaacctggcagttggcatgcccagtagacagtggaaaaaagtgcttgcaagtgaagctggggtgggctgcctgtggagggacactaactgcactcagcccgtttggtaggggatgaagaagagggactgttgggaagggcggtggcctctgggctggatgctggcaagagggatctgtgacccagatgacgatgtctggtgggaattgctttatagctaagtcagcaatcctcatgtcttaggcctggcagggccagcctaggccattgagtccagctccccttccagggacatggccacgcgagtctgcacacacacctgcccagtgtagtcacggccccagagctgctcaggcagggctcaccgtctttcctgggttctgatggctgttgtgaggcagctcagtaagggacagggcgcagggcagggagggaaggggaaggctgaattcagggcttcagctcacaagaaaccgcagaaatggatccttagtatccaggctaaggacacagaacgggggcaggacgggtggggcgggccgctgtgtcctggagcctttgctggagagaacagagggcaggtcacactggacttgttgtctcaggatggagccttcagggagaaaacatggcaccttgctccagtagccacgataccaggagtggaggagggtgtccccgggatacaggtcttcctccttgctctctaaccctctgcccccaggatcagtgaagtggagcccaaatactatgcagatggggaggacgcctatgccatgaagcgggacctcactcagatggccgacgaggtaagcgcctgcatgaagccaagcaaggcgagcgggggcggcactcaggagccccaagacagtggctgcaggcgagaccgactttggatgccagctcttgtggctacgttgccaggagtcacgacctcagtttcctaggctgggctttagaggaggccatctgcctagcagcctggagggtgatgggagaggcagagggaggaggcttttagaagggaagtggggaggtctagggaccagtgggtggcctgcctgctcaaaggtagttctgagtcagggttctgcccaaggctcatcgggtggcagggctggtcaaggggcagcgctctgtcgtgggggcctccatggtagtcggtaagcccaggtagcggtggactggggctccagccaggtgtccccactcagtcccgcgtgtcctgcctagccctgctgcctcactatgcccctctcctcagccagcgacagggccaggctccctttgtctggaaacttaggccctgtctctttgcccccgcttctccctgggttcctggtggcagctgaggcggcacctggagctgaaagagaagggcaggcacgtggtgctgggtgccatcgagaacaaggtggagagcaaaggcaattcacctccgagctcaggagaggcctgtcgcgaggagaagggcctggctgccgaggatagtggtggggacagcaaggacctcagcgaggtcagcgagaccacagagagcacagatgtcaaggacagctcagaggcctccgactcagcctcctagagcctgccccatcccctcctcaccccacgagctttcacaataaattcgctccgtggcactggggaactttgtgtgtgagcgcgcgcacatttagagggtgtgtttctccaggtcctctggtggggatgtgagccttggccttttgacccagagcatcctgccaggcccgagtacaaggaaagagctttggaggtgggactccctagtctcatgaccttcagcagctgtggccccggggaaggaggccctggacttatgggagagaccctgccttggaggtctgcttggccacgctgaatgtgttttgtggcacaagccggggctgctcaggctcaaagctcaacagcagggctcccactcttggtggccttcagttctcttcccaccttcaccttcagactttctctccctaatcacacctgcttcgggctacagcagctccccagcatacccgtgggctccagatgtggacatccaactgctcattgggcttatctacaaatgtcctgtctgagtaatgacccagccagatgccccatcaacagtccttgagtcctccctcccctgccaccctaatggtcagtgagtccatgatacctcttgagtctactccctaacctgagtttgcatttgaaaataatttatttttagtacaattccccgcgtttccccattgacattttgtattagttggtgtatttgttattgttgatgcgccaatactgataagttattgtaaactacagcccatggtttacagtaggtttcctgtctgtgttgtacagtttctatggggttacacaaatgcataaagccatgtattccctcattaacaatttcatgcaaaatacaaaactgggcggctgttgggtgcggtggctcatgcctgtaatcacagcactttgggaggccaaggtgggcgggatcacttgagctcaggagttggagaccagcctgggcagcatggcgaaaccccatctttactaaaaatagaaaacttacccgggtgtggtggtgcatgcctgtaatcccagctactcgggaggctgaagcaggaggatcgcttgagcccgggaggtggaggttgctgtgggccctgatcatgccaccacactccagggacagagacccgtctcaaaaaaaaaaaatatatatatacatatatatatacatatacacatatatatcaaaatcctgtttttcatggagtcaccctaaccgtaacgctcgtttctgtgtctttcctcctttcccttccctcccctccggctgcaaagccatcatttactgtccctagtcctgggcgggccctgtattcctgagccctctctgtgtcctgctactgcaggtggcacactgctcctccgccgggttgaaaactcgccacacaggcctggagctcggttctctttggctggcgcctcgcacgtgaccagcaggcagccggcagctgtggaagcggagcccagagcgcggcagggcggggccggggccggaaaggcgcgtctgcgcacgcccacagctctccgcttcccggctcgggcgaggctgtgttgattggcttaagacgtgggcttccctttgtatgggccggaggcggagtcctgtcccgccccgcgcctggcggcagtgtcttccggttcgcaagcccgcggcgaggttcgttcccaggctctgattggtccggcggcactgggctcgcgcgcagggtgcgggggaagggcgggcttgcgcactgcgtcggccgcgccccggcaccggtggaagggaggtgtcccaggctcccacggcgcccacggcgccctccttccgccccggccaggcccatgggacccggcccgccctctgccgtccgtccccggcgggcccgatgcctgtcggccgctgagcctccgtccccatgcgggcaggtccgcgccttctgcgggctgcctggcttttggatgctttgaaggggaacaatggagcgaaggatagacggagcagcagggggcagttgcgttcagggccttaaatgccaaacaagtgccctaaaagccagggcccaacactcaggccctaaagtacgggctgaatggggcatcctaggaatagctctggagtgaaaaaaggagtgaagagagcgtttgaaggcaccggctgaggcctttcctgcctgcctgagccctgtggctggctctgctgggtggagggacctttggggaccagtcagggctcggatggaggggcaagatgtgttggggccagctagtgagaggcggggctccctggttccccttggcctgaggcagcggtgggacgtgtgagtctcccgaccaggagcaggttggagtgtgggtgcggctgtacgcgctgtgggcaggggcgcaggctctctagtctcgctggaggactcgaacatcggtacttccgagaccagctgctggaagtccaggtcctgggtctggctagctcccaggccttgaagccccaggtcctgcagacacacacgacgacgtgttcgagaagggccttggtactgggagaagggggcggggagctgagggagtgtttttttccttctgggcaagagaattaattgctcacagttgaaaggcaggaagtacccgcacagcctcccctccccagatctgcaggtcaaggtcatgtgtgcccgcatttgcacagagcctgactctgacatccgtgcacacacacgcctagtacccctgcactagtgcccccacgcccgccttcggaacacacgcctggtgcccaagtgccttgcctctctccccacatctataccccagggatttccctcccaccaaattgaagccagttgtctgcttggcttgtcaaccgcctcccgcctcccgccttcccgatttcccggagaaaagctgctgccctgtggtagagggtggaggaaagccccaccacccctggatgaggggggccccaagacttgcccccagggtagctaagacctcactccgagggggctgcccccctcaggcctatgacgggcaggtgcagctgcaggggaagggaggcagagcagtctcttccggcagcaggaagtggtaaccgcctatggggaaattgtggggctgagcagaaggggaaccggagctgaactctcctcccctaccaagggggcctggagggaacggcagccagctgctgaggttctgctctctggtgctgaccttccttccccctcccctctgaacttcccaccccagctctcaaggctccctggggctccctgggcctctctgggggctgacttgggaagggaggaccccatcggatgtctgggggaaggaggcaacccaggggagtccagagcctgggcagcaatggtgttcatggccactggtacagtgggccagcgccccgctgtgaatggtacagtctggcagtkgtgaccagggacagccttctggaggtggtgggatggcagcctgggatgccagcttacgttggggctctcacacctgctccggctgcttggcagcggggctttgggcacaaggcagcctaggtgcaggcccaatgggaggggacggcaaggccggggcacagtggggctggaaggggcgccctgcccccccaggagcccctcgcgggcagtgccagccctgggccgccccgccccaccgggagccgcgctgggggcggggctgggcggagcccgcgcagggtgctggccgcagcgcccccaagtcccggcgcygggcccgctcacggccgcgtgggagcagtggggttcgacggcgcggccgcgaggccgccatggccgctcacgggaagctgcggcgggagcgggggctgcaggctgagtatgagacgcaagtcaaaggtgagagggcgccgggcgctcccggcccgtttcctgcggagaacccaaggtcgtgagggagctccaagcgtccccgcgctggcccagggcccgatgctctccccagcgacctctggagcgggggtggaggagggagcctgagccccttgcctgcctcccgacgcccatttggcctcaaccgcctgccattttcccttccttctttcctgtcttccttcctttggtctctgtcctccttgggtctaccgcttctcacccaaggttcagtggagacactggtggccgctggtaaaagagagccagatgcaccaacgtgcccctcagaaggcagtattttagctacagtgaagtcaaccagcttgattgggctggggggtgagtaagggagtccgggtgagtggattggtggagatcacctggccgtaaccccactgcagtccctggagcttcagcaccttttgcctccctttagcactgagggggagcagaggcgagggccactgtctctgggtcaagctggcgcagtgagtcttggttgagagatttaacagggctggcttctcagccttctgaaattgaacctctgggttctgataaacacccatgtgcaaatcacatgcaaatcagctttgcaaattcttagccaatagcttgtgcccatcttattcagggcatggtaactcttgcaaaggaaagaggcagcagctcagtgccagcagctcgtccatatcactctcaatcactccattttaccaattacggaaacaagctcagagaggtgcagtgacttgcccgtggtcatacagcactgcaacttctaggacgtagaatgcaatgacccttgaagtgcctttgaacccagagatgtaggttctaacatcattattcagtgcaagcaatttataccaaagtatgctccagtcctcctttggaaaaggcagcctgtgtccagagccagcttgaggtgactacacagggtgagccagctttccaagcctcgccatcatcttgctcagatggaggtaatgatctccatcctgcttccccaaaatgccatgaagctgaaagacttggaaaacttcagtcagcaaatatgggtcagtgatttcacactgaaaagttggggtttcgagcacgactgtctaagggttcctcacttgctctgggtctgcatcccacaccctggaaaagcttcctaccattctacaaagtggggtcactgtcttgacaccctaaattctcaaaggtcagcatagcggtggttttggagaccatcttttcttctgttttgcttgtcagcagaagtgagaccaaatgccttgctcacaggaagtgctggtggggcccggggcccagctctgtaattcaggcagacatggattccagctctccttttgccagatgtttcctatacatctgtgctgtcccaggccctgggagtatactgctgtaccagagagaaccccgactccagcccctccagccctggctttttacccagagtaaaagcaatgattcaatgaggactcccctgatttcaaatggcgtcagtggccaccccgccctcacatggctcacgggtctagtgggggagacatagactttgcattatgataataagcactacaaagggaaggaaagtgcacggtgccaagaaggggtcggaagagggccagccctagtttagggggaggtcaggacagggtgtgctgacgmgtttgtctgaactgagatccgaaagctctgccaggaaagccaccaatgcaatcracttgcaattcacaagttgcctgctcaacaccagccggtgtgcatgcccggatctggactaggacatggcttccagtcagcttttgctgccggcagtgatgaagaaaggcagcggttccctctgctggttccttctgcactgttcagttgtcataagtccccagggattgtattcctctgggggaagcagggcagggcaggctccagagggccagtgaggcgagcagttgtctaacacctttcttggaatgaaatgaaatttacttttatcaaaaaatgttaaactgggccaggcgtggtggctcacgtctgtaatcccagcactttgggaggccgaggcgggcggatcacctgaggtcaggagttcaagacccagtctggccaacatgatgaaaccctgtctctactaaaaatacaaaaattagctgggtgtggtggtgcgcccctgtagtcccagctactcgggaggctgaggcgggagaatcgcttgaacccgggaggcggaggttgcagtgagccgagatcgcaccactgtactccagcctgggcaacatcctccgtctcaaaacaaaaaatcaaaacaaaacgttaaactgattcagtgaggactctcctgatttcaaatggcattagcgcccaccccacctggccttggagctgacgagttaaccacaggaggccagcctcggataggatgaagacactctccatctgtctcacttggcatcgtgggctctgccctgctctgtcgggaggtcccgtgccccaggcttccacttacccagcttgatctgccggtgggaagagctctcctgttcagtaattcaattggaagggtcaggctcctgggtccctcacctggctagtctggtgggggcagggagtggagggacagagggatgggtgacgcatgcagccagggctggggcacctggagtcaagggggctgagactaggaaggggacattctccaataggagatcaggggaggaggtagggatgctgggcaggcggaacccacagggtccccatgcaacagcccctgggaagtcactggcgggacagaaatccaatgggattgagctcttctcagcggagtcctccctcgctgctgctggtctgaatcctgccgtcttttgcctggactagcacagtagctgccacctgggctccacctggcagtgtgagggggccctgaaaacgaagctggaccacatcaccccactactgtggctcctctctcactcggagtccagctgggagctctgcccagaccccgggctctgtgccatctgtccctaccggtctctcggactccccctactgcccacgtacagccagctccagccttctgctccaacgatgcggcttgttcttgaccaccctcctttaaaaagaggtcctccctgtccccacccacccctggctctgatcttgctttgtgggttcatcttctccgcacccatcactcctgggcattctgatatgtgttcgtgccccattccaatcccagctccaagagggcagacacttggtcaaacctctttgcctttgtatttaaaacgtgcctgccacagaatgggtgcataatcaacattctgctgaatgaagacatcaattcatgtccctccctggggatgtggatggagatgagtaggtgggcagcctgctggccagaagctgagctagcatcttatttactcgggacgggcactcaggagatggcaaaagtgtcttccgcaggttgcttaaacttgctggacaggcacttctttgcttcaggcctgtgtgggggaagcagcgttgccaaatcaagccagtgatagggtgtcaaaaggccggcagtatggggccctgggtgtgactctctctgcagggtgggggaatgcacaggtggggcggggggtgattgggagtgggaagtggggtcagaagacgggggctagctccctgccccattctttcacttacaaggccggatcagctctccctggctcccagccctcactgtggactgtcctttcccctggggcctgagggcaggcttccccagccactgagactgcgagatcgctgcaggcttgccctgagcagcactgtgatctgtgtgttgtgtatccgtgtgtttgcaagggaggctgccacctyccggagcctgggtaccggcgggaaaggaagtcgcaggggaaaccattcagaggctttccaggaacgagggagagacaggaagccaaactgaaaggtgcctggctggcgctggggcggctctcccctctctctgggacacccttccccttccccctcaaccgggtggctctggccatctgttggcctcagcgcagaggtcggctggacagctgaggccagatctgcctgcaggggcctagcttctttcctcccctcttagctcttgccctcagcctaggctgggtccgaaggagccctcagagccgacgggactggggtctgtgtgcctctgcctctcccatcccacgctggcctggctgacccaggcagggcgtgctgaccaggcctgagccatggttccccccacagagatgcgctggcagctgagcgagcagctgcgctgcctggagctgcagggcgagctgcggcggragttgctgcaggagctggcagagttcatgcggcgccgcgctgaggtggagctggaatactcccggggcctggaaaagctggccgagcgcttctccagccgtggaggccgcctggggagcagccgggagcaccaaagcttccggtaggtgatgtgctggcaggggggccacggcagggcccaagctccgytcccaggtctcagtgcccctctacccccaggaaggagccgtccctcctgtcgcccttgcactgctgggyggtgctgctgcagcacacgcggcagcagagccgggagagcgcggccctgagtgaggtgctggccgggcccctggcccagcgcctgagtcacattgcagaggacgtggggcgcctggtcaagaaggtgaggctctcatcctgggccacgggaagtgttcgaggctttgggatcaggaggcactgtggctgggagggcactggaggccaggtggggagcaggcagagcgaacctgtgtgcccccccgatggggcttgatctgggcagagcttccagtgcctggcggggccgctctgggcagtgccgtgctcacccttgcctctgcctctagagcagggatctggagcagcagctgcaggatgagctcctggaggtggtctcagagctccagacggtgaggaaagggctggggaggggcctgccccaatggtccagggagaaatgccactcacagtgggggaggaacaccgccagaccatcacatcaccccaagccaggctcagggagaagcacgcacctaggggcaaaggccctctctccctaggcacagggcgttaggctaagtgctcacatgggatcgcccagctctgaggtccaagttccagaggggcaggggtagagggctgggggctggcccagccgtggccttcaccagcaccaccttgctttgggtctccctgcaggccaagaagacgtaccaggcatatcacatggagagcgtgaatgccgaggccaagctccgggaggccgagcggcaggaggagaagcgggcaggccggagtgtccccaccaccaccgctggtgccactgaggcagggcccctccgcaagagctccctcaagaagggagggaggctggtggagaaggtgggcctggagggcacctcagacgcaggcctatgggccatgggccctaactaggacctgctgtgctgagggggaagtcagggctgggtgcaggggagggcaggagtggcaggacagtgccatcaggttccagggattccatacggaaggctcccagggcctgagagagtggggaaaacagttgcctggccctggacagccccatgcagcctctccatgctcccagcggggcccctgcagctctgctgttctgccagccattccgtaaggtttcagaggggggcaagaagacacttagggtgggtgatggggtgacacgcacggagaaagggccttcgaggtgagcccagtacagagagtggggaggctgggaaatgcctggatggagccgccaggctgtgcgtggctgacagtcatggtctctgggactctgggagcagaggagggagtcgagcatctcaggtgttcttaggggaaatgacagagtttggctgtgttgggggaaggtctccctggctgctgtggttagcgtgccagctttagccaggtgcggtgactcacgcctgtaatcctagcattttgggaggctgaggtgggtggatcacgaagtcaggagttcaagatcagtgtggccaacatggtgaaaccccatctctactaaaaatacaaaaattagccgggcatgatggcgggtgcctgtcatcccagctacttgggaggctgaggcgggagaatcacttgaacacagcaggcggaggttgcagtgatctaagattgcaccactgtactccagcctgggcgacagagcgagactctgtctcaaaaaaaaaaaataaaaaaaaaatagagtgccagttttagaacccaggtgccagcaggttctgtttcatggctcttgatgatctatccctaccctttggggtactcgttccccctcagctctggcccccgcagaggcctgtggccgcttccagctgtgcacctgtgtgctggctccaagctgggtttctcgtgcaccctccatggtggggtgccatgtgcgcaccttccactcatcaggtatctgtgaatagttctgtgtcatcccccacttctgtggggaatgttgtggctcgaaccaaggcaagtggcgggtgaacagccggggaatcaagtcacctcctggcactgggctgagcacactgtggactgtggcgtggggaaggcagcaggacttctgggcttgaccagttcaggtgtagttgtccacagtgggaggggaggcgatgggcattacatgaaaggctagagataggggctggccacgtgcgtgaccctggcacgcttgcattgtcttgagtagcggcaggccaagttcatggagcacaaactcaagtgcacaaaggcgcgcaacgagtacctgcttagcctggctagtgtcaacgctgctgtcagtaactactacctgcatgacgtcttggacctcatggacgtgagtccttggtgggcaggtgggaaaaggtgcctggtgcctcrgggctgggaagctgtggctccaggacctacccaagcatctccttgtttcctcctcagtgctgtgacacagggttccacctggccctggggcaggtgctccggagctacacggccgctgagagccgcacccaagcctcccaagtgcagggcctgggcagcctggaagaagctgtggaggccctggatcctccaggggacaaagccaaggttctcgaggtgcatgctaccgtcttctgtcccccgctgcgctttgactaccacccccatgatggggatgaggtgagggtcaccccctgctgggcttggcattctctggccttcactgtaatggtgggcagtggagtggcatgacccacactttgctcaggaatccaagttctccatggtctcaggcagtgcggcagctagagaagtgtcccacttccatttgcagcctcactccaagggtgcacccccgcaatggccaaggagggcaagacactaactgttcaaaccgtgcagcaggcagccgtgtagctgcccatacattgttctaggctggtttctctgtgtttttaaatttcgtgacacaaacttggcagtaagatggaatggggcttctttatccttctccgtcgagctagtttttcctgcagcagtttatcctgatgggcattgtcaatgatctgggattacattgggcccctttcgggccgacttggaactttacgaagagtccggcatcaccagggcttccgatggcgtcacagctgctccctaacccacccctcccgttcccagctcccacccccagaaacagccacccacctcccggtgtcaagcagccattttccattggccaatgatgacccagtgccaccagcatctctcacagccaccacacgcttccctgcatcttgttctcccagtgggcttatcccagaatttttggctaaattaacattcaatgtttaaatcaccatgacaacaggtactgttggcagctgagccatgtactgtattaggatcacatgtccttccttggacaatttttccttttcttctggaatttataactctcttgcctcaggaatgctgcttgctagaacatgcccattgctaggagttgatcgctacctcgtcccagcactgtcctccacaccaggcacctgtgaggtcaaccttctcctctgcgccctcccccagagccttccagtctggagtgcttcacttctgcccagtgctctgtttccggattccacggcagcagctttcttagtttgatacccttattttggtgacaccttcaccaagggtttcctgactttgcacatctgaaaatgtctgtattctttgttttgttttgttgtgttttgtttttgaaacagggtctcactctgtcccctcggctggagtgcaggggtgtgatgtgatctcagctcactgcagatgcaaccttctggtcctcccatctcagcttcccaagtagctgggactacaggcctgcactacaacgccaggctaatttttctatattttgtagcaagggagtttcaccatgttgcccaggctggtctcaaactcctgggctcaagcaattggcctgcctcggcctcccaaagtgctgggattacaggtgtgccactgtgcccggccaaccctttattcttatttcatgaatacagtacttcttgaatctttctgaagcttttattttttttgagatggagtttcccccttgtcgcccaggctggagtgcagtggcacgatcttgacccactgcaaacttcgcctcctgggttcaagtgattctcctgcctcagcctcccgagtagctggaattacaggcacttgccaccacacctggctaattttttaattttttaaatttaatttattttatttatttattttttgagacagactctttctctgtcgcccaggctagagtgcagtggcgcaatgtcggctcactgcaacctctgcctcccaggttcaagcaattctcctgcctcagcctcctgagtagctgggactacaggtgcccgccaccacgcctggctgatttttgtattttaagtagagacagggtttcaccatattgtccaggctggtcttgaactcctgacctcaggtgatccgcctgcctcggcctcccaaagtgctgggattacaggtgtgggccaccgtgcccgacccttttatttttattttttagtagagacagggtttcaccatgttggccaggcttgtctcgaactcctgacttcaggtgatctgcttgcctcagcctcccaaagtgctgggattacaggcgtgagccaccatgcccggcctgaaatgttttttgttttctcctgttcctgcatttgctctattttcttgcttttgttcgtgagtccaaaatccctgctatatcctttccagagagcaaatagttagttttctgctgatcgtgtctgtttggtgattcttggccatcagttcatatttaagaagaggcctgaacacataccccacaaatgtgggtgtctgtggtgtttcctcctggcccggccagtttccccagtagaaactcttctgaccctgtctagggaggagagggggtgagagggctgggggctcactctgctgtgtggatttccttggaactacctggttttagttccacaccctccagccaaagcctagcaggaacagccctataatctccattgctggagggagccctgctccgtggggassctggggcctctcagtgagagggtagtggaaaggccttagaggacttgggcttgccttaggggatctgggggagggcccaggtaagtggggcttggtcctggattggatgccttctggaagcagggtaattgtatgattggatgtcttgattaatcttatctagaaagagacagtgatggaggctgaagtgatgcaaggaagtgacagtcacttacattagccaggatggagggatgattttgtggctcggaagaagttcttgattttgtcctcactcatgcgtgatcgcagagtggtcttgtttctgtcttcgcccatcaaggtcacacagtggccttgcctgatgttgatgctctgggtcatttccggtgttcagcaggacagcactgaggccgggctgataggaccaggccagcttccgatggtggggctgctgtgttctctcatcttcctcatctgggaccagtgtccctgagtccaaaatccctgctatatcctttccagagagcaaattgttagttttctgctgatcgtgtgagtttagaggagggataaaatttcaatgttccccagagtatgcatacacttattttttctctagagagagggtctggctctgttgtccaggctggagtacagtggtgtgatcatagctcactgcagcctccaactcctgggctcaagccatcctcctgcctgagcctcctcctgagtagctgggactataggtgcatgccaccatgcgtggctaagatttgtactttaaaaacaattatttttaacctacttatttatttatttattttgagaccaggttatgagacagggtaatttttgtatttttggtagagtcagggttttaccatattgccaaggctggtctcaaactcctgggctcaagtgatccacccgcctcggcctcccaaagtgctgggattgcaggtgtgagccagtccagcctagatggacttttaaaaaaaggtgtggcagaatacacatagcataaaacataccacgttcaccatttgtaagtgtgcggcccaggggcagaagcacattcacggtgctgtgcagccatcaccaccrtccagccgcagaacttgttcatcttcccaaactgaagctctggccccgttcaaccccaactccccaccccccagcccctggcacccacccttccactgtccgtctctacagagttcacggctctcctttgaggcccctcacaggagtggaatcctacagtgcgggcctttctgtgactggctcctttcactgagtcccatgtcctcaagggtcagccatgttggagcccatctcaaaatggccttactttctactctgtgacttgcgccttcatgcagtcctgtacggcggggcttggtggagatggagagcagggcaagtgtttagccacagctgaatcctcactctcaattttaactgtaatgtcaattttctagatgtctacatgcttaaaagagtaattccttcctttctaaagcgttggctcccactctgcccatgaggcaagctgctctcatcttgccacagggaaatttatgtctgcccagttacagtgagcagtttttccgtccactcctttccctggaagaggtggggctgggctctccctgttctgtctcagaccccagtcttccttaccattctatttcattttattttattttgagatggcgtctcgctctgtcgcccaggctggagtgcaatggctccatcttggctcactgcaacctccgcctcccgggttcaagcgattcccctgcctcagcctcccaagtagctgggactacaggcgcatgccaccgtgcccagttaattttttgtatttttagcggagacagggtttcaccgtgttggccaggctggtctccaactcctgagytcagataatccatccgcctcagcctcccaaagtgcttggattagaggcgtgagccactgcgccgggccaccattctgttttaaatagagttttattaaggtacgattcatataccataaaattcagcactgtaaagtgtacaatttggtggttgtgcagccatcaccatgtaattccagaacatttttgtcacccctaaaggagccactactccccgttctcctctccagccccactggcaccccactgctccagctggcacccactctgcttcctgtctctatggatttgcctggctggacacttcacataagtggattcattccttctcgtggctgaatcctcttccattctgtgggtagaccgcgctgagtttagccatccgtcagttggatgagtggtgccgccacgaacctctgtggacaagtcttggtttggacacgtgtgttcactcctgccattcttcagctgagcgtctgggctggtggtcctgtgcccggccgccaggccacaaaagggtgcttgcttcccttatgccccggggatcttggcacctactgcccaagcccagcccttagccccctggccgccgccctctgcaggtggctgagatctgcgttgaaatggagctgcgggacgagattctgcccagagcccagaacatccagagccgcctggaccgacagaccattgagacagaggaggtctgggcagcccaccgggggttagagggagacgagggcctggagcctgtacagcctgctgttggaagtggctgccctgcctgcccccctccctttggccccttccttctgacttggacttcctgtctccctccctgtcccccacctcttaccaccctggtgtggtctcctctgcaggtgaacaagactctgaaggcgacactgcaggccctgctggaggtggtggcctcggatgacggggatgtgcttgattccttccagaccagcccctccaccgagtccctcaagtccaccagctcagacccaggcagccggcaggcgggccggaggcgcggccagcagcaggagaccgaaaccttctacctcacggtggggagggctgggctggtgggcgggacccgtgggggcattgctggggcagagggaggggctcaagccagggctaacacttggggctcttcttggggctgcccagaagctccaggagtatctgagtggacggagcatcctcgccaagctgcaggccaagcacgagaagctgcaggaggcccttcagcgaggtgggcccagtgctgcccccttccccgcctctcccctgcccaggaccctgtctagcccacggtcctcccctcccgcctgtccttggctcttatccacacctttctctctgggatgccttgaagacccctggcccgagaggcagaccaatgttctcccaccccacaggtgacaaggaggagcaggaggtgtcttggtgagtcctccctgaggggctggggccctgcgacggtccgccatctcttctcttcctggggcccagctcagctgcccaatcccctgggcctcacttccccagttttcgcactggattgtggaataacttcagagaattagaggccggcttggctggcctggggggtggggcaccctattctccacacctggccccctcagagccagctcccattcactgcaggacccagtacacacagagaaaattccagaagagccgccagccccgccccagctcccagtataaccagagactctttgrgggagacatggagaagtttatccaggtactagctttgccccacatgccagcccacctgtacatgctgatctttcttcagctctgggtcacctcagtggccggagcagctgcctgatcccagggtcctccactctcaatcagtcatcaactgtccttttctgggtgggcctcttccaggccactgttgggctcccctatagcctccgctgattgaagggagcatccttaactagtaatgggaacgtatagaaaacctggggcagcggcatttttaggggcgagatattgagagcttctcccctgcgacttctggccagcatggtactgggggtcctggacagtgaaataaggggaagcaagaaagatcagaaaactaatactgagatcagaaagcatcagagggggccaggcacggtggctcacacctgtaatcccagctctttgggaggctgaggtgggcagatcccttcagcccaggtgttcgagaccagcctgggcaacatggtgaaaccccgtctctactaaaaatacaaaaattagccaggcatggtggcacgtgcctgtaatcccagtgaaagaaagaaagagagagagagagagggaaggaaagaaggaaggaaggaaaagagagagaaagaaaagaaaagaagcaagcaagcatcagagagggccaggcatggagaataccagaagatcagaactgatatcgtcattttcagtgatgtggttatgcgtgtagcatattcaaaagaatcaacagattctttaaacgagcactttgagtttctttctttttttttttttttttatttgttgagactggttcttgcactgttgcccaggctggagtgcagtggcacgatctcagctccctgcaaccttcacctcccacctgctggggttcaagcgattctcatgcctcagcctcccaagtagctgtgtgcaccatcacacctggctaatttttatatttttagtagaggtgaggtttcaccgtgttggtcaggttggtctcgaacttctgacctcaggtgatcctcctcccttggcctcccaaagtgctgggattacaggcatgagccaccacacccagcttgagttttgaaatgttacttgattcaagattggtgtacagaattcaattgcatttgtatattccagcaacaatttgcaaatacaacgtaaggcactgcctaaaacctcatcaaaaatatcagacacctacgagtggatctaacaaacggtgtgctaagcctctgtgccgacaacgatgatgtgttcttcagagaaaataaaagcactcagcctggtgcggtggctcatgcctgtaatcccaccattggggagcttgaggcaggagtatcacttgagcccaggaagctgaggctacagtgagccgagatcacgccagtgcacttcagcctgggtgacagagtgagaccttgtctcaaaaaaaaaaaaaaaaaaaaaaagcaattgaatgacaacacagggcatgctgtgtccatggtgaagtaaacaccctctgtccccagagctcaggccagcctgtgcccctggtsgtggagagctgcattcgcttcatcaacctcaatggtaagcagracccagcccctcccgatgtcctggcacccagcacccagttcccagcacctggcatgggaggccatcctggaggggctggggaagatgctcagtgcccaccagctccttgtcctcccacaggcctgcagcatgaaggcatcttccgggtatcgkgtgcccagctccgggtctcagagatccgtgatgccttcgagagaggtggggacgggcagggcgggcgggggtgggggctcgggcagatgtcaccagcttcctccccctaccgcaccactcgcccatctgcaggggaggacccactggtggagggctgcactgcccaygacctggactcggtggccggggtgctgaagctctacttccggagcctggagcccccactcttccccccagacctgttcggcgagctgctggcttcttcgggtgaggctggggcctgaggctggcggggtagggcacttgctggggcagccccgctcacgcggctctctctgggcggctttggccacagagctggaggccacagcggagagggtggagcacgtgagccgcctgctgtggcggctgcccgcgccggtgctggtggttctgcgctacctcttcaccttcctcaaccagtgagtgctgcggggcgagtgctggggtgggggccaggggtcgaggggacagggggactcggggtgcgggctctctgcttgtgatgtgcgtgtccccccagcctggcccagtacagcgatgagaacatgatggacccctacaacctggccgtgtgcttcgggcccacgctgctaccggtgcccgctgggcaggacccggtggcgctgcagggccgggtgaaccagctggtgcagacgctcatagtgcagcccgatcgggtcttcccgcccctgacctcgctgcctggccccgtctacgagaagtgcatggcaccgccttccgccagctgcctggggtacacccttggtgctgccgaggggactggggggtccastggagaagagcccccctcatctgcctcgctctgccctgaacctcagggacgcccagctggagagcctgggggcggacaatgagccggagctggaagccgagatgcccgcacaggaggatggtgagggcgatgggcagagagccccaccctgtccccaccctagtgtccacaccccctcccacagcttggaccccctctcctccccagacctggagggggtcgtggaggctgtggcctgctttgcctacacgggccgcacagcccaggagctgagcttccrgcggggggacktactgcggctgcacgagagggcctcgagcgactggtggcggggggagcacaacggcatgcggggcctcatcccccacaagtatatcacgctgcccgccgggtgagtgagccgcgccctcaggccccagggctcccggagtctccccttcatccacccctcccccgaccccaagttagattctgaaggtctgggctgggccagagaacagagcctctctgaccactcctggctggcgcggaggctgctggccctggaccccgtgcagggaaggagcactcgaaacaggccggtccttcccaccgcaggacggagaagcaggtggtgggygcagggctgcagactgcaggggagtctgggagcagtcccgagggcctcctggcatcggagctggtccaccggtgagcaagaagacggggctcagggggcccacacgtgtgctgttctaggccagaggggactggggtcaggctttggcccagtgggagtgggaggagttggcagatgaggacgtgacagaatgacccagcttgtgacagggagaggctctagaggagcttggggaccactgggccagcctcctttccttggccacaccccaggatgggaggagccactgcccagctagctcagggacttcccagggcccccaccaggctccctgtctgtcctgcaggccagagccatgcacctcacctgaggccatgggaccctctggacacagacgacgctgcttggtcccagcctccccagagcaacacgtggaggtggataaggtgagagtgggtgtgtggcaggtgagggacatctgtcctgggggatctctgcctccccttggaagccaaactcctccctcctcgaggttccagtcgttgccctccctggccttagctcaagggaacctgccgccagacacacaggcccaaggcagagcctgtggagggcaggaaggcaaagatgtgagggcgggtggggatggagagggacggctacggaggcagggatgagagggacagaagacacctggcttgcacgttgggattcatgttcagcttcagagcagggagtggcagggctgagttaaggctgtttacctggtagaggcaagggactccagggcagattcaaggctggcatttgtagctgggctaggtaacaggcggtgccattggcaggcgcttggcacgccagggaggatgaaagggacagatggcagggaggcaggagggggtggctggttggggattggggtggggcagcagcggctctcgaaggagcagagcgaaggctcaagatgtggccctggcaagcgcacaacctgggggaccctgctccgtgctctgtaccatgggccctgtgaacactgtcgggctgaacgtggaagcccgcgggacagttgctaagcccaaggaggagagagcccaagaacatgcgggtgtcccaggtgtggccaagcccccaggcccagggagcccagggagggtccggtagacacggaggagcaggagcgggagccagggacagggcagccaggagacgccatgggaggacattgactggggagtccccgcacgctggcggtccctgaggccatgggcagggggctgtgatctctgccagggaaagagtgggggcgagaagaggggggtccccacttccgggctaaaccaaggaattgctgtcctcagaggagactgtgacagagacaccaacagggacaggagggatgccaggtgcaaagtgggggagagtgacctggaggctgagggactggggatgttggctgagggcttgctttgggagtgggaggaactcaggtgggtcttgggcagggtcagtcgggggaactcactggtcactctccctttctttcccctcygctaggctgtggcacagaacatggactctgtgtttaaggagctcttgggaaagacctctgtccgccagggccttgggccagcatctaccacctctcccagtcctgggccccgaagcccaaaggccccgcccagcagccgcctgggcaggaacaaaggcttctcccggggccctggggccccagcctyaccctcagcttcccacccccagggcctagacacgacccccaagccacactgaggtgccgctgctggagatgcgtgcccccrgcggctacccgctggaccggccactctccccagcccccttgcttctctccagccctgtccagcaagtgcagggtgcctgcacttcaccctgtgcagagaggtgggatggggccgtgcacacagggatgcccgctccacatcctgcctgcccctcagccctggcccaggccccttttggaggcagctgaggaaggatgctggggaaagccctcttctgcagctttgtggaaggctgatcagtggctgctgggtggcgggtacccttgctcagatgcctggcagggctgggtggcgattcataaagacctcgtgttgattccccgatgggagccagctctctgtctcgggtgggcaggtgggtgctggaggtgagaacagcttccccaggggtcctgcagctttgaagacttggctgcctgcgccatggattccagagctgtgcacgtgactgtgggtgtgtgtggggagtctgtgtatgtctctgtgctgcctccacacccaccgttacccggatccaaggagaccccttgccatgtggaaaatgagctccaatttttattagggagagaatgaggagggagggattagaaaggcggagacaggaaggtcccctggccccagcctggtccttccttttcaggcccctgggaccgctgtctcacctgggggcacctgctccctctttcctgccactcctcaggcctctgctgcagcccctcctacacccagctcagtgagctgacctgaggggcccccacagtcctggggcctgaagctctcctcatacagctggggatgtggagacccaggcaggggctgtggcttgtccagggccacacagtgtcccagcctcggggccacaggctctggccaattctccacgggtccccctcccagtggctcccaggaccagccccaggaaggcagctgagcttctcaaagcctctagaggcaagacacccaacagctcctcacgatgaagtgtccttggccagggaggagctggcggtggtgcaggactcatcttggggacccaggctgggtggggtgcgtccccgggcacagcagagcaagcttcgcagctctgaggacacgctgctgctgaaagatgcatagatccaggggttggtgcagctgttgaggctggccagcaacatgagtagcacaaagggcgcccctgtggaggtggaggatctaggttgggttcaggatggctggtggggcacaggggcatgcggccaagcccaagtggccccgtcagccctagccacggctacacccaccttccagaggtgcctccgggtcccacgcggcccacagctgcaccaggaagaagggtgcccagcacagcacatagacgaccacaatcactagcgtcatcctcacagtcttggccacagctgctgacacgtgggctccctcaccggggctgcctgtccggcgtcccctgcggcgccccccaggcctctctgatggccctggcaccagactggcatgaatctcccggaagatgagcacctggcaggcggcgatacccagggtaggtgccacgaacaccatcagggcaatccaggtgacataggtgcgacggccccagggctccgcaaagcaggcccagcagtcagtgaccccgctgccaccttccacgttgcgctgggcgaagatgaagagctggggcaggctgagaaggagcgagaaggcccaagccactagcaccggccggttccagtgagccccacttccatggcggtacgccagcatgggacggcagatggcacggtggcggtccagcgtcatggccaggatcatgtaggaggaggcatacatgcccaccatctgcagatacttcacggcccgacacagggcatctggcccacggaagcggtcggtggccttccaggccagctggggcagcacttggaacagagccacggccaggtcggccaggcacaagtggccaatgaagacgtgtatgggtgcccagtggccccgccggccccgccgagctagggccgccagcaccaggccattgctcagggccacagccacaaagactatggagagcagcgccagctccgcccgggctagcagcgggtcccgggtgtccagtggcctctcctggctgctgttgctgggcaggctgggcagagagggatgcccaggcacagctgggcaggagtcgggaagagggcctggttagagagggtgctgtgcagggggactcaggcctgcctcccgtgcccccatccggacacccacttcctggctcctagcagaggggactccaggaaagccatgttatgagggatacacaccccaggctcatgcagtccagaaggaagggcagccccagccccagccccagccccagccctggcggggaagtggggctgtgctcccctccccactcattggcagcctggagagacacacccagaggtgagggtgaaggaggtctttagaaagaggggcttccctgaatcgtcaaacccactctgcccaccggactcatggaggggcaagccttaccggaagtggtggacgccatgagcatggtggggctggggcaggtgttctgagggcctggaggtgatgtgcggactcagcctctgcctgaggagcaagttcaatggcccagggtctctggactggagcccttatagagatgccagcatggcagatgcctgttggcgtgtgtgcacgtgtcggtggcagtatggccagtcctgggcagggaagattgagagggatggtcagacagacggatgcacagaacccaggatcccccaggcagcccatgagtcccgggtttgggagtgggcaccccagacagacacgcagaactcccctgccccaaccgaggccgagagaggccaccatccgagggctggggactgggcaggggggcaggcaggcgcagccccttacctggctgggctcctgggcagctgggcggtggcgtgaaggtggctgggtgctcagatctgctctccatcggctgccctgccctggcccagcccagcctctgggagtgacctggccaggaggggacttcctccccctccccctttcccccaggcctcccctggcctcctgtttcccttcctttccccagggcctccctggtcccggcccaggactccctcctcccactgccatagcctccacgcccaccctcaccctaccacgcccccctggttggattgtctgggttggcagtgctctgggaggtcacttagttcagcattcccattttataagtggggaaactgaggccagagagcggtgggtctggcccaggactgcgctgctttttcatgggagcttcacgcccccttcccaagttggggtcctcctgctcctcgctgggcccaggcaaggaaggggtgaaaacactttcgctgggcccctcccaggcccacgcaggcccctcctcctccccagttagggcccagttggccggagacgagggacaggaaagggaggagtggggcaggggccaagccaggcttcacgaacccctgtgagatccagggacacccccaccctcttcctcctgccccacctgcaactacctgtcctaggaagaggggctggggacctccgtgtgctcacgggctccctcccaccacacacaacctcacatgatacagccacacagccacaaacacacaacacagagacgctcgctcatgttcttgaacataccatgagtatggacgcaccttccctgtacctgagccctcctcctccctcccccaacacctctctccttcccctgtccccacaccccctccagcccccatcccagtagttctctttccactccccccgcacccaggcctggcttggctcagccgaggccagcccagcccagcccagcccaaggcagctgctttcttcctgtttgtctgtcttctctgttgcctgtgaagccagagaccaaaacagcctcacggaccaggcccaagtccggcccgcggccaaggcctcctcttcctgcccagagagcctggcagcaccctggcccctcccggccctgttagggtggtgggaacacagggtgggcattttccagagacagcgcacacaccacaccacatacatacatgcacacagccacacgccacacacacatgcacccaccacacacccatacgccacaccacacacacaccacaccatgcacacatatattacacaccacacacatgcacacatcacacactcccatacgccacacacccacacatgtacccaccacacagccatacacaccacgcacctgcatgcacctcacaccatacacaccacatacgcacagccaacaccacacacgcacacacccgcagcacacacaggtgcacatcacaccccgcatctttgccatgtttttgcagagccccttgggggcaggctgcagagtgctggcaccccaggcctgacgcttcagctgcatctcctcagcgcatgcacatcctcatgctgtccccaataaccgcatgctgtcactaatctaggagcatagaaaaggccttcctaatgccacccagatcagtggaataggagatggcttccctcaactggcagagaatttggggaccctggctggggaataggaaagcaaggctccagcccctgcttggcccctgcccagtagtgtgaccttgaacaggccacgccagctcttggcacctcagcttccccttctgtgcaatgggacttgatgattgagggagactacggtggtaagatgggcaggggtggggactggcagggccttgggaaagcctttgttccctccgtctaaagccggctagggcgaggaatccatgctaaccttttggggtgagcagacaaccatctccttatcagtttctctgcctgaacgaggctgtgcagtgccggatctcagcagcaggttgggacctcccctagcaatgtggccaggcccgtggcaatctctgcccccctggactcctcgcttcctgttgttaaactagggaagaatctggaggaagggcccgcatggcggtctcctctgggatgcaagaagccagatcaggatccagtgccattctgctcagccaggaccccggggaggaactgggagccacatgggcaggcactacatggaactgtgccaggagagaggccctgggcagccacccctcgggggccaagaaagatggggctgggcagcagctcccatgggaagaagggcagactgtgctgattcacgctaggcccacatgagtcactcaagcccctgcccttgggcgttaacgggcagggcatctacctgggggtgtgccaggcccccactcctgccagcgcagcccctgtgtgcacacctcccactggtccctctaagacttgcagaaagggctctgtgagtgccaaggtgtggctcctgatcttccagcctagtgtctgggcagaagaggacaggaggcagattggggggacactgtttgtccctctctatctaccggttccccatgatcagaaccttccattcaccaaactgcaagtgccgctggcctagcactgtggctgcagagatggaaggacctgggctctgccccaggagcacatgggcttctgcagagaagagtggaggcagggaggctggtggaagctgtgcctgtcacccaggagagaaatggtgcgacccacttaacactgggcagcggggctagagggagcaggcaggtggaaaaggcatttaaagggccctgaaggatttgtaaggggtggaagacaaagaggaggcagccaaggacgaggagaaagaggcccccgattgtgtgggaggggtgcatgtgcagatggtggagcctgtgggcagtgggaaggacggagccaagtgcctgtcaacaggaacggccctcacagggactgtgacccgaaggagaatacctagagcccaggagatagggaggaacaacgggttggaggatgggattgaaggggacaaaaacaaatttaataaaaactcaagtgtacttgtgtgaatgtgagggtgtgtgtgagggtgtgcgtgtgtgagggtgtgagagtgtgtgagggtgtgtgtgagagtgtgcgtatgtgagggtgggcgtgtgtgtggggtgtgtgtggtgtgtggtgtgtgagggtgtgcatgtgagggtgtgtggtgtgtgtgtggcgtgggtggttgtgtgtgagggtgtgtggtgtgtgtgtgtgtggcgttgggggggttgtgtgtgagggtgtgcgcgtgtgtgagggtgtgtgcgtgtgtgagggtgtgtgcgtgtgtgagggtgtgtgcgtgtgccaatgatgacaggaagacagcctgcggatgatcatctaattgtgtccattcacctaagtgaataataactgggaaagctggacagagcctgtttatagctgcggaaaggcagcccatggaactggatagattaagagcctcgcggagtggaagggagggccagggtctccagcaggtgctggggtgaggggcggggggtagaaggagggtgagcgttgagggcttgagggccg

SEQ ID NO: 98101 - DNA, 144857 bp, Homo sapiens
  misc_feature (1)...(144857): n = A,T,C or G
ggggtaaacgacagggcagatgcaagcctgttgggcctcttttctctgagaaggcagtggctcgattggctgccgagaaaggggttctttgggcatccatcagaggatggctgggtgtggaaggcccaggggcgtcctatttcctttgggactgtcttgccttatgtcttgtgatgctagtacccatgcggcaaacatgactggcccttagatgggaattttctctaacacaatcctctgtttaagcctccgagttttctattccttcaggcatgcccttgatttgttgcaaatgaaaatatgtgagtaggccaggcgcggtggctcacgcctgtaatcccagcagtttgggaggccaaggcgggcagatcacttgagatcaggagttcgagactagcctggccaacatagtgaaacctcatctctattaaaaatacaaaaattagccagacacagtggtggcgggcgcctgtaatcccagctgctcaggaggctgaggcaggagaatcgcttgaattcgggaggcggaggttgcagtgagctgagatcgtgccgctgcactccagcctgggggagagagtgagactgcattccgcctcaaaaaaaaaaaaaaaagaaaaagaaaagaaataggtgagaaaagatgcaaacagctggtgaagagatgatagtggtgcgtttgagcagtgctgggtctgccctgggtgtgtgtcagtggtgtatttccctgcgtgtcttgcttcttgctgaggtcacatgcctgtagatggataatgggaacttgattgcaaggcgtcccttgtctgatcagaattaaatgatcctacagacaggaaaacgcatgccagatgggtcctaagggtaagagaggagctggtgccacctcccagaggcctgtgggatctgcctttgccatcacactccactcctgtcccctctgttcttcctgtggcctgcccaagggggtcatttcttctcagcccactgggtgctggttactgagcaccttgttattagagggacctggctgcccccttgcggtctcgctctcatcctccttccgtctcccccttccctccaggacggctgatcaccattggcacacacggtggaacagctcagtctttgagggagtgggggaaggacctggtgaaagatgagccagagggccaggctggggccagactgcagagggcctcgaggcccctctcagggcagggggaagaagtccctggaaggtgttaagtggccagtcacatggcctggctgaggcttaggagccagccctgtggctgctgtttacacatgggatcagagacaagggaaggctagggagctccccagaccccaccctgtttctccctcagcccagtcggtgacccctcactctggtcagccttgcccccagccaaagagctccaggtgagaaaagctgggtctcggatgtctggcctcctagtagctgctggggacagcttgttaggcgagtgggttgggtgctatgactataaaatagcaggactggatgtcccatatgccccgggaaaacctttcttgtttatattcacccctgccccacagttgatgggtttaaaagagaaaagctaattaaaggtgaggccttgcggtgatgctgagcaaggagggaggggttggtccttggggaggctccccacccccctgccggcactgcccgctccggggggcttctggcagatcctgctccggttgatgaaaacacagcttcaagttgtaaaaagtgctgatttaacagaaggattttcagtcagcagagctatttataaaaatgcaaaaatacagagataatggagatgctggaaaggggtctgcgtggaaacatttctgacgcacagtctttaggacactgctcgtgccgagtctgcacacggcgccctcggttgatccatggtgcgcagtgtccccgtgcctgcttgtcttctgagaaactgtgggagcctccccatggtgccttttcatcccggctcagcggctcggcccccggagctgcagggcggcctcagtggcagccaaagctcatgggatggggtcccattgtccacctgacgcgagatcggtcaacgcctcaggagactttggccgctccaggagtttggatggtgaaaagctcctgaagccaacagcatttccatgtggaaacgctgtggtaggaggatggcctgataatgcagctttgtctctgctccctccagatgcccattcaccagaatctcaaggagctgctggccgtcagggcggagctgcagaagcgtgtggagggtctacagcgggaggtggccacgcgcgccgtctcatcctcatctgagcggggctcctcgccctcccactccgccacctccgtccacacctcggtctgatgggcgaggtcagcctgctgctccactgtctcccggtggctcaggaaagggacctggcgatcactgttatggctgtagcttgtgatcttgtcttttaggattaggcccagggaccatttgtgtggctaggtgacagctcccactgttggcaaccgttaccctcctgtcagcggtttcacaggggagccgtctgtcacgcccaccctgtgaagcaacttctggcattcaggcagcttgggagaaactaagtgaacggaatgcagtactgaggttcaagaaagctgtacgccatttctttccaacttaaatccttcagtaacaacaaacaccactcacttcaagatgcattgccagccccgtggcttccctcagctcttggccacaacttgaaaactgtcttgaatgaagtacttggggagaagacaggccactgccctctgttccacagttttcttcatgcacggggtcctcctgttaacaattactgttgtgtacatataaggtatttttagagaagagaaacaggcctttattttcctatgtccttttttacgtttagaatagtcacccgaggggggatcagctcaactgtactgtgggagaaattcttttccaacaaacctcatgctcgtttttctgtggtgcaatttcaagggcaacgtgttctgtcctcacctcactctggtactcgcctcttggggcggctcagcccattcatggggatggcaccaagcggccatgctcagtcttccagccccgctgagggtaaaccgaggcctctggcagctgtgcacaggtgctggcctctggctccttcaaggagcactgcctgtcactcgctcctgggctgtctagccatgtctcccacccccactttaccgcagccagctgctgggatcaaagcaagtctgttcttatgttatttgcctgtatgaaatcatttctcattttatcacaattccttcaactcagcttactcgcgtggctgcctgttcatatttgaaagcagccaccgtgctgtggctttggtttggaaaagcatagcacgcacttcccttggttttcccttcccagagccgaccgcagctggtcagccctctcttcccgctcctgaacctttacttactgactttgagctctgtgactccgtcggttctcgcaggaattaactaacttaccaattggttcaatccacttgagcgccatagctctgagctcctctgtgtgacatgccacagatgactattgcacacctgggtcctgccccagcaggccatgcccctcccatgtgccgtgcctgttgctgcagctgcccccccaccccgccactggctgcaggaattcagcctttagaggcagaggcagctgcagcggcccctgaggtcaaaccccagtgtgactgcatagcagtgttagctggttggtttcaaactactggattccaggcaaaggcctacagattgaccttattatttttgaaaatatgttaagggttttttcatagagagagaaagaatggatttttttttaactgggaacctcctgattcttacggaaaattatccttctataagaagataccagagagatttattcaaggtaatttgataacctaaaatcaattctccattttttatcatatgtgggatttgttgctaagtcgtgttcaacaatagcttttatgttcctaacatatctgaaagcttatttatgaatggatatactggattattgatatactgattttttttttaatggggacatttgccattttcttcccagaaatatgtaatcccctggctgactaggactgttaaacatagtgtggactggatgatgccttcgacaaaccagagaagccaagttggggggagctggtgcctggagtgggccctgtgcacctcacctggcggaggctgggggggctctgtcagcaggaccctagaggagactctcattcgattttaaagaagcacaacgggtcattttcctttgtatgttcctagcgcagaactgtttctaaaacaacttgaagtatagttttgttatctaagcaatttttgttttaagtaagtaagtgtactagaatgcgaagccgttatggttcaggtttttaaaaactggtacagtattgtatttgtctcatctgttgcactgtatttcaatcatctgtaattaaaatgatcatatgtttgctccctggtcttttttaagtaagtaagtaagtatcttagtagatttttcctttgaggaaaatcggtaataaaataacatggattgaatgtttactgtgcgtcaagcacagttaatatatgatgatgtaaagtaactaactttatgtgatttaattcattcagtaaattgtaaatgtatcatgagtcttaagtaagtaagtaagtaagtaagtaagtattttggctgaaacaggaaatactgattgattgattgattgattgattgatgattgtaaagtcagaaacgccctcagctctaaccttgagaaaacgtggacgacttggggaaaggtctggagacacctgagaggagccagtcagggtgatgagtccttcgcatgcaagtgcagtgctctctaaggcctcagactgcccccaccccaaaggaaggggcgttcaccttttcagggccacgaaggcctggatgaaatcacaccaccccctgtgccctctgtgtgttgtcggtcttcttgttaagggtgtggggtccctgtccctctccacacacgttactactgagtgagccagagagcccggtattcactgggcacagaggatgcccaggggactgcttgccagccagccttccccagcagtgagaccatagcagctagccatgcagaactcctgcacgagacaggcatatggtggtctcgggtttgagaggacctgatgctattatttcactagaagccgaggttggcaaaacaaaatgaaaaaacaaacaaccgacctccatgttaaaacccagggtccactgcatcttgtttgttttcatgctgaaatgccctgaactgaactgtcgtcttctcaatttgaagccaacatgcgagctgatgagaaggacatacttcatcccaaacgggccactctccatgaggctgcaacaagtgacgaggtgcagggctcctttctcacccagctttctggttgaaaaacaactgcgcgttaactggaacctccactggttaccagcctgcttggaaggcggcagagcagtcgacttgggatttgtgagcctgggactttttgctgcttccaggccccggactgcgcaacccatgtagcccgggagcggccccgcagcactctgctcctgcctctgccctctctaaccccaggacattggtcgctccacatcccctggccttagctgcttgtacggtgaggagtcacccttggaagtcctgacactgagccagtcactgaggggtaaatgcaagaattctaagcttctcgagaaataccttcagctgggggcggggcggggggagggggaggagggcagctctgcatcataaattacttactttagggaaaagtggcaacacttgaccaagggcgtgccttaacaccatcagaagacaagaatytgctcggkgccattttatttaatgcaaacactagacagtttacaagtcacacctggacacaagcacgtgaacagatgtacagggaattctggaattttgagatcagtccccatttcttcctcagggccctggcactgaaccccagcccctgtcccagagcctcccctctgggtcccaccccagaagccacgcacacctccttccgcccagctttatctttccttgagctgtgacttcacccagcatgtgctcagagttgttacaaattttctctgccaaattaagctgayagagattggccactttcaaccagtcctttcagtccactgtgtctcccctctcgcttgggacaggcccatgctggccagtgcaaccttcagatagacacatggtgaccagagcccgccaggcttctgcaggtggcagtgtcgagcaagtgtaagatgtctgtgggaaggagaagctcctgaaatgaacgttctgcaaacagaaggctgaggggtcttccaggcatgtccagtcactaggagctgccaccggtgggcttgagtgccaggctctaggctttgtgcagaaagcacccggggcggggggcggtaagggagagcaaaatgggtctctctcaactgcagtcagtgctcctgggaacacggtctcacagacagcacatattctacgtcacagctctagggtttcaaggacttagccatccracaggcctcaccataaaggtaaagtggacaacccctgaggtcacgctgtccaggtggcgacaggccacgcatgccaaaatcctccatagccacctccggcccagcaccagccagagggtggggccatcggttctcgacatacttggtatcagggagggacaagcctgacaaagttcacaatctggccaatgagtgtgggaggccctggaaacaggccaatcctgcaagccaccccacccttactaacttcctgaagcatgggaagcttctcgagaccaggccaaggtttctttccttcatggcaccacgcagaggcatttctgcagtgctgcaggtcccccttcagccacacagtccaggtctgtcagggattaaagggccgagcaggaaaaggggtggtaaggagctcaagggcacgcactgggaatggcctcacaaggcagccttgagacgcacagggctacaactgaccaccctccaccacaggcatgtttgcaaaacgaacacgaggcatgcgttagacagatgcatgtgggggctgcagattccagtggtttccttaagaaactggagttggctmatcccactcagcagacaatcccgctcagtggacagcctatgaaacgcatggggccatcatgcagaccaaagaggcccgtgagttttgtaagatcctgcctgtctggtgactcatatctgctttcagaagtgctttctgacacagcaaactgactatcagtagacaggggccctagaccctagcatgtggttctgtcccgtgagcctctgacaacagagctcaccgggacagaaccatatgtgggccaaaggaacattccaggaaaccagctctgctccagcccaaaccaggcagctccacgccaggtgaggggcgagtcatggggttcctgtgtttgccacggtgagcatggctccccacgcactctccctcagagcagacaagtaggctgaccacagagctacaaagtcacctgcgtttcactaaaccaagcgaatgtctctttcccctctcctcccccgccgcccccaattacatttttaagcaaacaagcaggattctggctttgatgctcgttcttgacatcggtcactcttgctaccaaaacagggacacagggtggagggtgagcacctctccccaacacaggataaaactcatctccggtgcagaaatgattgctaaagacctttctcatgtcaaccggaaggccacacccagccccctatggaatcagatgggaaacaggcctacgaattgcttcatacttatccggaagattcctaagctctcaaggcaggactatcacgagatgcatgtttgtacttaaatcactgaaagcctccgcttggaccggctctccggaagcccagcaacataaaacctgggatggggaagactgaagtgaaaccatcatcctgggtgctgcgtgtgtgtggtgttacttggtgctgaccggttcgctccttgcaggggctccaagtgggtgcaggctgagccccccacctgcagctccttgaggccactgtcaggggctgtctattggcagaaacctgccacaatgagccactccagtgtgcaggggtcacagtcccttgagttcaaactcttgtcccctaagcataaatgtcatcaggcctcagcatcatcttggcccccgcatcctgtgctcagtaaagctggaggcaggctggctttgggagttggtggctcagcagctcccgaggctggtgctggctttctatcagagctggctcttgaatttcggcaccaagtctcagcacgcttggggcagggcagagaaaccaaactcacaaacacccagagctcatccgggaaactcagaccaacaaggagccgatggcacagagcagcacagcagctgcgggtccaaatgaaggggtggggggagccgggtgacaagcggtggcaccattgtgcatgcctgcagctggacagggccctcagatccgggctggttcgggyggcggcggcggctctgcagactgcgtgtgcaacgtggagtatttcactaggggaaaaagaggccgtcagaaggaattctrctctgtcttrcacagaagaagcaaatacagcagcaagcccgtgctgggaacagaactgggtttccctttgtatcccctggggggccgcttagcaaccttccctcctgagcctgggagcagttttgggccggtcaaggggagagaaagagaaagctggacaggctctggaaacagctcagcctccatctcctcacctaaaaaatgagcgtgttcctgccagcrctgctggaagggttattttaaacaaagggctcaacctagcacctgcccacacagatgctggcctcgtggtggctaaccgtggcaaagctcatgacagtggatgcgacagcggaatccatttttccacatctgaacccaggcctattttagttcatttggtgcagcactgccacccgtcttcagcagcattgtagggcacctggctcccagtacacaccacacaggctgagcccctcctggtctcccaggcccagtccccacggctgctgcactgtagttccactggcaacactcgcctgagctgtcctagtctccctgcctgcgccaccaggcctcggctgctccccgaccccagcaagcctttccggacctcctcattggcatcccgtgggcacaggtcatatctgcctcgagcagttgggcactctaggcctgtggcctgaacttatgcgacctcaaattgccaacagctcctgaatccagaaagtgcttgatgaccacagaagggggagggaggggcacaggtgttgacaatagggtctgggttttacccaagttccctcttgcctgtggcaatttgcaaagggaaaagttctaggtctaggtgaaaagcttccccatggctctgttcaggatgtaattgtattcgctgatggggagcagaggtgcctggggctctggctcggacggacgaatcaagggcaggggccgagcagccgcaatgcccagaagtcacaggcatggcagcagatggccctggctgtcaccccagcatctttgggctcctgaaactgggaggcaggctcatcagggcaggcttttgctctggccrgacattctagaagcagacgcctctgtgcttccctgcttctctagcacagttctgctcagtgctgggaccaactaggaaagcgtcagcaagggacagtgagtacaaagttctcaccttggggttcctcacataccacggcttccaggttctctcccttcacgtagtctgcgttgagaccctctgcaaagggaaaagggcagagttagtgatgcgcacaggacctaagggtccccaatcgtkactgagaactcctgaccaagtcctctgcagctaaaaaagcagcacagctcccctggggaactcaaaaccctgcaccctgagccacctgaacatccttatccggatgaagactgttcgtcccagaattcactgcccaggagttctcatcatcgtcctcagaaataacaacracatgcagcgaaggcttccggcactccatcctcatagggcagctgccaccgcgtcaagacggcagctccgcccagtggagggggcgcccgatggcagggctcagcaccatccacaggtccgtgtgcgtgtgcggcccgggggccagggagccaatcgctatgagtgattgatggatgcagggcagggaggggcggatggctgagtggggctcagcatgtagatgcagcaaagcctcctgccaacatgcagcctcccagcaacacccgcgcggaggccaactgctcctcccagcagcaggaataaccgctgtgtccacctgagcttggaggggccagcccaccagcagctgcttcagtctagttagttatctaggctttctctacacctgttacaagagggattcggggactgtaccaagcattccctcccgccagcaagggccagtgttcaagttcttagagtggaccccacccctgctgctgcttgcagagagtcaagagtctgtgtctcatccctgcgtagcacagggactggaacccttcagccccgggtctgtgggaaaactggggcatggttccaaccgaccgaccgaccgaccaggcaccagtgcaagtcaagccatcgtccggggctacaggctccttgcctaaacaagaatgcccaccacctgcctgccccggtggctgctgggcttgaggtgggagccaaatgggcctgtggcaaatgcgggcgttgctctttggcaggtgtggccggccccacgcagagcggggcaggtgatgagtgcagtggaagctgccccaggtgcaccttcccagctgacaggtgggggccaggagacacaccctgagcctcgtgatcactgctagctgccaacccagtgggcgctggatcgtctccttcctgtgggtggccctctatgtgctccccaggcatgaccaccagtgggcacctgagtcctcaccatggcacctcaactctccccccacccctgccacatccagcctggggacagagtgtctggcaggtggcatcctctcacacgcatcagggtaagctaaagatggtcctggttacagccacgtcggtgagtgccagggaagcaggagggagaagagcggcaaggaagcgccagagcagggggcgaatgaggaagcatcaaggctgaagcaaaaggaaagtgaggaaggcaaagcagcgttaccttgacctgctgctgcatctgaaggcaagacacaaagcttagaatccctggagtaagagcgctcctgacagcaaacatgcgggctttccacactgagggcaaaggcaagggaagccaagggtccccagcatgggccttttggcagcagcagaggccgagagcacctgagggccacagtggtgggggcaggccttcctcgcagccacctcctgctgtctccccagagcttggtgttctgcaccccggtcccctctaccgccatctccatgtggcagtggctgagactcaggggaaagagtggggacaggaggcccaacccccagcttctcagtgttttcagccaccccacaaacgtctgcgggactcctcctgattctggcccgggccaggtgccagggacatgatgtacacgcagccccgccacggaatggacggtccagagactcctgatcacggagggggcaaggcgagctgggagtcgcacactcagaaaccaaccggcccaatcccgccccatgagcaccaggtgaggtcagcagggggcgctgtaggaccacaggctgggagaggctgctccaggcctgcagggcgagaggagctaggtcaggacgggggacagcagaggcccgggatggggatggaagagcacctggcgccctcgggaagtgaaaggcctctgggaagcctatggaggggaaaggatgtggttgggaccaaaccatgaagggcttccactgccaaactcaggctcagccaggaccttgagggcagcaggaagcataagggggatccaggcattttaaaacaggtcccgctggaggagcgtgaggtgtggaggagactgcacaggcaaaaaggtctatggaaccttttggacgggagatgaggagaagaccttggctctggactggcaggggccatggcaatggtgatagggaggtgtggctcaagaggagacctacacaggtggcacaaatcccaggactggggaatgcacggacatgaggtggggggacaggaggactcccagcctctagcttggggagacagccacacaggaaggcgccatgggagaaggaaggttggaggggaggggaagggcactgaaatccaagatggacacactgggccgacggggttcctgggagctgccccgctttgcctgctgatccaattcgcaaaacctcacactggcccgttttaggaaataagcatgaaaataatgtattttcctttcattttaatgtcccacagagacagatacaatcaagatgttcactttgtgctttggaaatcaacctatttttctctctctgttcctactgacacctgagcagcctcaagccagcctctgactttttaattccagagcagaaggaagtcgagatacccttgatggggaaactgagggcccagcaggagagggcccaagccggccaccctgtcygctcagcccaagaactctccccatccatggccctgcccttgccaggccgagttacagggctggcttttcacccatgtgcagagcccggaagagaggcaatggcaggtagctggcaagcgcacgatgcccgggacactgctcttacgaggaactacagacctgtagtttaaatagtttcttttacccagcatgctttttaaagtctcaaagccatcctttggcctggccatctcacccagttttgtaatgggcatggatgtgaaaactgtggactgtcgcatctcaccattaggctgacgatgctatagtgaagaatgccccgccccatgccaaaaaagatctgcgtgtgtcctcatccctggaacctgtgaacatggccttattcaggaacagggtctttgcaggtgtaattaagttaaggatgttaagatgaggtcattctggatttaggatataaaccgagattggaatgatatggccacaagccaaggaacatccggagtcccctggaactgggagagaatcaacttctgttgttttgagccactcagtttgtgactctctgttctggcagccccagtgaactcatacagctttggcaaacctcaccagtgagaccttttggctcccagggcattagccttttcgttcaaagagctcacaactactttgttgctacgaaccaaacctccttgccaccccagccacctagaaggggaaatcatcagaaaatcaggccaaaatgtatctgacatggtgcttccagccaaataagctctccagcaaaggtccacacaggagaagccctctagccagccaccaggacctcccctgccactgtggcctccattttgaggacatctttgggtgtaggattttttttaataataaatattcgttcaatgacattttagttaccaactagtttagtcagtcatacaggaaagatttttctgtcagtcagttctaactttgtcctacagatctggtttaatctaaatctgggcttttatcttttcccaagaggccaccttgagaacctggatgcttatccaaaatcttcactcctctcctggcaagcgggatgctctgagttgttctcccaaagtgtccctggccaggtccttgctccctctcctctaaaacagggaggggagacgagtatggagagctcccagcccaaagagcagtttcaaatgaggatccctggccgtggggaaggccatgtggattgagctgtgtcccagaatccccatctcgttccaatccacctgccggagggagagcccacggaggacagccttggggcctcttgaacagaaaacccctgtattaggcggcttctacttttttgccaaatgcaataagaacacggtcagagatgaagggctgtgactatgtacctggttgccctgggctccttgttccaggcacagcccaggaggctgatgcaaaacttcccccgccgcgctaaatgcaactcgaccctctcgcccaatgtctccttctaaatatcagtgtccaggcaattagaaggttggattcccatctttttcaccagttagaggattccttgatttttgatttgagggaaaagggtaactctaaaaacaatccattccccagccctggactctgtctgacccattccctgctcatgccactctacagtcaagcttccggatccacggtgggtccgtgggatctcaagcagggtggccatgaacagtttcgcaggctgcgcactgacatgtcaacgtgctcctgcagtactgctgtgcctgctgtgtgtgtcgccctggtcaagaatgttctacaagagtgaagcaaacaaatatgatggtcagattaataaacagttggagacttccgtaaagcatcttgggacccaggttagttttctgggaagctcagctcaggctagacttaagggcggagggccacagcaagggtagggaaagacccacgtgggttgcttctaagcttcccattgcatcaaaggggccggggaaggagtggaaagagacaagctacagctgagtcacattctgtcacttgaactgaaaattgccagccttgaactggagacacgctccactcagcaaacagtgacagagcatccatctgtgcttacaaaagggacaagcaaggtcttgttccctcaacagcatccccacagggctgcctgatgtggggcgccgatgggtgaagacaggattccatttgtaactattccattaatctatgacttccagactcacagctacagcatgagatgaaaactgtcttttaaaaacctagtaaagggtggtgggtcgggggggaaccacaccattctttctctcacattcctacttctttggagcaattaatgattccatacagtttgtggctcgtagggggaagagcaccaggcagtgacttctcacgatgtgacgggggcactgccagagcaataagggccgtgctttgcaaacccccaggaactgctgccctctgctcctgagggagccagcagcatgggagggagctggtgacgcagggcctccaaaggccctcatccgcttggctgaggtctgaagctatgggtgcagtccagggtccctcccattctacgtgaaggaaacatcacagtggtcactgagctctgtccccacagaaatacccctgggagctggggccctggaaggtgaaggtcatcagggccagccccacgcgctcttgcagggtggtttacactttaattcagcccagatctgtccccagggatttccaaaactgttgcctccacccccgtcccaggaagtctgcttgggagtgggtctcaggcaggctgtggagggatctggatctgtcctggcccctttccctccaaagaccttgccagctggttcctagccacgagtgggtggctgcacttacgctgaatgctgaagcagaacttcttctgctggtaggagatgtagctggagacggcaccgatgagggccatggccagggcgctggccaccccggcaatggtgccaggctctgccaccatgcctgcgtgaagaagggggagaaatgaggacaggtgaggtcagagacaaagcaccgcagggagcagcctgggagcctgcttctcctctagcaccaaactactagacgcccccaacccccaagccagcaggagagggccatgccacacagatctacggcattacaaagacatggtgccccttggatttgcctaggacttctcgttttctgtaagggcttcacttttgaggagcttgaaagggagacacggaaatggtgcagagctctctgtgactgacgccctgcaggcttcccactgggctacttcccccggcaccccaatcttcatgcttccttccttcaaatggctacacccctctattggcctcatgattatctattggaaacgttcaggggaaggccaactctgagaccagagtgggtcagcactatgtctccttgtagctgctgtgaaatatctgagatgggcctcaatcaatttagaaagtttattttgccaaggttaaggacacacccatgacacagcctcaggaggtcctgacgacacgcgccaaggtggcgggggcacagctgattttatacatttcgggagacatgagacatcaatcaatatgtgtaagacgtacattggtttggtccagaaaggtgggacaactcaaagcaggggtagaggtggggtgcttccaggtcatagggagataagagaaagagacaaaaggttgcattcttttgagtccttgatcagcctttcactgaatacacaattttgtctggctcagtgaacctgcatttttacataagcaattgggcagaggaagcaaccagagatgcatttgtatcaggggagcagagggacggctctctctccctctgtaaagatcagctatcagtttgtattgccagggtgaaattcacagaactgttttagggtaaagatattgaggcccataagaaatttctttgtaggcaaattgtgagggaggcgtgcagctttttccatctttgcagctatcttatttaggagtagaatgggaggcacgtttgcctgatgcagtttctagcttgacttttcccttggcttagtgattttggggtcctgagattcattttcctttcacatggccaacaggagcctcaggattcagaaacccaccagatccagggtcgtcattgctgccgtaccggccatcacctgaagaaaagacaaaagcacttagtgccagcgaccagccagctcaggctcgagctcgggcctccgcgagacggatggcagtgctggcccttccaatcccacctatgcgacaagacccccaccagtggatcacccgtaggcttctactggactgcaatgaggcctgctttcttatgcctaccacctgcaaagcccaggccaccaggtggaactttttattattaaaatggcagccaccttgccctgagcatgcctcacatgccgggctctttagacacagtattctatttcacctctttgctaccagtggtgcagctgcactagcggcctcaccataagtggggggtggggtggggtgctgtgccgggacagcccgactttgagtgccaccaccacgggtctctgacgtagccactgcctcaactatagctgaagttgctcttggaacataaacaaatgtaggctcacaatcccttatccactattttgaaattcaaaaggatctgaagtatcacagaaatggagaacagatgaatgctggcaggggctggtgagagttgggagggagggagttggctatgattataaatgagcaacagtcaggagccttgtggtgacagactgttctgtatattgactatggtggtggtcacacaaatcacacacgatagtactgcagagagttaaattcacacacgcacacacacacgcacgcaccccttccacagacagctactccctgacaagccactggtgccatttcagtaccttaattagcgttgagttcaccgttcatgccaccctcttctcagggccgaacactcattaatggagggagactgtgttcccagagcccggggttctcaggggaaaccgccctgggatattgaaggcaaatgagctccaacatttccttcaccaatcaaagagtcaggaggaatggaggttcatgggttgtaaaaatgtaccactctggcagggtgggggggtattgatagttggggaggctgtgcacatgtgggggtgggggaaacatgagaactctctgtaccttcctctctatttttctgtgaaactgaaactgctctaaaaaataaagcctattaaaagaaaaagattcatgttggtgtgctgcacccattaactcatcatttacattagggacatgtaccctacaacttaaagtataataaaaaaaaaaaaatatatatatatatatataaataaaagattcctggggaaaaatgaggtttgttatgttcccacctaaggctgaatccttgagctctatgcagtgtataaagatccctgattggatatgaatggttattaacaaagagcaccagcattaaaaacaaaacaaaaaaaaaacaaaaaaatacacacatacaatcattgctgttggagaaagcataaccaacaggaagatgggggtcactgtgtgcagccagatcaacagagaggtcccctccgctatgctggaggtggctgtcgtgatggcatcctctgctaatgtattcatgtcactagacttccatttttctggactctgagtaattcaacctattctttcacctcaaggcagaaggaaactgagtgttctcaggtctcctttcccttaggagtacttggccacaaggattcccagcaacttaaatatcacaagactgcggagcaacaggctgtgagaagaaacataaacaggtcgaaccccttcctaatttccccccagggacaaatggacagaagggctgactctcccagactttcaaaaagactcaaagctcaatagttcacagctccagcaattcctatctgaccatttgtgattgttggaggtcctgtcctaaaaagatgacaaaaatgtgcttctcttcctcctcaaaaaaagtgatcccatcctgtgggcaagtcttctcagatgggcatgtgaactgaaactactgtgaggctaagaaacatctggaagaaaaaacagccagtcatcttagatccttctgtcctttctcactgcatgaacctgaagtcagccacacaggccactggagttaaccaagccgaggtcatcgctttgagccacgctgggctaccgagcttcgcttacttcctctaggcacaggctgaaccccgttactttacaaaatgcacactgtgcaaaagatggtattggtgatgagtcatgggcataaaataaaattacccaacccaataccatccgtgaagatcagttcccagtaaaactaaagtggatgaaggcgtaaaagcactatagaaaaatttaggggtaaggaatttctattagcttggggtaaaaaatgactttctaaatatgatcctaaagccagaaactgaaaatggaaaagatcagatcaaaagtgaaaacttcagtactaaaagtgcaagcaacaaaagaaaaactaaattgggctttgtcaaaattaaaaacttgtgtgcttcaaaggacatcatcaagaaagtagaatgacaacccacagaataggagaacatatttgcaaaatatgtatctgataaggagctagtattgagaatatataaaggaccccttcagctcaataataaaaaggcaaatcattcaatctaaaaatgggcaaaggacatgaatagatgtttctccaaagagacatacaaatggccaataaacacatgaaaagatgctcaacactgttggtcattggggaaatgcaaaccaaaaccataatgagacaccatctcatatccactaggataactataatccaaaaaaagaaaaaggaaagaagacaaggggaagggagagagggagagaaaggaagaagtgttggtaaggatgtgaagaaattggaacccctaaacattgctagcaggcatgtaaaatggtgcagctgctatggaaaacagtttgattgctccttaagaagttaaacatggagttacaacatgactaacaattccatttctagatatatacccgaggtaactgaaaacatatgtccacataaaaatgtgcacacacatgttcatcgcagtattcataaaagctataaacaacccaaaggttcatcaactgatgaatgaatgaataaaatgtttatggaatatataagggcttcctaatctctaatgtaaaaggagtccttaaaatatatgagaaaatatgcagaaatatgcagaaatgagaaaatatgcagaccccagtaaaaaaaaaaagcgggcaaagaacacaaacaggcaattcacaaaatattttaagagtgtctaataagacattgaaaaagtgtttcacttccttttagattcaaagaaatgcatatttaaacaggatagcattttgctctgaacaaatctgcaaagataacaaaactataatgcccagtggaggtgataatttgagaaaacaggcacctgtttacttactagtggtggaaatggaggttggcacaaccttaatggaatatcattcagcagtaccactcaaagtgtcgcatctttaaaagtgtctgctttctgtacccagccatttgacttctgggaagttatctgactagggttgtgcacatttggctaagacaatgttcatcacagcactgtgcagagcagcaaaaagctgaggggaatctctgtacaaaaatagggtcctggtgaaataaattatggtatatcataatataatgtaaccactgacacggtattttagaagaccctttaatgacagagaatgatattcagtgtattattgaatgaaaaaaatggtttcaggatagcatgatcccatttttatttttttaaaaatcacaaatatttacaaatatatacttgtgcatagaaaaagtactccgagcacgcagtcagaaatattactagtgattcttcctggatcatgaaacaacaaacaagtctttttcatgtaatttgtaagaagttttaactctgcaagccccatgcaaatctatccacccctctttcccacagctggagagagagctcaaagaggcaatttcacaggtcactggcggactcttcagtttcagtatgttttgtattcccacctgccttctgagttcacaattatatgccaaagagactacagtagctttctagtagaccagaagtctccctgcacagtgtatcacatgctgcaatttgctttgagtatagatacctatgcatataagtagctgtatggactgccataactctagggactgctgccgttgctatagccacaccatagcaatagggaccgtcactgtagcaatagtgaccactgccatagcaggtctcatagctataggaacctctctagctatagcaaccaccatagctacagaggccctgtagaaaggaggcatgacctcactgagaaagttgtgaataagccctgcgatcaaaggaagcgtcagaccctcagcatctcacagacaaaagacaatgctatacgcatacatggcagccttgattcctacgtagccatacatctgggggaggcggggatgcaccacacggagctgcccttctctgacagcagcacaacctgggctcaccgtgagtgcctgacccacctggttgccaagggcatggagagtaacgtaatggtaggaagattataactgctgggggagatgttcaagtatttaaagacatctataagtgttctagactcttctaatagacatagctagggcttttagatattttagaaatgtattttcattatctaaaaaaatggccaaagtgcaaaataaaaacaacttttaaaaaaatgaataaacaaagagaagaaaatcttgcatcaaataccccatagttaccaagtcaaactgaactgaaaaatctaccaaaacatggctgcctatgctagccactggggagggcactcctcactgttccaggaagtctccaaggcccagattttatccatcccccaccacagggatgggaatgccctccctctaggtaatataatgggtatccccttccaatctgatacagacccttaaaactctccttgtcttatgtcaagctcctgagataccagcaaggtggtcatctaggacaaaagccatgttcacgccgtgttcccaggtacgtgtttggggaaggggagtctaagggagcaagtgggtctcttcacatcacagaacaccagagctggggagctattcctcacatctgaaacatcctatttctttacatgttatgaaagctgaaatgaatgtggaaataggtccaaagaagagaactctcaggtatctcttcttagaactaatcccatcacaaagaccccaccttcaagacctcacgtcacccaaaggccctaccctccaaataacatcctattgggggttagggtttcaacacatgaattttcaggagacacaaacatttagtccataacagaaagggatcatgagagggcccagatacttgaagacaatgactgtaaacacagtgaaaatggaagagaaatgttttcttcaaaaacccaagagggtaaatggatagataaaatgtggtctagccacacaatggaatattcagccataaaaaggaaggaaatgctggtgcgtgctacaacacagatgaactttgacactgtgctgaacgatgagaacacatggacacagggaggggaatatcacacaccggggcctgtcggggggtaggggggtagggggcttggggagggatagcattaggagaaacacctaatgtacgtgacaggttgatgggtgcagcaaaccaccatggcacgtgtataactatgtaacaaacctgcacgttctgcacatgtatcccagaacttaaagtatatctctctctctatatatataaaaccgggatcaacaggctacatttggagggaactaatactcaaagttacagtcaaccaactgatcatagtcagtaccgtcccctttaaccctgtgaactacaagtgagggcgttcacgcttcacacttggggacatctccagatagcctctgtatgcaacccagacacatgggtaagagaatgcctgtatgtctttagaaggagggtttttagtcttggctcagtgtttaagaactgcatgctttggcctttaaaaaaatgccctcttggtgtaaaaatgtgcccaatttgattcgaacattttcaaaataatttttttctgattaagaaaaatgaggcagtgtttcagccctgtgaacccacagtagttatgaacaagcagtgtatagctgagtgagcccagcatatgggctgctaaacgcaggaggtggtgatccaaaaaaaggaatcagtacagtgaaatgctgggtgctgcaaagcaagttccacctttagacccggaaggagaagctcaggtagtgctcctctccttctggtgttctctgcagtgcatggagggttcgcacttggagcagacacaaggctcaccgtgaagacatccatttcgtaccacccaaggctccaagtggcacccttgaaagagctgtcacgaaaactctagctttgagcagactcagaagtttgggaaaggtctgcagataacgaaggagagggtaaaacacctagcccgagcaacggagtagacactgcttaggggatccttaaggagcacagaaggaagactctccttctggggatagggagaaaggaaagcagcaaatggcctctttccccagccagcagtgcccttgcccccatttggttccttgtgttaatttatcaagagtcttctgaccaacaggccagtgagggtgatccgggagtgctaataacacccctcccygcttctcctcccctccgggttctttaccaactgagaacagatgtaaggagccagagaaagatcaaaggtaaggcatctgcttgatgaagaggctaaagtacagcagcaccctcaagagcagggcttctgtgtactagttagaggacatgacctgaggccacacagaagctacgtgttacttctctcccttttcccttctcacaaaaatcatcccagagctcatgtgggggaaagctgggcttatagagcagacacagggttcacctactatgagagtgcacacttccccagctagcgatgtggtgggccctggctctcgcactcctttgaggttccaggagaaagcagcaggtcatgccatgatcccaccagtaatgtggcccagaggatcagcaggctcaccctggcttcgccaatcaaaagtatcactctagccttcacagggaggtgtgacagagaaggcagagagcaaagctgggtgtttgctccacagtcctcatgccagcaaacctgcatggaggtgtcagggatacacaggaagcccagtctagcagaagcaaaaaagataaacaccacccgctgtggttcagaatgacatgtgctatcctgtaccagcggagtgacagaagctctaggagagcccaggggcaggagatggaagctgtgctgcagggcggagagtgggcagggagacaggaccacagatgggggcagcctcctgagaggaggggatctccagcatgggtaacttagcacttgcttgaggatgactgggaatttacatggtggaaggcaagcagtttagaccgaggaatgtcatctgcaggcactggcatatgtacctactggcctttctccatgtttggagatcacaggaacctggcggtctagggcagaaagaacatgtcagcagactaaggggcttgaacttatctcgtaagcagtggggaaccactaaagaggcttttgttgttgttcctgcttctttaatttttttcaccaacatctaattaagaaaaatttcaaacatacaaaaaagtttaaaacttcttgcagtgaacacccaaattcccagcacgcagacctgtaattaacattttgcatcattcactttatcacgtctgccatccctcttgtcaatcgatcttatttttgtaacacatgtcaaagttacagacatcagtatccttcaacctatggttacctagcattttacatttgcttacgattccttttttaaggtaaaacttacatacagtgaaacacataaatcttccacgtaccagtggataacttttgacagatgcacacaactatgaaaccgagacccctatcaagacacagagcataaccatcatgccagaaagtgacacccagttgatcttattcacacacctaacccccgcagccacagatctcatttctatcattatagcttagttttggctgtagtggaacttcatataattgggctcaaataatacgtactcttttttcattagcctcttttactcagcatattgtttttgacatttatccatgctgtcgtatcagtaactcatcccattgcaataaacatataaatgtatcacagtttgtcgatcaattctcctattgatacctgggtgtttccaagttttgtttgtgttttctgctatcgtagatcaagcaatgagcattcttttataagtcttttgttttgttgttggaagcgggcagaacatagctctcatttctcttgaatagggaatgaaattgctgggtcgctaggtaggtctatgttcagctttagaagaaacttgacatccctaccaatgatgtatgagaactgcagtcactccacatcttcatcaacatttgatactaccttttaaattttagttattctggaggatgtgttgtggtatctcatggtggtttgatttgtatttccccaaagaataatgattttggtttttttttttaaaaaattttaggttcaggggtacatgtgcaggtttgttatacaggtaaattgtgtgtcatggggatttgttgtacagattatttcatcgcctaggtattaagcctagtattcattagttatttttcccgatcctttccctcctcccaccctccaccccttgataggccccagagtgtgttgttcccctctatgcgtctatgtgttctcatcatttagctcccacttataagtgagaacatgtggtatctggttttctgttcctgagttagtttgcttaggataatggcctccagctccatctaagttgttgcaaaggacgtgatctcattttttaaggctgtgtagtatttcctggtatatatgtaccacattttcttcatctagtcctctgttgatgggcacttaggttgattccgtgtctttgctactgtgaatagtgctgcactgaacatacacatgcatgtgtctttatgatagagcaatttgtgtttgggtatatactaaataatggcattgctggctcaaatggtaattctgttttaagttctttgagaaatcaccaaacttttttcaacgctggctgaactaatttacattcccatcagcagtgcataaatgttcccctttctccacaacctcgtcagcatttattttttgactttttgataacagccattctgactggtgtgagaaggtatctcattgtggttttgatttgcatttctctaatgattagtgatgttaagctttttttcatatgcttgttggccgcatgtatgtcttcttttgagaaaagtctgttcatgtcttttgcccrctttttaatgggatggtttgttttttgctagtaaatttgtttaagttccttatagattctggatattagacctttgttggatgcatagtttgcaaatattttctcacattctataggttgtctgtttactctgttgatagtttcttttgctgtgcagaagctctttagtttgatgaggtcccatgtgtggatttttgtttttgttgcaattgtttttggtgtctttgtcatgaagactttgccttctgacaaaggtcctatgtccagaatagtattgcctagcttgtcttcagggttttcatagatttgggttttacatttaagtctttaatccatcttgagttgatttttgcatatggcaaaaaggtaggggtccagcttcaatcttctgcatatggccagccagttatcccagcaccatttattgaataaagagtcctaaccaacccaaatgtccatcaatgatagactggattaagaaaatgtgacacacatacaccatgaaatactatgcagccataaaaaaggatgagttcatgtcctttgcagggacatggataaagttggaaaccatcattctgagcaaactatcacaaaggcagaaaaccaaacaccgcatgttctcactcataggtgggaactgaacaatgagaacacttggacacagggtggggaacatcacacactgggacctgtcgtgggattgggggaggggggagggatagcactaggagatatacctaatgtaaatgacgagttaatgggtacagcaaaccaacatggcacatgtatacatatgaaacaaacccgcacgttgtgtacatgtaccctagaacttaaagtatatatatatatatatatatatatatatatatatataaaaggagtcctttccccactgcttgttttgtcaattttgttgaagatcagatggctgcaggtctgaggcattttttgtatgttctctattctgttccactggtctatgtgtctgttcttgtaccagtaccatgctgttttggttactgtagcaggacacaatacaaaaagaaaacttcaggctgatatcattgatgaacatagatgcaaaaatcctcaacaaaataccagcaaattgaatccagcagcatatcaaaaagctaatccaacacgatcaagtagactttatccctaggatgcaagattggttcaacacacataaattattttgaacatcatgtaacttcttttgtgatgtgtctgttcaaatcctatgctcattttttaattggattgtttgtcttttcattgttacacagtattttttaaacagaggaatgacagggtcagattcatgttcttgatggttctctcttgcggctgcaaggaggacaagctggagcaaagataccagttaagcggttaaggtcaacactcttaaccgcttagctggtcatcccaagggagggtgaagatggcctgggcttgaggggagataaagagaaagaataatctagattcaaaagataccagggaagagacttctggcatgagacagtaaggagatcaacaaatcctctcctcaaaaagcaactataaacctggacaaaaagttagtcatttcaggaaagtcatttgatttcagtaaaaacagcttgagtccacggcatttttacccaaggctgctctcatttttcccttccctaagtctgtcggcagactgttcaaccggagcaaaaaccagcaatagtgtgtgactgctaggtcatatggcaagtctatgttgaactttacaataaactgtcaagctctcttccaaggtggccgtaccattttgcattctcacaaacaatgaatgagcgttcttgttgctctgcatcctcatcagcaattgatattatcagctttttggattttagacattctaacaggtgcatagtggtatcttgttttcatttgtatttccctagtgagaaatgacgttgaatatcttattttcctattttatattcttctttggtgaagtctcttcatattttttacccattttaaaattggggttgagttcttattgttgacttttatgaattctttttttctttttttttttttttgagacagagtcttgctctgtcacccaggctggagtgcagtggtgtgatctcggctcactgcaacttccacctcccaggttcaagygattctcctgcctcagcctcccgagtagctgggactacaggcacgtgctaccatgcccagctaattttttgtatttttagtagagacagggtttcaccgtgttagccaggatggtctcgatcccctgacctcgtgatccacccgcgtcggcctccagaagtgctgggattacaggcgtgagccaccacgcccggcctatgaattctttatatcatctgaatacaagtcctttatcaggtatatgattttgcaaatattttctccaaatctgtggcttgtctttttcttttcttcatagtgttgttcatagaacaaaagtatgaagtattatgtgtatgtctacacagaaacctgtatgtaatgtttaaaaatgtttatagctgggcgcaacggctcccacgtgtatcccagcatattgggaggccaaggcaggagaatcacctgagcccaggagctcgagaccaccctgggcaacatagcaagaccccatccctacaaaaattttaaaagttagtcaagtatggtggtgcgtatctatggtcccagatactcaggaggctgaggtgggaggattgcttgagctcaggaggtcaatgcttcagtgaactgtgtttgcattactgcactccaggctaggcaacagagtgagatcctatctcaaaaaaaagttttatttatagcagttttattcatattcactccagactggaagcaaccaagatgtccttcagcaggtgaatggataaacaaagtggtacatccatacaacgggatattgttcaatgctaaaaagaacaaactaccaagctatgaaaaaacatgaaaaaactttaaatgcatattgctaagtgaaagaagctagtctgaaaagcctatatactgtatggctccaattctatggcatcctggataaggtaaaaccacagagaagtaaacaaatcagtggttgcgctaatagaaactagactagggttgagggaagggggagtggctgactatcaagggcatgtacagaagtccttgcatggtgaagaaactgttctgtatggtacttgggtggtggacatgtgactctatgcatttgccaaaacccacagaactatatgttacaaagagtgaactttaatgcctacaagcagaagaacaaaacatcaaccaggtgggtgggggactcccaggatggaatgcagactatgacaaatgaatctaactccattataaatgggtggcattactgtactgaatggatgaggaaggtaaaggaaccgacctaagtaactttgaaaaacagtattttgactgggaactgtaaggtaaagacaaaagaaactgaacataaacactggactctagttggtaaagttgtttctcctgggggtatgagttagcaattctgatgctctatacgtgtatacctgaattgagtaagacagtaaatgaatgacgggtagtaggagctaggtgtctcactgtcagagaggaaagttataggtaagtgagaaaggaagatcgaaataatccttctggcactggattacagttggagatataagtatgaagtcatgtttaggttatatacctgctgacggttaaaagaaattattttggatatgtgtatatatatggtgttatgtactgaacatttgtatcccgtctctcaaggtcatatgttgaagtcctaacctccaatgtgatgatattaggaggtggggtctttgggagttaattaggtaatgaaggtcgacccctcatgataggattagaacccttataagaagagacaccagagctttctccccactctgtcctctccaccaatcagggacacaacaagaagatagccatctccaaaagaggatgcagatcctcactggatactgtawctatccatgacttggtcttggacttcccagcctctagaactgtgagaaacaaatgtctgttgcttaattatcacccagtctgtggtaatttgttatagcagcctgaagtaagacacatgggttagtatatatacatatatttcctatttcctatctctgtctgcttagacagtctagaagtagcgatataccactaagcaatgaatactcagatcttggtttctaataccattctctttcccagtgaaagagaatgacatacagaattggacaccaaggaaataaatccaagaggcagcagtgttcagaaagaagcagtgaatgagactcatgaatgagaccagtcaatgagtgagaaagggcccaggaggaaagaatgttaaggagaaggtgatcatcaaagtcaaatgctacagaggccacacaggacagagggctgtgaccatcaggaagccattgggaaccacagtgggagtaggggcttgcatactctagggtatacatggcaggggggccatgaggagttgaaacattggcctcaaatttctcaaagtgctatggaaagcagtctgttggcagaaatgggggacaatcagagtcctgcccaggctgggcaggaaggaaataagggcggaggaggagggcttataggccatcaccttcttagagaaaggcaataggacctgttgacaaaagactgtcatcgttacctataggcaaaatgtggggcttctacagggtaagaggtcttcctgagaaaaaaaatccataacaaataatgtattgtttcaaaaatacactccaaaatatagctgaatctatgtgcctaagacccaagcctgaaaaatgcattaattaggattcttttcatgctgaagatcataatttattgaaatgtggtgttttacctttgctcacagcattagcatatttttgtgtaaaggacagtgtctgagaattccatggtgtgcttatcataaccatgtttcagtttcacacttgtccttttttccacgaccccctttatcttcttttcctgacacctataatggcagagggtataacttaagctaacaattgattattctttacaagagaagttcaaatatgagcctaattaaagaattcctgaacacttcttccttgctaaaacatgcacttttaataaggaaaagcccctgacatgccattcagactttcattcatgtgtgtgcttacacgtgtgcctactgctctcatttcaccatctggaaataccacttatcacccagaagtaattggctaatttgctggatttgccctttaaatgttccatgttmtcctgacacctgtaggtttcatttagaggctttttgtgctttttagtagagatgactctgtctggaaaggtgtttcgaaggataaatttaaccatggtatcctttaatcggaagagaacactattcccatacgaaaggcacaccgttcttgcaagaaaagagcaaacactagtaaccacagccaagactgtggggagtgtatcagagttacaaccagayacacccataacttgtcacacttataaccgggtgtaacagcaatttgccattgcaacaggttacaaccagggttaccacaatttaccatcataacatgttgctatcacaacagattataatcacaagttacaatcacgacaggttacaaccacaagttacaatcactagcctgccttgccacatcaacaaatctggctaatattccctccagacttgatgtatactatgataaaaggttgaaatctttggtagtttggggaattaacactatctggccttggggaggacatgactattctggggtaacatgagggaacttctttgtggcgatggaacagttctgcctgctaattatggtaatggttactcaaatctacacacataacattttatagacctacccatactcgctcacacacgcatatctgaatgcatgcaaaatctgatgaaatctgaacaaggtctgtagctgacttaacagtactgtactaatgttgacttcctggttttgacaatgactatggttatataaggagaagctaggtgaagtgtacacatgaactctcttgaactatttttacaacttcttgtgagaaccatttcaaaataaaaaggtattttaaaagatatctgacttgctatgggtctcttaaaaaaaatgctcgtcatgatgactttgctcctcccatcccaagagtgagtgagtctcttgaggttgagagggctgctttcagagtccactggcccccagttattatcattggtggtgttgccttggcaaataggcttcagccagcatgaaacgttaacctatcagcactgctgcttaaggaacatcaggggaaatgtggggcttttccaagatggcttataaatcccccccttgaactgcatggctcacatcattccaaatgaaccccaactggcaggctgggatgtctgggaactaccactcatttcccagaggctcaattaatctggttgctgcataatcacctttttcaccagaataagggttgtgttggcacaaatcaatgctcctacctttacccttgtcaggtttgtattctccaccccctactatgtcttcaagatccttgtctgaaaaacctggagaaaataaaacatacatttcaacaacaagaaaaaaaaatcagcaacaagaaacttgtgctaatgttgcccaaaattcagaaaatgattcccagttccacttaagaatgcccttcatgaaattctaagaggtccccccagaccccctcccactggtgtacatgtcccgcataatgtcccaccactctgagtgtgagtggaaccatggataggatggctatatcactcccgtgattaggttagattacatgccaaaggtgaagggattttgcagaggtgattaaggtaccaaatcaatttgactttgcattcatcaaaaaggagattatcctagatgggcatgacttaatcaggtgacatcctcaaaagcaggttcaggccttctctgagctcagacatgagaagcaacagagtcggtcggtctctcctcctttctccccctaccaacccgtctgttggtcattctcctgctagtcttgaagcagcaagcagtcattattcctatagctgcaagggaatgtactgtcaacaagcaattgagcttggaagggaacccaacttcagacgagaccccagccctcaccaacaccttgactgcagctatatgagctcctgagcagaaaactcagcttagctgttcctcaactccggaccaaaggaaacagtgggataataaatgggtgttgccttaactcagagtttctgatttttgttatgcagcaaggaaactgacacaaggaagcagaaaatttatgaacgggtaaaaggtccactgaaaggacaagatagtcccacggaaccaagtgtggaaagttcactgataagagtttcacactccacactacgcttaacctgtaacaaacaaccgcttttgttggggccaagttttggtgtcctatccgagaagattatccacaaggatctgaaaagtctgtgaaaatattcctccctttccccactgcctatgggtgtgaggccagatttccttcatatacttcaaccaaaacaacatctcacgatggaataaagtgcctgtgagaagccagctgcttccatccagccagacatgagagaaatctgcaaaaatgtaacagcgtgccgctctcctcaatacaagtttttgtcttgccaagcatagttatttctcataaaaatgttatttatgttaaatgtatgggtttaatgttgttcattttagattgattaataaagtctttcagttttaaattctaagatgatgagtattgataaacgtgacccacataagcaaaatctctcttgagatctcaatgatttcaggagtccccagaccaaaaaagtttgagtaccaccattatagggttctccagtggcttgaagtgcctccagctctgccaggcccaagctggctctggctctgtgggatgatgtaattaatgagacagaaccagaccaggtgggactcacctcctcctccagcaattggtttcctgcggccatcatctcgatcatttcgatcatccagggcatcagccaagtcaaaatcatttccttcatggggtcccaaaataaaagaaatactcaattagttcatctatgggtagctcatttggatcctgtctcagagggagccccatgggatccttgccttactactctcctcagagcggccaccttacctaaagtatttgctggagctctggtggttactggcctcttggtcgtggtggttacatggttccatctctctaaaaggggaagggaggacagcaaagggagcacatttaggaacaaaatgcagcagccattcatggctcagggaagtcacatcatgaatattcttgtcttggtccttgaggctcctataggacctctgcagaatcactttgagacggatgacaaagagatataaaaggcttaaatgaggtgggttctgttcacttttcttcaggggatgggggttatgaggcagacatagtcccacatgtggccaggtaagtggcaaagctgggacttgagcccagatctgcgggagatgaccacatggaccgaggagttctagagcttgagctccaagccttggttccaccactgtcaacctggcacttgaactatagctaatcctgcccagggatggacagattgaggatgcattcccagtggactgtggtagtatcttatacacggaaagtgcttacaacacacacatatataattttatataactgtggttactattataaacatcaggtctctgggctcaaccagattcctttcaaatatggacttctttcacaccaattacacagatggcattcatgaattttccaaatgattcttctcttgaacttcagaagactgtgctgtaactgttcccactattgaagttaatagagggaaaagacagagacagtgctrtatacagcaagcacctgggagagaaacagcgatgtatctggggaaaaaacctaaatgagttttacagagcaataatgtgatatccaaactgcctagggacatttaaaatgtattgcctatcatttttcgatagacctttggtgttgtctgtggatcaaagaaatgtaggtctgaatcttctgcaaagaaaatacaaaaacaatacagtaagtcaagtcataacccaacagttctcagatggaatgaagagggatattataaaatgataaaaggatcaatccaccaggaagacgtaacaatcctgaatgtgtgtgcacctaacaatagagtgtctagacacattaagtaaaacctgatagagctaaaaggagaaataagcaaatgcacatttatagttggggacttcaacactccactctcagcaattggtagaactactagacagaaaatctacaaggatattgaaggagtgaacaataatcaaccaatgggatttaattggcacaacaggacacaccagccaattacagcagagtaaacaattgtttaagcactcacagaatattcacctgagatcatattctgaaccaggaaataaacttcaacaaatttaaaagtattgaaattatgcagagaggtatcattgattatacttaattcaaattagaaacagagaagaaacaacagaaaacaagaaaatctctaaacatttggatattaaacaacatatttctaaataaaacaagggtcaaagaaaaagtttcaaaggaaattttaaaaaatacatagaactgtgtgaaaatgaaaacacaacatagcaaaatatgtgggatctaaagcagtgcagagagaagtttatagcactcaatgcataagttagacatgaagaagagcctcaaatcaataatctaagttactaattcaagatgctagaaaaagaagctagctagatactagaaaaacaaaaccaaagcaagcagatggaaawaataaacacaagagcagagatccatgaaactgaaaataagaatgcaatactaaaaaaaaatcaataaaaccaaaagyttatttatacagtaaaaagggataaaccgctagccttactaacaaacataaaagttaaaaaagatgatatgccaataaaaggactgaaatgggacactgtagatcttgtaaccattaaaagaataataatggaataatatgaacattttttagctcacatatttgacaacttggaagaaatggaccaatttctcaaaaaccaccaactatcaaaatacaacctaatcctgtgttcatggattagaagacactaaattgttaaaatggcaatgcatactatctaaagcaatctacagattcaatggaatccctaccaaaatcccaatgacatttgttgcagaaatagacaaattcatcctaaaattcacatggaatttcaaggaatctcaaacagccaaaacaatctagaaaaagaacatagaagagtcacacttcctgattttaaaacttactacaaaactacaaatatcacaacacgtgtggtactgacatcaagaacagacatacaaaccaatgaaatataataggaagcccagaaataggccgggtgcagtggctcacgcctgttatctcaacactttgggaggctgaggcaggtggactgcttgagcccaggagttcaaggccagcctggcaacattgtgaaatcccatctctacaaaaaatacaaaaaattagccaggtgtggtggcgtgcacctgtggttccagctacttgagaggctgagatagaaagattgcttgagcccaggtggaggctgcagtgagccgtgaccacaccactgtactccagcataggcgacagaatgagaccccgtcaaaaaaaaagaagaagaagaaggagaagaaggagaaggagaagaaggaggagaaggaggacagaacataggaagggagggagggagggaggaaaggaaggaatgaagggagggaaggagggaggaaaggaaggatagaacgaatggacggaggtagggagggagggacgaaaagaaggaatggaaggatgaaaggaaggagggaggaagggagggagggatggagggagggttggagaacaaagggggagggaacaaaggggaggaaagggaattggggagaaaggaaaggaaaagggaaaggaaaggaggaaggaaggaagaaagcaagcccagatataaacccttgcatatacggtcactagattctcaacagtatgtcaagaccattcgatcggggaaaggacagtcttttcaacaaatggtgctgggaaaattggatagccacatgcaaaggaatgacttcggaccctgacctatactacatacaaaaattaactcaagatagatagaagattcttagacatggtggcatgaaaaaaagaaatagttcaaagacctaaatataaaagctaaaactataaaactctcaggagaaaatattatgaaaaagtttcatgatactggatttgatgatgatttcctggatatgataccaaaagcacaggcaacatcaacaacaaaaacaaaataaataaattgatcttcatcaaaatttaaaactttttttgagacagggtctcactctgtcacccaggctggctggagtgcagtggcacaatcatgccactcagtgcaacctccgccttccagactcaagtgatcctcttatcttagccttctgagtagctgggactacaggcgtgcaccaccatgcccagctaatttttgcattttttgtacagacagggttgccccatgttggcaaagctggtctcaaactcctggacttaagccatccacttgccttggcatcccaaagtgctgggattataggcatgtgcaccatgctcagcctaaaattaaaaacttttgtgcatcaaaggacaatatcaagagagtaaaaagataactcacaagaatgggagaaaatatttacaaatcttacatccaataagggattaatatccatactatataaagaacttatacaagtcaacaacaacaaaaaccctgattttaaggctaggcacagtggctcatgcttgtaatcccagaactttgggaggctgaggcaggtggattacttgagtccagaagttcaagaccagcctggacaacatggtgaaaccctgtctctaccaaaaaaaaaaaaacaacaacaaaacacaaaaattagacaggtgtggtggcacacctgtagtcccacctcctcaggaggctgaagtaggaggactgcttgagcccggagatggaggtggcagtaagctgagatcataccactgcactccagactgggtgacaaagcaagaccctgtctcaaaaaaaaaaaaaggaaaaaaaccaaaaaagtggttttaaaatgggcaaaggacttgaatagacatatcttcaaagaagatatacaaatgaccaataagcacatgaaaagctgctcagtgtcactagtcattagggatatgcaaataaaaactgcaatgagataccagtttgcacccattgggatggctattattaaaagaaaaatgaaaaattacaggtattggtgaggacatgaagaaattggaaccctggtatattgctggtgggaatgtaaaatggtgcagctgctgtggaaaacagtttggtacttcctcaaaatgtgaaacagagttaccatatgatccagcaattccacttctaggtccatacccatatgaattgaaagcagagactctaacagaaatctgtacaccaatgctcctaacagcattatgcacaacagccaaaaggtggaaacaacacaaatggccatcaacatataaatggataagcaaaatatggtatatacatataatgcaatattattcaggcttaaaagaaagaaactctggtacatgctgcaacatggataaacctggaaaacattacattaagtgaaataaaccagacacaaaagaacaaatattgtgcaattctgcttataagaggtacctagaatgggcaaattcttagagacagaaagtatagcagaggttaccaggggctaggagtaaggagaaatgaggagttactgttgtaggggtatagggtttctagctgggctgatgaaaaactgttggaaatgatcatggtaacagctgcataacattgtgaataccgatgatcctccatatccataggttccacatccagaatcatgtgtttgaccaaccatggatcaaaatattcaaagaacaaaaaacaaaaaataatacaactataaaaataatataaatttttaaaatacagtataataactatttacatagcattatattgtattaggtattataagtaatctggaaatgatttaagctatatgggaggatatgtgtaggttacatgcaaatactatgccatttcatatcagagaattgaacatcaaaggattttggtatttgcagggggtcccagaaccaatgcccagcaaatactaaaggagggacaaatgtctactaagtaccactgaataatacagttaaaaatggttaaaacagtagattttatatgtatacttaccacaataataaaaaactcagctgggtgcagtggcccacacctgtaatcccagcactttgggaggccgaggtgggtggatcacctgagtcaggagttcgagatcagcctgaccagcatggagaaaccctgtctctactaaaaatataaaatwagccgggtgtggtggtgcatgcctataatcccggctactcgggaggctgagacaggagatttgcttgaacctgggaggcggaggttacagtgagccgagaccacgccattgcactccagcttgggcaacaaaagtgaaacttcgtctcaaaaaaaaaaacaaaaaaaccccaaaaaaacaaaacctcaacctccaggacttggtgatttacctggagagttctaccaaacatttaaaaaggaattatcaccaattgtatacaatctcttccagaaaggagacaagaggaaatacttccccactcattttgtaaggccagtattaccctggtaacaaacacagataaagacctgtattagttcgttttcacactgatataaagatactgcctgagacagggtaatttataaagaaaagaggtttaattgacttacagttcctcatggctggggaggcctcaaaaaacttacgatcatagtggaaggcaaaagggagattggcatcttcttcacttcacaaggtggcaggagagagagaggagcaaagcgggaactgccaaacactttaaaaatcatcagctcttgtgagaactcactcactatcgtgagaacagcatggggaaccatccctatgatccaatcaccttccaccaggtccctccctagatgcctggggattacaattcgagatgagatttggatggggacacagagccaaaccagatcaagaccttattaaagaaaaaaaaaacatatagactaatgtctctcatcaatttacatgccaaatcttcaacaaaatattagcaaacagaatagaatgtataaagagaattaaacagcatgaaaaatggaatttattccagtcaggcaagttggatcaatacttgaaaatcaacgtaatctaccctgtcaacaggccaaagaagacaaatcacatatcaatggacatgaaaaaatctaacactcatttatggaaaaaaaatactttcagcaaattagaaataaaggggaactatctcaacttcataaagaacatctagaaaacacctatagctatcgtcagacttaatggtgaaagactgaatgctctttctttaaggtctgaaacaccaaggacatcactcttaccactcttatttaatatggtactgaaatgtctagcattgcaatatgaaaaaatatatacagattggaaaggaagaactatatatgtttctatttgcagatgacatgatcatgtacatagaaaattccaagaaatctacaaaaaatttctagaataagtgagttcagcaaggtctcaggatacaagttcaacaatattgatcacatatcatagcagtgaacatatcaaacccaaaattagccattcacaattgctccaaagaaaatatttaggatgggacggtggctcacgcctataatgccagcactttgagaggccaaagtgggcagatcacctgagctcaggagtttgagaccagcctgggcaacatggtgaaatcccatctttactaaaaatacaaaagttagccaggtatggtggtatgtgcctgtagtcccagctacttgggaggctgaggtgggagaatcttgcttgagtcagggaggtggaggctgcagtgagccaagatcacaccactgcactccagtctgggcagcagagcgagactcannnnnnnnnnnnnnnnnnnnctctctgtatttgtcttcacatggccttctcctcatgtgtctctgtccttgtgtctttacatggctttaaagttttcttttttgatagagagagtcttgctatgttgcccaggctgatcttcaattcctgggctcaagcaatcctcctgccttggcctcccaaagtgttgggattacaggcgtgagtcaacacgcccggcccagaaaacttaaaatgagggtgtcagcaaggctgcattcctgctggaggcctaggggacaatctatttccttgcctttttgtagctttcagaggccacctgccttccttggctcatggctctttcttccatcttcgaagccagcagcacattttcttttcttttttttgaaacggagtctcgctctgtctcccagtctggagtgcagtggcatgatcttggctcactgcaagctctgcctcccaggttcacgccattctcctgcctcagcctcctgagtcgctgggattacaggcacctgccaccacgcccagctaatttttggtattttaagtagagacggggtttcaccgtgttagccaggatggtgtcgatctcctgacctcgtgatctgcccgccttggcctcccaaagtgctgggattacaggcgggagccaccgtgcccagcctttttttttttttttttttttttttttttttctgagacagagtctcactttgtcgcccaggctggagtgcaatagcgagatctcagctcactgcaaactccacctcccgggttcaagcaattctcctgcctcagcctcctgagtaactgggattacagatgcgtgccactacaccccgctaatttttgtatttttattaaagacagagtttcaccatgttggtcaggctggtctcgaactcctgacctcgtgatctgcccgcctcggcctcccaaagtgctgggattacgggcgtgagccaccatgcccggctagaaaagaaaatatttaaacatacatttaaacatgtaccggatcctctataccaaaatttacagtgttctcaagaaaagacatcaaagaagacataaatcaattgagagacataccgtattcatggattagaagactccacaaagtaaaaatgtcaactgtcccaaaatggatctatgtttaatacacatcctatcataatcccagtaagtttttttctagactaggcaaagacaaacttaatctaaaattatatgaaaaggcacaggccctagaagaaccttaaaagaacttgacaaagcagaataaagtggaacaaatcactctaaccaatattaaagctgaatttatagttatagtaatcaggactgtggcagagggacagacagacagatcaatcaaacagaatgaagagcccaaaaagaccccaaatacactcaagtgattcttgataaaggtacaaaagcaatttgataaagcatagtcttttgaacaaacggtgctggagtaattgggcatcaataggtaaaaacaatgaatctcaacctaatcctcacaccttattaaaaatgagctcaaaatggatgatcatctttacttaaatataaagttatgaaacttcaaaagaaaacataaaaaaaatctttgggactgagagcttggtaaagagttcacacaattgacaacaaagccacgtttcataaaaagaaaaattgatacatccaccttgtgaaaattaaaacatttcctctgtaaaagacctgtttaagaagatgaaaatattccattttcaacaatggacaagtcatccagacagaaaaatcaataaggaaacagcgggccaggacaacactctagaccaaatggacctaacagacatacacaaaacattctatccaacagcagcagaattcacattcttttcaagcacacatggaacattctccaggataggtcacatgttaggtcacagaaaaggtcttaataaatttaacaagattgaaatcatatcaagtgtcttttccacccacaatggtacaaaactagaagtttgaacagagaattggaaaattcacaaatgtgtggaaattgaacaacattctcctgaacaaccaacgggtcaaagaagaaatcaaaagggaaatcaaaaaaatttttgagacaaataaaaatagaaacacaacataccaaaacttatgagatgcagcaaaagcagtcctgagagagaactttatagcaataaatgccaacctaaacaaaaaacaaagatctctccaggcacggtggctcatgcctataatcccagcactttgggagaccatggtgggcagatcacgaggtcaggagttcgagaacagcctggccaagagaccagcctggccaacatggtgaaaccccatctctagtagaaacagatgaaataagtaacagaagaacaataaagtctataaaaacaaaagatggtttttgaaaagatcaacaaaattgacaaacctttagcaagattgacaaagaaaaagagagaggactcattactgaaatgagaaatgaaagagaggatatcactaatgacttaatagaaataaaaaaggattttaagggaatatcattgacaaaagtatgccaataaattgggcagcctagatgaaatggacaaactcctggaaagatataaactactgaagctgacccaagaagaaatagaaaatctggccaggcgtggtggctcatgcctgtaatcccagcactttgggaggccgaggcaggaggatcacctgagcacatgagttcgataccagcctaggcaacatggtgagaccctgtctctattaaattaaataaaacaaaataaaaataaaactaaaactctactaaaaatacaaaaattagccaagtgtggtggcagatgcctgtaatcccaggaggcggaggttgcagtgacctgagatggcgccattgcactccagcctgggcaacagagcgagactccgactcaaaacaaacaaacaaacaaacaaacacaaagatctcaaataaacaacccagctttacaactcaaagaaaattagaaaaaaaaccaaaactgaactcatagaagcatagagcagaatactggtggccaggggctggggtggggagtagggagatgctagtcaaagggtgcaaagtttcagttagacaggaggaataagttctggagatttattatagagcagggtgactatagttaataataatatattatatactcaaaaattgccaagagagtagatcttgaatgttctcaccacaaaaatatgttggtaatgtcttaacaaactaaacctataacaaccacacaacccagcactcacacaacttagcatttatcccacagaaatgaagagtcatattcacataagaacgtgtatgtaagtgcttataatagtcaaaaactgggagcaacccagatgacctccaaaaagcgaatggttaaacaaactatggtacgtccacaccatgaaatactgttcagtgaggaaaagcaacaaattattgatatatacggtgactcggaaggatctcaagggaattatgttgagtgaraaaagccagtcccaaaacagtatatactctgtgattccatttttgaaattgccaaatgctacagatggagaacaaattaatggttgtcaggggttagagacaggcaaggagtgggtggcaagagggagtgtctgtgtttataaaagggcaacaagagggatctttgtggtgatgaaatagttctgtctagactgtcatggtagatacacatacccacacaagtgataaaactgcatagaagtaaacacacacacacactcagtagaagtaaaactgaggaaatctgaataagatcaccagactatatcaatgtcaatatcttggttgtgatcttatactatagttttgcaggatgttaccactgggggaaactgggtatggggtgcataggatctctctgtattatttcttacaacttcatgtgaatttacaattacctcaaaattaaaagtcaaattaccacgatttgagcatcaaggtaatttcgtgttttttgagactgggtttcactctgtcacccaggctgcagtgcagtggcacgatcatagctcaccacagtgtagaactcccaggctcaagtgattctcccacctcagcctgctgagcagctgggactacaggcatgcaccactacgcccagctaattttttcatcttctgtagagacggggtcttgctaagttgtccaggcttatcaaggtaatttctgatgcaaaaaaaggtctgacatgcaaatggctggtctgcagagactcaggaatatctattaattgacactaaaaataaaacaacaaatcatgtagacctgacttcggaaaaatggcagtagaaggccgggcgtgaaggctcaagcctgtaatcccagcactttgggaggccgaggtgggcagatcacctgatgtcaggagttcaagaccagcctggccaacatggtgaaaacccgtctctactaaaaacacaaaaattagccgggcgtggtggtgggagcctgtaatcccagctacttgggaggctgaggcaggagaatcgcttgaaccctggaggcagaggttgctatgagctgagaccatgccattgcactccagcctgggcaacaagagcaaaactgcacctcaaaaaaaaaaatgacaccggataagaacatctaggaatgagatggtatacacaggcaactttccagagaactaaagcttgttccttcctatggccaatggtttgtgtaacactgataaccttccagatagcaaatctttacagagcaatagtaaatctttacagagcaaataatacagttctgtcactttgacatgagtatacagaataccacctttcttggggccctgaagttacaacttttctgttattgcactgtgcttacctsttaaagagaagtccctttttcagctttctagattttttaatctaatcttccattcagtaggagagctgccaagcagaccagcaggcactatatatcaaagcttgtacttttgattttgaggtattccaacaactctttggggcaggttgacctgttcatgaatagaggattttccagggtttctttggccaaagcacaccaattgaccctaaactcgtcttttgggtcatcagtaccttctctatgcagacacttctcatggcaacatgttgtagaagaaaaggcccccaaggtaaagccaggatccctgcacttcaggccagttgtgctgctggcttgcagcgcgaccttggacaagtccctctcatccaaacaatgaggggaaaggcctctctagttctccagttctaatctagagttcttcctcattagtaaagatcactttaatttttaaggtttattataaaggtaatacttgctcaatataaaaaatacccagtggtgtagattataagaaaaaaaggcagcctcaaatctatcccaagagggggctgctctgtaccttttcagatctgcctgcaggcctgtgtgtgtgtgctcacatccacttatatttgatagaaattgattcatactacatacatcctgttctgtgacttgcctttttcatgtcagttccagagctctaccttattttttgcaatggcttcagagtatgaatggtttagaatctgtatatttcactagtgggatttaagggtgtttaatttttggctggtacaaaacacaagaaatcacaaacatcatttaaaatgtaccactgcacacatgcatacgtatacctacagggaaaatgctttgaagtagaactgctcattcaaatattttactaaactgccctctcaaaaggctgcattaatttatattactttctacagaagtaaaactgaaaaggtgtagcttcatacaacaaaagacatctaaagcaaccttcctgcctgctgtagcaccacaatacatgattgctgtacactgatatcgaaaacatcactgacctgaatgaaaacatactgatgccacatggctgtgtaaggtcatctccacaaatggttgttctcaaagagtgtttcaaggacccctgggctccatagattatgaaaaactattttcataatcatgcttttatggggttggcacttgcactgtggtgcaaaaccaacaatgagtaaacctgctggcccttagcatgaaccgaggcagtggcaccaaatggtactaggagtcatcagattcttcaccactatacaatggcagttgaaagagaatgccagtcttacttaagcatgtcctagataaacatggtagacagaattctaagatggctggcaaaattcccacccccaaggtatacaccctgcataatcctcactcatgagcatgggagggacccatgaataggctggatataactgctgtgatcagattatgacatagcagaggtaaatggattttgcagatgcacttaagatgtctttgacgggactctgaattactcaaaagggagattattctgggtgattctaacataaccaggtacagccttgaaaagaggggttttacgccttccctgagaagacactacaggcagcagaaatttttgtacacttgccaatagtaaagaaggaagcagccgcgagttccgtgattatcctgaattatctgggtggggccagcaaaatcataagagtccttataagggaaaggaagagcaggagagtcagagaaggagatatgatgatggaagcaaaggtaagagtcagagagagatttgaagcaaaggtaagagtcagagagagatctgaagatgccacactgctgactttgaagatgaaggaagtaaccacaagccaagaaatgcaggtggcctctataagcaggaaaaggcaaggaaataaattctcccctagagtctccaaaaggaatggagcctggctagcaccttgattttagcccaggaagacccaattttggatttctgacctcaatgattataaaataacaagtttatgttgtttaagcaatcaagttcatggtaactcattacaaaagcaatatgaagtaatataatatcaaacttcagacaagacccctagccccagatgacatctgaattgcaaccttgtataagacactgagcagaggacccagctacgtaggacccatactcctgacccagggaaattataagagtgaatgaatactactttaacttgctaattttatggtaacatgttataaagcaatacaaaataaatatcaaaaagcagaaaaataattttattagagctcaaccatgagactggtggtgatattagcaaacatgagttttgagtattggataaggaaaagtgtcatcattcagaaacaacacaactcactcagggcatcagtattttccaaacaacctgtacaggatgttacaaaatggtgaatggacaaaagatccattcataagataaaatagtccaatggggttcaatagtaatgaatggggaaaggtcactgatgttacttaaccttaaacaataacttgccaattttgatgtctaaatgtgcatttgaacattaataaaaacaagagaaagtgggagtggttatattaatatcagataaatgagatgtcatagctaggaaaatattttagacaaaaagtaacacaacacaatgataaaagaatcaatccactaggaagacataatgatcctaaatttggatgtatcaaaaaacagagactcaaaatatatgaaacaaaagttgatagagctaaagggagaaacaaatccataattatcgttggggaaattccataccctattgccatcattaattggattagtggacaaaaaattcaccaaagatgtacaactgaccaatacaataactatcgaaatcgaagtgacatatagagaacattccacccaacaacagcagaatttgcattccgctcaaaggcactgggaacattctcctggatagaccttctgatatgccacaaaacaagccttaatagatttaaaagaattaaaagcaaagaaagtgtgctctccaatcataattggaaatcaatgacagaaataaattagggaaattcacaaatatgtggaaactaaacaacacacaccaaaataaccaataggtcaaataagaaatcagaagggaaattttaactttgagaagaatgtaaacaaaaacacaatccacaaaaacttatgagatacagcaacagccatgtttagaagcaaatttactactgtaaaggcctatagtaaaaaaggagaaagatttgtaatcagtagcctaacctttcacctcagaaaccagaaaatggaaaccaaacacagagcaagcagagtgaaggaagaaaaaaagatgagaatagaagaaaaatatatgaaagtagaaaaaaatgaaataaataacagaagaacaataaagtctataaaagcaaaagatggtttttgaaaagatcaacaaaattggcaaacctttagcaagactgacaaagaaaaggagagaagactcattactgaaatgagaaatgaaagagaggatatcactaatgacttaatagaaataaaaaggattttaagggaatatcattgacaaaagtatgccaataaattgggcagcctagatgaaatggacaaactcctagaaagatacaaactattgaagctgactcaagaagaaatagaaaatctggccaggcgtggtggctcatgcctgtaatcccagcactttgggaggctgaggcaggaggatcacctgagcgcaggagttggataccagcctaggcaacatggtgagaccctgtctctattaaattaaacaaaataaaaataaaaatgaaactcaccaataaaaacacaataacccaatttaaaatggacaaaggatttgaatagacatttctccaaaaaacataaacaatattcaataaagcacatgaaaagatatttgatttcattagcattagggaaatgcacatcaaaaccacaataagacaataagacacaacttcacgcccacgaagatgactgcaataaaagagacttaagactctactttcagggatcatttctgtagtttgttattagagaagattctctgaaggtgtagagcatcaaaaataaaataaaattttaaaaaggaaatagaaaatctgaatagacctataatagatagaattaataatacaaaaaacttccccaaaagaaaagcccagagtcaaatgccttcactgataaattctataaaatatttaaataattaacagcaattcttcagtaactcttccagaaaataagaggagacaacactacctaaataatccaatgaaatcagtagtgcactgatatgaaaaccagacaaagacatcacaagaaaaactacaaacctatttctgttagtaatatagatgcaaaaatcctcaacaaaatataaggataccaagtgcaacaaaaacagttatattccaaatgatttttttaaggctcaaaaacaattcaacgggcagatagtctttttaacaaatggtcctagaacaattagacattcacaggcaagcaagcgaagtttcaggaaaaaaaacataggagaaaatctataaaacctaggtataggcaaagagttcttagacttggcatcaaaagcatgatccaggccaagtgcagtggctcatgcctgtaatcctagcactttgggaggctaaggtgggtagatggcttgagcccagagttcaagaccagcctaggcaacatagtgagaccctatctctgcaaaaaatacaaaaattagccaagtgtggtggtgtgcaactatagtcccagctacttgggaagctgaggtgggaggatcacttgagcccgggaggtcaaggctgcagtgaaccacgatcatgccactgcactgcagcctgggcaacagagtgagaccctgtcttggacacacacamaaaaaagtatgatcaataaaaggaaaaattgacaaactgaacatcatcaaaatctaaaacttctgcaaaggactctgttaagaggataaaaagacaagctacagaatggaagaaaatatttgcaaaccatatatctgactaaggacaaatgtctacaatatttaaggaactctcaaactcaatagtaagaaaaacaaaaaatctaattagaaaatggaccaaaaacatgaacagacattccactgaaaaggatatacagatggcaaacaaatacatgaaaaggtgttcaatatcattagccagagaaatgcaaactaaaccacaataagatattaccacacacttataaaatggctaaaatggaaatagtgatagcaccaaatactggtgaagatacagagaaaatggcactgacacaatgaattagggattgcaaaatattacagtcttcatggaaaactgatcatttcttacaaaactaaacatgtaactaccatgtgatccagtcactgcactcttgggcatttattcataaagaaagaaaaatttatgttcacacaaaaatactatacatgacagtttacagcagccttgttcataatagccaaaaactggggtcaatacatcaagtaaacaaactgtggtacatccatcccatggaatactccttggcaataagaatgaatgagcaattaatacacccaacaatatgaatggatgccaactgaattatacatgaaaaaggccaattccaaagggttatctactttataattacatttacataacatttttgaaatacaacttttttttttgcctccccccaaaactgaatgccatgaaatgacaacattttacaaatggaaaacagatcagtggttgccaggggttaggaaagggatggggaaggggaaatagaactgtaggaaggtgggtgtggttataaaatgtaatcatgggatacttatggtgacggaactgtttgtatctgactgtgatgatagatacacaaacctacacacgtgataaaattgcagagaagacacayacacatgtgagtgtaaacaaaactaggaaatttgaataaatgcatagattatatctatgtcaatatatggctatgatagtagagtacaattttcaagatgttgctattaggggaaactgggtgaagggtacaaggggtccttctctattatttcttacaactacacacgaatctatgattatctaaaaatgaaagtttaaattttaaaaagtaggtaaacagaaagttgagaatcaagggtcattttgtcaaaaaagttttgacacttaaatggctgaacttcagcagcgcagggaaacctagaaaataagtgaacatggttttaagctactaagtttatgatagcatgttcagcagcactggaaaactaacatgaggaagttaaaaatgttttaattgtatgagagcacgaccttttaatattttctaacaaaacaggaagtacatttcaagcatttatgtggcacatggaaatacaaaagttgacataaaaaaactgctttatgtgattatttccattctgagcagtatgagccattcctctcaaagaagattttttccttgaaaaagtgaattgaagagtaattaatcaatatttaaagattttttaaaaccaactatggttttgccaactttaatatctgttagatgttttcttgaaaatgaatgagcctgtcaatttaaagaaacccactcatggtatttgttgccaatgataagatttcaaggaaaagttagaacttcaaaaacatctttttctaccactgtgagtttaacagtttccccaatgcatatttttttcaaatgagatgggtgatgatatgaacaaatatgactttcagttttacacaatgacacatggcattacttggaagctcgaaaaacctcaaggcactaatattttccaaatgaccaacatgcaatgttacaaaaccatgaatgggtaaaagatccattgaaaggacaagacagtcccacggaaccaagtgtgcaaagttcactgacagagtttcacactccacactacgcttaacctgtaagaaacaaccgcttttgttggggccaagttttggtgtcctatccgagaagattatccacaaggatctgaaaagtctgtgaaaatattcctccctttccccactgcctatgggtgtgaggccagatttccttcatatacttcaaccaaaacaacatctcacgatggaataaagtgcctgtgagaagccagctgcttccatccagccagacatgagagaaatctgcaaaaatgtaacagcgtgccgctctcctcaatataagtttttgtcttaccaagcatagttatttctcataaaaatgttatttatgttaaatgtatgggtttagtgttgttcattttagattaataaagtctttcagttttaaattctaagatgatgagcattggtaaacrtgacccacataaacaaaaatctcttgagatctcaatgatttggggagtcctgagacaaaaaaggtttgagaactactgttacagggttctccagtggcttgaagtgcctccacctctgccaagcccagactgactctggctctgtgggatgttgatgttgtaattaatgagacagaatcctgtagtagtttcaaccagcaaagacttacctcttcctcctatacccggtttcctgcggccatcatcttgatcatccaaagcatcagccaagtccaatccactaccttcagtgggccccaaaacataaaggaaacagccaactgattaacaactgggtataagattccaaaataagcaaaatgcccatgggttcaactgatcaataccaacaatgggttaagacaaagagacttatattggaatccaattctgtgtacagacattgataatgaaaatatctgcaggatagaaaaagttactactttctgactttgcagtataccaccagtttttcaattaatttatattcctaggtattttctgcttaggctagcagtcggaccattttaacagtatactcactgactgtaggtattaacccaaaattcaaaaccaggtacacagagtccataaagaggacaaccaaaagggagaggtcatgtggtcatgaagcacccctttgaatgtggaaatgtgaagaaatgagggcaaatcataaagcagcagtgactttcttgcatcatcagtgtctcttcggaagaaaggtagctctctaccgcacagaacgtattatcatgcccccgactactggtaacaagttgctggatgggagcaatgactgggatcccagccacaccgtcacatttttctttacatcagtgaagatgtctaaatcgtaaagtggcccatctgaagaaagggtcaagtgacaacaggaaagagttgttaagaagaaccaagtcccaaaatcctttactgaaagatgacactgtaaaataaatgccattccaaaatgttccatctgcctaaagaaaatgcttgatcggcttcataaaacctaaacaattacattttccctgattttagaaaatgaaacggctaaaaaggggaagaagtccaaatgcattttcctcttgaaattttcccaggcaggacttttcataaaacacacagaaggcatagtgatcagccaggtatgcactctattataaagttaaactcagtgttcacatggatgccttgattgtttctgcacacatggggcttaaaactgtaggtagttcacttgcatgctaccccagagggaactccagagggcycttcctcactgccctccttaaggcagccacattacctggaggttttgccggagctctggtggttcctggcctattggttgtggtggtggtggtgtggtcccatggctctaaaagggagagggaggacascaaggggagcacgtttagtaacaaaacacagcagctactttatgacttggggaagtcacattgtgagtagaatatccttgtcttggtccttgaggcccctctagctaggagctccagagaatcacactgaaaaggatgacaaaatgatataggtttaaatgagaagagttctgctcacttttctttggaggctgagggtggtgaggtggacatggtctcacatgtgacctggtgattagtgaacctgggcttgcacccagatctgctggagatggcacgtggtccagggagttccacagcctgagcatgatccttgagggctccaagccttggttccacaactatcaacctggcactttaaacatagataatcctgctcagggatagactgaggttacattcctagtggaatatgggagtatttcataaactgaaagtggttacaagacatgcacacaatattttatataagtgtagaacacttttacaccattggtgggactgtaaactagttcaacccttgtggaagtcagtgtggcgattcctcagggatctagaactagaaataccatttgacccagccatcccattactgggtatatacccaaaggactataaatcatgctgctataaagacacatgcacacgtatgtttattgcggcactattcacaatagcaaagacttggaaccaacccaaatgtccaacaatgatagactggaataagaaaatgtggcacatatacaccatggaatactatacagccatagaaaagggtgagttcatgtcctctgtagggacatggatgaaattggaaaccatcatcctcagtaaactatcgcaagaacaaaaaaccaaacaccgcatattctcactcataggtgggaattgaacaatgagaacacatggacacaggaaggggaacatcacactctggggactgttgtggggtggggggaggggggagggatagctttaggagatatacctaatgctaaatgacgagttaatgggtgcagcacaccagcatggcacatgtatacatatgtaactaacctgcacattgtgcacatgtaccctaaaacttaaagtataataataataaaataaaaataaataaataaataaataaataaataaaaataaaagtggtgaccccaagaggcttgcagcacacttctgggtcccttaagttgtattatataagtaatttaataaagacaatgagctaattgacgatttaaaaaaaattatccacataaagttaacatattaagatcctcaaaagcaaataacaattagcaaataaaaaaaaataagtgtggttactactggaaatattaggtcttttgagctcaaccacattccttaaaaattgtagataactttcacaagaattatacaatgtgcatgaagtttttccaatagtttcttttcataaacatcaagactatgttgcacatattctcactattgaaaatatcagagaaaaagatttaaggaatgggaaaggcaaaggtgaaacaggtttagctttgaatacagcgagtacccaataattattgactattcagaaaacaaacagcaaaaatagaaataagttgaggtcaggtgtagtgtcatgtgcctgtagtcctagctacttgggaatatcagggaggagaattgcttaagcccataagtttgaggctataatgcactatgatcatgcctgtgaatagccactgcactccagcctgggcaacaaagcaagaccccatctctaaaaaacataagttgaaagtaaaagaatggaagaagatatactatgcaaacaacaaccataagagagctggagcagctatactaatatcagataagatttacattataacaaaaattgttaatggagtcaaagagtgacaatttataattatttataatgatgaaaggatcaatccaagaggaagacataataattttaaatatatatgcacctaacaacacagccccaaaatacatgaagcaaaaaattgcaaaattgaagagaacagatgatttaacaaaaatagttggaaatttcaatatcttcttttcaatcacagaagaaacaagtaggcagatatatatatatatatatatatatgacttgaacaactttataaaccaactagacctaacagacacctatagaacataccacccaatagcaaaatacacattctactcaagtgcatgtgaaacattcttcaaggtagaccatatgtaggttacaaaataaatctcaataaacttaaaaagactgaagccatacaaattatgctcttcagcacaaacaaattatgttcttcagcacaacagaatgaaagtagagatcagtttcagaagggtatttggaaaattcacaattatacggaattaaagagcacactcctaaacaaccaataggtcaaaaaaaaccacaagggaaattatgaaatactttgagatcaatgaaaatgaaaacacaacataccaaaacttatgtgttacactgaaagcagtgcttagagggaaatttatagctgtaaatgcctacattaaaaaaagagaaagatctcaaatcgataacctaaactttcactttaataaactagaaaaagaaggctttgcagacactgccatcgtcaaccccggtccagtccactgtgttctttgacaccgtcgctgtctaaggtgagtccttgggccaggtctccttcaaactgtttgcagacaagttccaaagacagcaggaaacttttatgctctgagcactggagagaaaggatttggttataagggttcttactttcctagaattattccagggtttatgtgctagggtggggacttcacatgccataatagtaatggtggcaaatctaactaccaggagaaacttgatgatgagaacttcaacctgaagcatacaagtcctggcatcttgcccacagcaaatggtagaccgaatacaaatggttcccagtttttcatctccactgccaagactgagtggttgaatggcaggtatgtggtctttggcaaggtcaaagaggccatgaatgccacagaagccatggagcactttgggtccaggaatggcaagaccagcaagaagatcaccattgccaaatatggacaactctaataaatttgacctgttttatcttaaccaccagactatttcctctgtagctcaagagagcacccctcaattccatttgctctcaatatcctataatctttgtgcactcactgaagctctttgggttccatattttccttattcccttccatgtctagctggattgcagagttaagttcattattataaaataaaacctacataacaattttaaagagtaactagaaaaagaagagcaaactaaacctaaagcaggcagaggaagaaaacaccaaagattatagcggaaataaaatgaaagagagaagagaaaaataaagaacaaaagaggaaagatctcttaagatcaacaaaattgataaactgtagaagacttaccaagataaagagagagaagacccaaatcgctaatttcaggaatgagaggacattactaccaaccttagagaaataaaaaattataaaggaatatcttgaacaattataatccaaataaattcaataacctagatgaaacagataacttcctattaaaacacaactacctaaactgacttgagaagaaatagaaaatctgactagacttatagcaagagattgagtcagtaaccaaaaacttcccacaaataaaattctggaaccagaagtcttaattgctgaattctaccaaacatttaaaaaagaaccaacaccaattaatctcaaactcttcaaataagtaaataaacaaacaaaccaagagaagagaacacttcctaactcattctatcaggccagtagtatgttaataccgaagtcagacaaatacacataaaaactacagaatacagttatgaatataggggcaaaaatcctcttatgaatgtagaggcaaaaatcctcaataaaatactagcaaaccaaatccagcaccatattaggactgaccatgaccaagaggggtttatctcaggaatgtaagagtagttcaacacagtaaaatcaatcaatgtactatcccatattaatagaatggaaggagaaaaaaaaaaaaaagattacctccatagatgcagaaaaggcatttaacgaaagtcaaccaccatttcatgataaaaacactcaatgaattaggaatagaagagaatttcccattttgttctgcttacttcatcagagtctactctctatgtgctttttaatgataattaggcttactctattggatttttaaaagcatttagatggtttattttggcctcatctgttaacttcctagaaataaaagagaatttcctcaacctgataaagggcatctgtgaaaaatctgcaattgacagcatacttacaggtgaaagactaaaagcttttttcctagaatcagcaacaagacaaggatgtccactcttaccactcttattcaacattgtaatggaagttctaactagagcaattagtcaagaaaaagaaagaaactctttgagattagaaaggaagaagttcaactatctctattcacagatgctatgattttatatatagaaaaccctaaagaatccacatcaataaaaaaaactattaaaactaatgagttcagcaaagttgcaagatataagatcaacatgaaaatcagctgtatttctatacactagcaatgatcaatacaaggagcaaaagaagaaaataatttcatttataatagcaataaaaagaataaaactgttagaaataaatttaaccaaggaagtataaagacatgtacactaaaagttacaacacactgttaaaaaattaaagacctaaattaatggaatgaaatcctacgtccatagattacaagactcaatactgttaaaatggcaatatttcccaaattaatctgcagatcctgtgcaatccccatcaaaataccaactgccttttgtgcagaaatggacaagctaatcctaatatccacatggaattgcatgggaccctaaatagccaaatcgatctttaaaaaaagagcaaaatagcagtcacacctctcaatttcaaaacttactacaaagctacagtaaccaaaatagtgtggaactagcttaagaatacacatatagatcaatgttataggattgagagtctagaagtaaaccttcatatttatggtcaattgattttcaacaggatgccaacaccattcaatggagaaaggacagtcttctcaacaaatggtgctcagacagctggataaccatatgttaacaaaactggaccactacttctcaccatatacaaaaattaactcaaatggaccaaacatctaaatatatgaactaaaaccactcttagaagaaaacatatgggtaaatcctcatgacttttgatttggcaatggatacttagcaatgacatgcaaagcatgggcaacaaaagaaaaaacacataaattacacattaatcaaaatttaaaatttttgtgcatctaaggacattatcaagaaagtgaaaagacaatctacaaaataggagaaaatttgcaaatcatacatatgataaatgtataaagagatcattagtcattagtctttagggaaacgcaaatgaaaaccacagtgaggtcccacctcacagacactaggatggctttcatttaaaaaaaataaataaacaagttggcaaggatgcagataaattggaaccctcatacattactgatgggaatgtaaaatgcttcagccactgtggaaaacaatttggcaattcctcaaaaagttaaacagaatgaccatagtaaccagaaattctactcctaggtatatatcgaaaagaatttaaaacaggtattcaaataagtacgtgtatatagcatgttcatagtaacattattcataagctaagaggtggaaacaaccaaatgtccatcaactgatgagtggataaacaaaattgtggtatgtctacacaatggagtattacttagccataaaaaggaatgaagtacttatacatgctacaacatggaagtgcctccaaaacattatgctacacaaaagaagccaggcacaaaaggctacatgctgtccagttccatttatayaaaatatccaggataaattcacagatacagaaagtaggttggtggttatttggggttgggaggataaaagaatagagagaaactgcttgataggtaagggatttttgctgtgaagtgatggaaatgttttggaactggataaaggaggtggttgtacaacattaagaatatcctaaaatgccacttaattgctcacttttaaatgaagggtaaaagatacaaagtagcagatatgtaagatgaacaagtctagtgatctaatgtaaaacatgaggactatagctaataacattgtactgtattcggaatttttgctaaatgaaatattgctcttcttgtccaacaaaaaaaatgggtaattatgtgaaatgatggatatattaacttgcttcactagagtaactatttaccaagttgtatatgtgtctcataatatcatgttatatacctcaaatatacacaataaattttaaaaataaaatggttaattttacattgtatgattttacctcaataaattatttttttaaagaaggatgtctgatatggtttggctgtgttctctcccaaatctcatcttgaattgtagttctcataatccccacgtgtcatgggagggacccagtgggaggtaattgaatcatgggggaggttaccctcatgctgttcttgtgatagtgagttctcacaagattggatggttttataaggagcttttctcccccttcactctgcacttcttcttgctgcttccatatgaaggacatgtttgcttctccttcgaccatgattgtaagtttcctgaggcctccacagccatgctgaactatgagtcaattaactctctcctttataaattacccagtttcaggtatgtctttattagcagcatgagaatggactaacacaatgtcttagtcttttttctgctgcttataacagaatacctgaaactgggttggttggttggttatttatttagttatgtatttatttattgttgaggcggaatctcactctgtcgctcaggctggagtgcagtggtgcaatcttggctcactgcaacctcygtctcccaggttcaagtgattctcctgcctcagcctcccaagtagctgggattacagacatgtgccaccacgcccagctaatttttgtatttttagtagagacggggtttcaccatgttggccaggctggtctcaaactcctgaccccaagtgatccacctgcctcaccctccccaagtgctggaattacaggtgtgagccaccacgcccagctgaaactgggtaatttataaaaaagaggaatttatttcttacagtcatagaggatgagaagtccaaggttgaggtgctgcattttgtgagtgagggccttcttgcaggtggggactctctgcagagcctcaaggtggcacaggacatcaaatgccaagtggggctggttgctagctcaggtctctctttcccttcttataaagccactagtcccactcccatgataacctactaatccattcacctattaatccatgaatgggttaattcattcatgagggcagaaccctcatgacccaatcacctcttactcaggaggctgaggtgggaggaccacttgagcctaggagttcaagtctagcctaggcaacatagcgagaccctgtctcatttgtagaaaaaaaagaagaagaagaagaagaggaggaggaggaagaggaagaggaggaggaggaggaggaagaagaagaggaggaggaagaggaggaggaagaggaagaagaagaaagaagaaggaagaaggaagaaggaagaaggaaggaggaggaggaggaggagaagaaggaaggaggaggaggaggaggaggaggagaaggaggaggaggaagaagaagaggaggaggaagaggaggaggaagaggaagaagaagaaagaagaaggaggaggaggaggaagaaggaaggaggaggaggaggaggagaaaggaagaagaagaagaagaggaggaggaggaggaggaggagaagaagaagaagaaagaaggaagaaggaagaaggaagaagaagaagaagaagaaagaagaagaagaagaagaaagaagaagaaaagaagaagaaaagagaagaagaagaaagaagaaagaagaagaagaaagaagaaagaagaagaagaaagaagaaagaagaagaagaaagaagaagaagaaggaaggaagaagaaagaagaagaaagaaggaagaaggaagaagaagaaagaaggaggaggaggaggaggagaaggaggagaagaagaaggaggagaagaagaaggagaagaaggaggagaagaaggaggagaagaagaagaagaagaagaagaagaggaagaggaagaagaagaagaggaagaggaagaggaagaggaagaagaagaagaagaagaagaagaagaaaccttgcctgtcaatactgccacattgggaattaaatttcaacatgaattttggaggggaaaaacttccaaaccatagcaagggggttgttgcagttagctgttttagtaaaaactgtatttggaagttgagaatatgggaagtctttcccttaaaatgataatgtttgcacactactccttaggaagattttgggtaccctaactcatacctcactgtgaagaccacacaccccagtgaatggatatttatggtaagagaaccacatgtgataacctgtagtcattatgcatgcgtatctatgtatatatttaatctatctcatcatcagtttagagataattttgtctctaatttccatttgactttgtaccagtaaaatgcaagagtataacttgtctaaatgagtttgtttatgtataattatattatgatatagataggtaaaaaagagaaattactgaaaccattatttgagcaagttccagaaaagcaattgccacttatgtaaatattagcttaaaatttgcatgactcaaacaactcttgtgtaaaagtatttgtttatctgtcttaaagaaaattaactgaccataaatataaaggtttattttcagactctcaattctattccattgacctatgcgatgccagtaccacacagtcttaattacggtaccacatagttccacacagtcttgattacttgtgcagttctgccctgcaattccagttctggaaacgtctcgtttctctgaagatctgcaggtgccattcaagagacagcagtccctacatgcatgtggaatcagttgttgtgtcagagcccaagcttgtattgatgtagaacaagagcttcaatttatgcacatttttagaaactattaactacagatttttgtgttgtaagtctttaaatgggatttcttattcgtaattgagatgagaagagtctacttatcaaggactaagaatagtaggtcaacttcatcaaaacacttagctcctaaaataaagagacccatttctgtgaagcctttctcaaaatgacaaactcagaaaaaattcttagctgctcagcaaatgcttccagcaatatggcactctgaccaggagtgattctctgtaatatcgtgctgtaccgaaacagtaaaaacagggtgggttcccccaggtgtggcttaataatggtaactgcttggtctgaatgtatatgtcccccgcacccagccccaaattcatgttgaaacttaacccccatactgatggtattcaaaggtgaggactttggggaggtgattaggtcacaaagggcaccgttctcacaaatgggattagtgccctgataaaagaggcttgaggcagcccttttgccccttctgccatgtgagaacacagctagaaggcaccatttatgaagcacagagcagccctcaccagacactgaatatgccagcaccttgatcttggacttcccagcctccagagctgtgagcaatatatttctgttatttataaagtatctagtcaaaggcattttgttatggcagcacaaatggactaatacagggcccatggtattcccagggaatggggacattcataagaagctttatttggcagaatcagaagtgtgttcccccatgagatgattacacacacagagagaaaggaagagatggtgagagtggtggaggactctgaaagcaacatggatgagccttgaaaacattacactaagtgaaagcagccaaacataaagtccacatattgaatgattccattgatatgaaatattcagaatagggaagtccatggagacagaaagagattagtggttgcttgggggtgaggggtggaaacaagaagaattgggggattgggaagtgataggtaaaggatacaatgtttctttttgaagtaataaaagtgttctaaaacagactgtagtgatggttgtgcaaccttgtgaatatactagtaagatcctgtgtgatctgtcccctgacaacttctctgtcttttctccaacattctccaaactccagccacacaggctgccttccgggccacagagtaagcctggctcttctctgcctcagaactcttacagctgatctcttggcctcgaagtctccttcctcacttccttgcacattacctctcctcagagatgccttcaccacttaattttaaagtagctgcccctaatcttgggcgcttgctatcccatcacccccttgaatttggttgagagtactcagcaatatctgaaaatattttaggtactgtatgtctccttccagagaaaacaattcataagggcagtgacctcttccacattgttaggcctagcacctagcagcaagccggcactcaaaaaacattggtgaataaataaataaaggtcatttacgatacaatctctggcctaggtggttcaggggtttttaaaacaagcagaggaatgcacaacgtgcagagaagaacattctctgcaagataagtatctggaccaaggtgaggtggagaggcctatctctttgaaacctcagttacgagaaacataagctaagatagaaaaaagggtggcagcatgatgtggtcttgtgggctgtcattcaaacacatacatcacatacaggtggttctaggggttcccagagacactggctgatgggtgctgatgaggaagatcagatgggtcagcacaagactcaaaaagggattttatatattaaaaagtccctgtcgattggaggtatgatatgctgagattttaaaagttcccatcaagaagttgacaaatttattgaaagtctatttatatttatcaagtttgttttggtcctgtttgttttggagatgttaaatgatttcattaaaaccatcattgctaataaattaagtgtatttattttcctggggatctaagaggacacctgcatgcagaggacagcatgaatatccaggaaagacctgagaatgcccaaaccgctcacctcacactgtacacaaaaattaacttctaagagacttatacttccaggtttatgatcaatttggagttaatttttgtgtatggtgtgaggtaacggtccaacttcattcttttgcatgtagatatcctatggtcctaagcactgtttgttgaagattgactgttcttttcactttgaataggtcttggcgtctttgtcaaaaatcaactgaccatagatctaagggtttatttctagactctcagttctattccattgatctctagccagtagcccactatcttgattattgtaggtctatagtcagtgctacaattgataagttctccatcattttcttgtttttcaagattgtttggctattctgagtcctttgaatttccatatgaattttaaggtcagcttatccacttctgcaaaaaatccatctgggattttgtcaggaattgtgttgagtttgtcacccgatttaggtctgcttgactcttacaccacaggcccagccacagtcagtccttccaatcaagtcagtcaaagaacaacagtaaggctaatgcttactgagcactcaccttgttccaaggactgtgctgagtgcttcacatggctcctcccatgtcatccttacagtgatcctaggaggtagggcttcttattatcttcatgtaagagataaggaaactgaggtgcagacaagtcaggtgacttacccaaggtgacagttcagaagtggcagaggtagagtttagacccaagaagtctgactccaaagcccttgactttctcaactcaatatataatacaaagagatcttaataaacccatttttaaaaggcaagcaatctggcagaaaaatgggggaagaatgtgaacaatttaccaaagaggcaaatgcaaatggccagtaaatatatgatgctccatttgactacaatcaggggaatgcataataagcaatgagatattattttgtccatcatattggtaaaatatttttattgataaaattcagtgttggcgtgggtctgggaaaacaggtactattataacaacatcagtgacagtgcataatggcaaatccactttggaaaacaatttggcagcgttttttataatataaaaaacacatatctttggtcctagcagtcacaatgcacttaggcacaaaggacatggacaagaatgtccactgtagccctatttgtaattgcataaaaaggaaataaaccacgtgtctgccagtaaggaaatggcaatacaggtcatggccaaatccacactactggaacgctggctccacaaggcacaggtttatgtgtgatttgtccatggctgtagccccaaagcctaaaacagtaactgatacacagctggcactcagacatttactgaatgcatactatggcataccgtgcagtgcttaaaacgaataagggatgtgtgtatatatatatgcgcacatatatgtatgtgtatatatattatatatctataaatatatatttccttatttggaaaaaggatctctgcagatgtaattaagtgaaagatctcaagatgagatcatcctggattatccaggtgggccttaaacccactaacaagcatctttgtaagagaaaggagagagacacagaaaggggaacaccacgtgacaacagaggcagagattggagtgatgcaaccacaaaccaaggaacacctagagccaccagaagtggggaaagtcaaggaaagattcttccctagagccttcagagagaatgtggcccaaccaacaccttgatatagaacttctagcatccagaacagtgacagaataaagttctgttgttttaagccatctagtttgtggtacattcctaaggcagctggaaaaaaccaacatagacatgttctctaaggatttcaatacacattaaatgaaagagcctcacacctgttaacattaaaaaaacaaaaaaaaagaccaaacaatttctatctgtagatgcacctaacagcattgaaaactaattgggatcaacatgccccaaactgactacagtagttctcatgtcagttagaagggagaagggtcaagggaaaccttggctttactttataagtagttatcattttttaaaagaatggtttaaggaggccaggcgtggtggctcacacctgtaatcccagcactttgggaggctgaggcgggcggattgcctgagctcaggagtttgagaccagcctgggcaacacggtgaaatcccctctactaacatacaaaaaactagctgggcgtggcggtacgcacctgtagtcccagctacttgcgaggctgaggcaggagaattgcttgaacctaggagggggaggttgcagtgagctgagattgcgccactacactccagcctgggtgacagagcgagactctgtctccaaaataaataaataaacaaataaataaagttaaaaaatgaaaaaaaaaaggaaaattgataacaaagcttagcatttgagaaactacacagactccattttaagaaaagccatgactaggtgtggtggctaatgctcataatctcagtattttgggagggcaaaatgggagaatcacttaaggccacgagttcaagaccagcttggacaaaacagtgagattctgtctccacaaaaaaatttaaaaattagccaggtgtggtagcacacacctatagttccagctacttggaaggctgggatggaaggatcacttgagcctaggagtttatggctacagtaaagctaagatggtgcgtgccactgtactccagcttgggcaatagagtaagatcctgtgtcaagaaaaaaaaaagccattataaaatcaatctaaaaggagaaacaaatcttttattcacttcaaagtgcctttttttctgagttaaggaagacagcccttggaggccactgctgatatgtcacaccagtaggggctatgacttgagctacagaaactgatatatcagttatcacacattgttaggtattcttaacaaaggatttaaatattcaaattttattttaaataatacaaccatttcttttcttttcttttcttttcttttttgagacggagatcttgcttcatcacccaggctggagtgcaatggtgtgatcttggctcactgcaacctccaccccccgggttcaagcaattctcctgcctcagcctcccgagtagctggtattataggcatgcaataccacacccggctaatttttgtatttttagtagagacagggtttcaccatgttggccaggctggtctcgaacttctgacctcaagtgatcctcccaccttggcctcccaaattgctgggattacaggcgtgagctaccgtgtccgggcactatccatatttcatctgatcaagtaaaatatatcatttttcttgcgcatatattctgagtggatgatacacattaatcactactgtttgtttttaatagtttatttgatttactactcacgctttactgaggaagtttctttcactgcatcctccaggttaaaatcatcaaagtccccagatcctaaaaattaaaaaaaaaaattaaactatctttgcataaaacaaagtaataatgaaatatcctctagaaatggtcatttccctttagaaagtgaaggaataacaaaaggtattccatgcaaatagaaacccaaagtgagtggtggtagctatacttacatcagacaaaatagaggccagtattgttagcaaactactataggaacagaaaatcaagtaccacatattctcacttataagtgggactaaatgatgagaacacatgaacacatagaggggaacaacacacactggggcctattggagagtggagggtgggaggagggagagggtcaggaaaaataaccaatgggtgctaggcttattacctaggtgaggaagtaatctgtacaacaaacccccatgatacaagtttacctatataacaaacctgcacatgtatccctgaactgaacataaaagtaaaaaaaagaaaaatagacttttaaagtcaaaaactgtaaaaagagacaaagaaggtcattatatgctaaaggggtcaattcattaagaaagtataacaattgtaaatatatgcacacccaacattgaagcacctaaatatatagagcaaatattaataaatctaaagagagagagagactgcaatgcaataatagtagaacacttcaataccttactttcaacattgaacagatcatctagacagaaaatcaataaggaaatattggacttgaactacactttagaccaaatgaacctaacagatatttacagaacattccaaccaacagcaacaaaatacacactcttctcaagtgcacacgaaacattctccaggatagatcatatgttaggccacaaaacaagtctttacaaatttaagaagactgaaatcatatcaagtatcttttctgaccaaaatagccagaaactagaaataaacaacagaagaaatcttggaacactcacaaatatgtggaaattaaacaatcaacaggtcaaagaagaaattaaaaggaaaatttaaaaatatcttgagacggccaggtgcagtggctcacgcctgttatcctagcactgtgggaggccaggccaaggtgggtagatcacttgaggtcaggagtttggtaccagcctggccaacatggtgaaactctgtctctatcaaaaactacaaaaattagctgggtgtggtggtgcatgcctgtaatcccagctattcatctcaatagatgcagaaaaaatcatttgattcattcaatagtgaagagttaaaagcttttcctttaagatcaggaacaagacaacaatgcccactctcactactcctattcaacagaataagttatatccagagcagttaggcaagaacaagaaataaaaggcctctctgtaggaaaggaagaaggtaaattgtctctctttgcaaatgacatgatcttatgtgtagaaaagcctaaagactccaccagggccgggcgtggtggctcacgcctgtaatcccagcactttgggaggccgaggcgggcagatcacgagggcaggagatcgagaccatcctggctaacacggtgaaaacccgtctctactaaaaatacaaaaacaaaaaattagctgggcatggtggcgggtgcctgtagttccagctgctcaggaggctaaggcaggagaatggcatgaacccaggaggcagtgcttgcagtaagccgagatcgcgccactgcactccagcctgggcgacagagcgagactctgtctcaaaaaaaaaaaaaaaagactccaccagaaaactatgagaactgataaacaaatttagtaaagtagcaggttacaaaatcaacatacaaaaatcaatagcatttctatatttgaacaatgaactgtctgaaaaaaagaaacaatcccatttataataacatcaaaaaagaaaatactgagtagcaaacttaaccaaggaggtaaaagacccgtacctcctaacctgtaccttgaaaaccataaaacaatgatgaaaaatgaaaaacacaaatgaaaatatatcccatgttcatgtattagaagaatattgttaaaatgtctatactgaccaaagtgatctacagatacgatgtaatttttatcaaaattccaatgtcatttttcacagaaatggaaaaaaatcctaaaatttgtatggaaccagaaatgacccccaatagccaaagcaatcttgagcaaaatgcacaaagctggaggcatcacacttcttgatttcaaaatatattataaagctattgtaatcaaaacagcatggtactggcataaaaacagacacatgaactaatggaacaggatagaaagcaccaaaataaactcaaatatttacagttaattgatctccaacaaggacagtctcttcagtaaatgatgtagagaaactggatatgcacatgtggaagaatgaaactggacccctatctcataccatatacaaaaattaactcaaaatgaataaaagacttaaatgcaagacctgaaactgcaaagctactagaaaaaaacacagggaaaaagttgcacaacgttagtctgggcaaccatttcctagataagactccaaaagcacaggcaacaaaagtgaaagtagacaaatgagactgaataaaactaaaaagtttctgcacagcaaaggaaacagagtaaaaagacaacccatggattaggagaaaatatttgcaaaccatacatctgaaaaggggttaatatccaaaatatataaggaactcaactcaatagcaagaaaacaaataacccagttaaaaatgggcaaaggcaaaggagcttctcaaaagaagagatatgaatggtcaacgggtatatgaaaaaatgctcaatatctctaatcatcagggaaacacaaattaaaaccaaaatgtgggctgggcacagtggctcatgcttgtaatcccagcactttgggaggccaaggcaggcagttcacgaggtcaagagattgagaccatcctggccaacatggtgaaaccccgtctctactaaaaatacaaaaattagctgggcgcggtagcatgtgcctgtagtcccagctactcgggaggctgaggcaggagaatctctcgaaccagagatgcagaggttgcagtgagctgagatcgcgccactgcactccagcctggtgatagagcaagacaccatctccaaacaaaacaaaacaaaaacaaaaacaaacaaaaatgtgatgtcatcttacatctgttagaatggctattatgaagaagacaaatgatatttgttggtgaggatatggagaaaagggaacacttgcacaagttgttaggaatgtaaattagtatagccattttggagaatggtatggaggttcctcaaaaaaacaaaaaatgaaattatcatataattcagaaatcagtcccagttctgtgtgtgtattaatatccaaaggaattgaaatcacgattttaaagagatatctgtactcccatgttcattttggttttacttacactatcaaaggtatggaagcaacctaagtgtccattaacaaatgaatggataaagaaaatgtggtacatatataaatggagtactatacatcctttaaaaagaaggaaattctgtcactcatgacaatgtggatggaactgaaggacattatgctaagtgaaataagccatgcacagaaatacaaatattgtatgatctcacttagatgtggaatctaaaaaagttgatctgacagaaatagtagaaaggtagctaaccagaggctgaggggagggagaagtatggggaaagggaaagtgttgattaaagaacacaaagtttcagttagacaggaggaattaagttttagcaacctattgcactgcatggtgaccacaattaataataatgtattgtatattttaaaattgctaatagacttttacaattctcactacaacaaaataagtttgtgagataatggatatgttaattagcttgaatgaatcttactacacacattgtaccctataaatacatacaaagattatttgtcaattaaaaataaatgttaaaaattatttttattagcccggcatggtggtgcacgcctgtagtcccaattacttggaaggctgaggaaggaggatcgctggaggctaggagtttgaggttacagtgagtgtgtattgctctctagcatgggcgacagagtgaggccctgtctgtaaaaagcaacgataacaaaacaaagattttaaaatttaactgtctttgtatgaaacaaaataatactgaaattctctcctgaaatggtcatggccctttagacagtgtcatgaatgtaactccacaaaagggaaatctgtcaaagccactcaaagatatactgagctgatagccttcctcaaacaacctatctatccccaccaaaaataaaaattaaaaaataaaaacaaaacaaaaccccaagcttcagtccactagaatgttgaaggctcaggtgtttcgaacatgaagtactatctcacagaaaaccttctccatagagaagtaagaggggtcattggagcccacagctccactgatgaggggccaagttcttccaccccaccccaggtctcacaaaggctactctatactttgtcaatccagggtaccttctctccgatccccagtaccccacctagactagaggctctggctaaycacacataactgaaaaagctctggggaaaagtttttcacaatagaatttgtcctcacaagtggacccatctgcccaacctagcgtcctactgaacttgatagctactgtttcctctagatgggcacgtagtttgtcataagggtgtatagcttatcagttctcaagcaaaccattatgcatgcatactggaattgacctaagtaaatggataggggatggtgggagccaggtttctcactatcagagagagaggttacagataagaggggcaggctaaaatgacccatacaaaaatggattagagtaggagactttaagctaagtatgaaatcatatttagcttaattttttttttccgagatggagtttcgctcttgttgccgaggctggagtgcaatagcgcaatctcagctcaccaggttcaagcgattttcctgcctcagccccccaagtagctgggattacaggcgtctgccaccacgcccagctaattttgtatttttggtagagatggggtttttccatgttggtcaggctggtctcgaactcccaacctcaggtgatctgcccgcctcagcctcccgaagtgctgggattacaggtgtgagccactgcacccggcctagcttaatattaacatagtcatgtgttgcttagcaacagggatacgttctgagatgtgtttgttacacttttaccattttgttatgcaaacatcatnnnnnnnnnnnnnnnnnnnnnnnnnnnnnnnnnnnnnttatgcaaacatcatagggtgtccttacacaaatctagatggtgtagcctactacacacctaggctgtatggtagagcctatttctcctagcctacaaacctgtacagcatgtgactgtactgaatactgtaggcaactataacaccatggtatttgtgtatctaaacacagaaaaggcacagtaaaaataaagtattataatcttatgagcccaacattgtatatgtggcctgtcaaccaaaatatcaccatgtggcacgtgactataaacagatagctatatacagaaatatttatagccatgagtatatatatgggttagtataaagacatatattcccttgctctgtcaactggacggggctggaagcaacaacactccgtagcaatgagcacatctagcacccaggtcttcgtctctaatcctactctccaaaaagggaaccaggggtccttggctgatttgactgggacagaaaatatgtaagatgagcttgaatcttgaagcatcttgaggtgccagaaagtaagaaagtattattattttttttttttttgagacggagctttgttcttgtcagccaggctagagtgcaatggcacaatcttggctcactgcaacctccgccacccagattcaagcaattctcctgtctcagcctcctgagtagctgggattacaggcacccgccaccacacttggctaatttttgtatttttagtagagacagggtttcactatgttggccaggctggtctcgaactcctgacctctagtgccgcccaccttggcctcccaaagtgctgggattacaggcgtgagccactgcacccggcctggaagtatttttaaaaatcacatcaattggtatctgtcaaaggggcacaggaaccaactgaaagagctcccagtggctatggctggaataaatttttaaagacttttttcaggacggatattagctggaacaatttgaagaacaaaataaagtagtattgggttataaccccaagtataacataagtatctacgagtccatgctgaatgaataagtgattacataaataaacaaaagagagagaatagacaaatctctcatacagaataattcaaattcatttctgtagctatctgtctctcatggaggtgaagcacaattcaccactccctacgtattagccacacatagtaacttccttcccaagattacagtatgataaaggggaaatagaaaaactttactctttacagaggagaaacctgacaaacactacctgagccgggtgaccaaggtcaacatgtacaatgatgagtcctgttgacagtatgttcccttgatataatgtgacaggatgtgatgtgcatggcactttgcctctgtggtctttctttcaaaaccccgtaactccagtctaatcatgacaaaaacatcaaataactcctgactggggggtgctgtacaaaatagctgaccaatcttcaaaatcaccaaggtcattaaamccagagtttgagaaaccggcatagcctgagaagcttaagaagacgtaaggactgacagtcacatggattagattggatcctggattggattctggaacagaagagggctttacataaaaactgaggaaatctgaataaagtatagactttagttaataatagtatatctatattggttcattaactgtgacaaatgcatcatgctaatataaaatgttaatagggaaaactggatatgaagcatatgggaactctgtcctagctttgcaatttttctgtatatctaactgttcaaaaataaaacttattttaaaaaatcaatttcttatagcaaaaccaattaggggcaactgctaaatgaagagatccaggatatataacctcaaaacccatttaaggggaaaaaataaaaggacaatagcaacaaccaaaactcagtcaacccaacaaaagtcaccagaggttaaaaaaaaaaaaaaaagaactatgataaatagaaaacaaactttttgggtttttttgtagagatggggtctcactatgttgcctaggctggtctccaactcctagtctcaagcaatcctccggccttggccttccaaagtgttgggactacaggcatgagccaccatgcccagcggaaaacatgaactttaacataggaatacgtataatcatatcagtaaaaaaaaaaaaaaaaaaatgggggggggggtgtaaataggctaaatctcccattacaagacaaatgagattaaaagatatctaactataggctattgataaaatgtacatttaaaacaaaatggcaaaaaaatgtagagaatgaacaaatatataccaggcaaacactaacaggaaggaaacagatatgatattaatataagataaaattcaagacccaaagctcaaagtaggaaaagagcaatattttatggaaataaagcatataatataccagtaaataaaagttatggcacttaataacctagcttccaaaattctaaggtagacttttgcttcttgctatgagaataactgggatcagacccgcctttccactgtaaatcataaaatgaacaaaacccatgaggcaaaatcagcactgaacaagaaagtagtgagagcctgcaatccttgagattagggaaawtgtaacagctaaatccaacaggtgatctaggattggatcctgaacctataaaggccattactgggacaatcagcaaagttaaattaggtctgtagaccagctagatgataatactgatcactgtcaatttctggtcttgatggaaatactgtagtcaggaagagagtatccttgtttttagaaactgcatactgaagtatcaagaggtaataggtataggcttggtacagtagctcatgcctgtaatcccagcactttggaaggctgaagcgggagaattgcttgagcccaggagttcaagaccagcctgggtaacatagggagactccatctcaacaaccacaacaacaacaacaaaaatttaaaaattagcctggggttgggggaccaggtatggtatctcatgcctataaccccagcactttgagaggctgaggtgggaggactccttgagcccaggagttcaagaccagccaaggccacatagtgagacctcatctctactaagaataaaaaaaaaactagctgggtgtggtggtgcatgcctgtagtcccagctacttgggaggctaaggtgggaggatcacttgagcccaggaggttgaagcttcagtgagctatgatcatactactgcactcaagcctgggcaacagagtaagactccgtctcaaagaaaaaaaaaattagctgggcatggaggcacatgcttgtacgcccagctactctggaggctgaggctggggggatcacttgagtctgagaggttgaggctgcactgagccttgacaatgccattgcactccatcctgggtgccagagggagaccctacctcaaaaagaaaaaagaaaaaagaaagaaagaaagaaaaagaaagaaaaaaaagaaaaaagaaagaaaaaaaggtaatggatctaatgtttgcaactaattctgaaatggttcaggaaattcatacacacacacatgcacgtggggtggggagaacacatacatatacagaaaatgtgataaatctggaaaatttaggtgaacaacatatataaacttttttttttttttgagacagggtctggctctgtcacccaggttggattgcagtggtgcaatcatggctcctgcagcctcaacctcctgggttcaagtgatcttcccacctcagcctcccaagtagctaggaacacaggcacatgccaccatgcctaacttttttgtattttttgtagagatggggtctcactatgttgcccaagctggtctcaaacttctgagctcaagcaatctgcctgcctcagcctcccaaagtgctgggattacaggcatgagccactgcrcccagtcaagaactctttgtattaataatagacattattgggacaattgttaaaacttggatggggtctgaggatttagtggtaataaggtatcagtgttagtgtcctgattctgatggttgcattgtagatatgtaagaagatgtccttatttgtaggaaatgcactctaatatattgggggtgggggtgataaggcattaggtaaccaatttactctcaagtggcttggtgggggaaaaaaaagttccttgcactgtacttgccaattttctgaaagtttataattatttcaacattaaaaaattaaaatatgcaaatacttcaacccagcaattcaatttctaggtacctgttacagacaaatactagaaacacgtacccaaagaagtatggacaaggatgcttacaacaggaaaaagaaatggaaacagtccaagtgttcagcaaagatgactggtgaaatgaaatatggctcttccatacaattaatgattgtgtagctgttaaaaagaatggaataagcctataatagtggcatgcaagagatctccacaatacactaataaataaagcaaagtgcagagaagtatttttccatttgcgtgtctgtatccatatctatatccataaacatcttctggaagtttacacagggaaactggtaacagtagttatgtttagggaatgagagtaacggtcaggggaagggagagggagcattttacattaatttaaactcttttctgcctttttgttttcaatccatgtacgtgtatttctcctaaaagttctacatcaatccctccaaagccataagcctaccatctcaatgggtcttccttcaaatctctatctctgcttcctcacccaagaattgcaaaagtaggttctctgaaatgacatcttacacaataagacgtttttagcctcagccattccccctactgcttgctcatatatcctgctacatgtcatcgggtaaatatgttaagaggaacataacacaatgttgtgctatgtacccatcccttgttgaccttggattcaacagactcaaactatctgtggataaaaccattcagtttcaatctagatcctgagctattaagatgtcttcaaagcccacaagcaagcacagttgctaaaatcaagttcagaagaaatattctcaggagatacaatgcacctcaaaaggtgcaaaatagggtcatgttctataccccttctatgcaagctattaactaaactcagttttggatgcaggcagaccacagtcctctgtgttagtgacacagactaaccctctggcaccaacacgcattagaaaacagctgattcaccataggctcaattcacaacccgcagtccctgtatctgggcagccagtattcaagtattcagcagaaaattacttccaccgcagagggccaccaagaattccttttaatgtaaaaagcacctaatgagctgataatacttctctgaaaatgtcctttggcaatgttgcccatggacttgtgcatgtccttgagaagattaatttcataagaaaagtgctgtttccacccacagacactccaacagccagtgtctgtcctggagtagattttgtccctttgggaaggaacacaagcttgacctcatgttgcaatttgacccaacaggactggcatctaaagctaaggctaagggtgcacttcaataaaggctgtaaaacaaggcacagctgcccttgttagagaattccaccctgaactggctgtgatccagcacctgccaatgcctgattgaaacgtctgatccttgasagagatcatttgatgggccccttaagtagcctttcatttggatttcattaattattcattccctcctctgttgttgctatccactccactcagttcatcctgaaagtacagccattccagttaagtgtttttgtgtgtcctctctctagactcgccccacttaacatggtagccactagccacatgtggccgtttaaattaaaattagcattcgataatttttttaaattctgcttctttattgcactaaccatatttcaatgcttgatagccacatgcagcaggtaactactgtgtttgacagcacagacagagaacatttccatcatcacagaaagttccataggacagtgctgctctagacagtgagctgccttaagcagggactggcgcttggtaatctccatgccaacaccacacacagacctggcagcaagaaagcatttcctaaaggtgtgttcattttgattaccaaaactctgtcaccagtagatagtacctgatattactttgtgacaaaatccatttggatttcatgccaagagcaagcatctctgcagaggaacgtgtctgctgcctgctgctggattaataactgcagaggcagctgggacccctggctgccaaagatttcagacgcaaagtagggattctagcagggagattggcacctctcaagtggccagttacatttatttcccctgctctctaaggatggtttctattctaccttcttcctttgtacatgtaagcagtttacaatttggggggaagatgggccagtataaatcctaagtgagtgaatactcacctaaactgcatcggtttttaaattttaaaatcctgacccttttctgggctgggcacagtggctcacgcctgtaatcccagcactttgggaggccgaggcgggcagatcatgaggtcaggagttataagaccagcctggccaacatagtgaaaccccgtctctactaaaaatacaaaaaaattagctaggcatggtggcgggcgcctgtagtcccagctacttgggaggctgaggcaggagaatcgcttgaacccaggaggcagaggttgcagtgagccaagatcatgccactgcactccagcctgggcaatgcagtgagactctgtctcaaaataataataataataataaaataaataataaaatcctgacccttttctgtagatgaataagaaagcataccagggacatcttagtctggtaaatcatagatgcatcatctcaggattttccatttctctgccttaatggaggctaagtactcacactatccctacgtttgtccaggaaagccaggacgccactcacctgcctgtcatctgggcttactgcctgcacctacaccacaaattcaagggaatagagctatttatcaaaaaggaaaccaacttggtcaatggtgagaccattaacaaaagcaaacaaggcccactataacatggaccagaatcaaagttggacctgagggattgaatcgtgacccagcaaatgtgacagtggcacaagcctctagatcacttgggttcaaggaataacactcaaatcagtcccagtagattgagtctgctaatggacgggtggggagcatagcttgattcaacttgaaatgagccatttaataagaatgtttcaccatcatatgataaagacctcacctgatgcagctgcttgcaaagacttgcctttcccctgccctctggcaagggggtgattaatcaaaggaaagcctgcaggtcagaaaaacagcttcacacctccctgtctaccatggaaacattcctggacactgcttgtgggaaatctatgcgacaaactcactggtatgtatggccaattctacaaatgtctctttggtgaaaacaacttctctcccttaacacaaacaagtaggtatccctctcccaccttgtgctagagagggtgggggcaaaccaaaaatgctagttgttagtccccagtttccctgaatgtttgcaccattttaactcttgttacctcagtctagatttgaacacatttgtcttgatgaatttatgctttcacacctcaaagcatgctgagtaattaatatcctctggacttgctaagcactgcagcattgcaagtgaacatgaaaatggctttcctcttattctgattactaaatggatttagctattgccacctgagctccaaataatttcatgaataaatttaaatcactcccagagaggacaacaatgacatgaagcatttcagtccacaacagccacagccaccaatccacctgcagtggccataagaggtctgacccggtcactgacagggcacccggtcactgacagggtgactcttccagtcacccactatggaaaggaaaacatgataaataaggggtcactgagatgcaagcgccatgtctaaaagtcttaaagtgcttttacttattcccgggaagtatctaagcgtccgtatgtagcaggttgcttaatttaaatgcaggggaaggattttttttcttttttaacaaattgtataagtcacttcgttgatgagtttgtaattgaaaggccaatttcaatcttccttttcacacagaaacgtaaatgtctacaacggttgttcacaaggaaatcccaaatgtgcctcagatgcctgcaaggataaccttttccaagaagtcagagctgagagctagggaactacttagcaaaagaaaaatggagtgggygccaggggctagggagtgaagggaatgaagactgactgctagaggctaaagggcatggggtttctttttcaggttgtgaaatgttttctagaactagatagtggtgatagttgcacaacataatgagtatattaaacacagagtcgtgggctttaaaatggtgaattttatgttttgtgaatgatgcctcagttttttaaaaatggtgttagtgtgtctccatatactgtccctggcattccactctgtgggggagtgccctgggacctcagagatcagatgtcctttttatgggtgggagcccaagagccacagtggttaatcattaggtagcagacatagaaactgccccaaagccagaagatgcaaggtctcgtcccagactgccactcactgactgggggtcctagagcaatcacttgatcccataggagtgacctgttccccatgtgtaaaatgaaagtgtcatacctgattactcctcctcccatggtataaggtggatggcatgatagaaataaaactagcaaagacaaataaggtgctgtcatgatgtgtcacaaggcttagggtcccatgataaccctatgacaagtggcacattgctctcagggccacagtgtctgtgaagcagtgcaagatactaagtgctttgttagctgggcgcagtggctcacgcctgtaatcctagcactttgggagactgaggcaggcagattacctgagctcaggagttcgagaccagcctgggcaacatggcgaaaccccgtctctactaaaaatacaaaaaatgagccaggcatggtggcatatgcccgtaatcccagctacttgggaggctaaggcaggagaatcgcttgaacccggaaggcggaggttgcagtgagccaagattgtgccactgcactccagcctaggcgacagtgcgagactctatctcaaaaaagaaaaaataataaaaataacttaaaaataaaaataaaagatactacatgtttgtcaaaggtgacactgctggtgtcacacacacaattggggccaaggtttccaaactctggtcaaaggctgttccagggcaacacatgaggatatcggcactggtgaccagctttggagccaaacaggcaggatgcagacaccagctctgccacttagcaggagagacaccttgcgcaagggacttaacagcgctatacctcagtttcctcatctataaaatggagataacaagagaccctactgcagtgagttaatgtgaggattaaataatcattatatataaagcatttagcacaatatgtgacataggaatccctcaaatgttagctaatattattattaaatttggtattaagtagaatccactagtaagtagaaggccttcaataaatatgcatgagtaaatggcttataagagaatcattaaaatgttcaaaagcttaatggatgaagagagaaaaaagccacactctaatctaaactcacccagtgcttgataagcctttagattctactgatacgacataagtttgggaaactgaggcacaagaatgtaagtgatttggacaaggccaccccaaatcagtctgttgactaataacaaatgcacatggtatttccttcccctgaaggcagcataaacaccaatggatcctgtgtactttcttaagtcaggtaagaatctatgtctagttggtgttgcatgtatgaacatttccaaatcagagccaggcagagtggaacaggacctcagaaatcatcaagattttcagccttgccatctggccaggccaatgcagagggagaaaggcgctgagcacgaggcacctcctaccctgtatccccaacccagacctttgtcctcaattccaatcctgcaggtcctgctacccaggggagatttccatagcacctccaaggaagcatgtcctgaattggactctgtcttcccttgtgctagtaatcctggtccagctatccttgtgctagtaatacccagtcttaactactgttgtgttgtagtaagttttgaaatggggaagtgtgagtctaccaactttgtgcctgtttttcaagcttgtttggctattttgggtcccttggatttctgtatgaattttaggatcagcttgtcaatttctgcaaaaagacagctgggattctgatagggattgtgttgaatctgtagttcaatttgggaagtatcattccatctatttttaaacatgctcaaatctctcccattttaactagaaaaccctcttttgactgtacatccccatcttgatactgctttctctcccaccccttcataaccaaactcataaaatgactatctatccttgctgtatctgcttgctccctctcaaatcactcctcagtatctcacagccagctcccactcagaatccacaaaactaaatgccaagccctggctctccaacctagacccttttcctgagttccctgtttgtttcactgaatggcacagccacccactgcattgtccaagccagaaagctgtacactgtcccgacatcttctccttcattctccatagccaccctgtcaccaagaactgtcaattccacccccagcacatgcacaaagcccaccacttttccactgccactaccaagccaggcagcgatcatctttcccctggacagccacaagcaccatcctcctgctccttccaggtctatgctccatccaatccattctccacacagcaggcagggagtcctcctttttcctttttaaacaaacttcaaggcacatcacttccctgctcaaaactcccaaaggcctcctcactacactgaatataagctccatatgcctaactatggcctgcaggcccccccccccttgtactatacctctcacagtattacataaattatattatttgttttcaaataatgtgtgtccactgtgaaaatcttagaaaatgcagaaaagaagaaataaaataacggcaagtggttaacaatatgggtgaaccttgaaaacattatgctaagtgtaataagtcaatcacaagaaggcaaatactatattcccattttatgaggtccctagagtagtcaaattcacagagatagatggtagaatgatgactgccaggggctggggagagtgggagatgggaaattgcttaatgattagaggttcagttttgcaagataaaaaagttatggagattggttgtacaacaatgtgaacacccttaacaccactaacaatacacttagaaatcatctaagatggtaagtattatgtgggttctttttccacaatttaaaaaaaaaaaaaaaaaacagcaagtgatgctttttaaaaatcaaaattcagaaagacaaagccaattatctcaaggcatgttaactttggacagaatctgaaatatcatctaattgaccatccctaaaatgcagcaaagtaatctccagtgtataatagaggttctcagccagggaggatgagctgaccaacctcagaaacctcctccccctcagaattcactgggctggggacccaggcatgtgctttggaagtacattcattcgttggaagagtcacgtttttggaaagttttttgtgttgaccccaaaactggccagtagattaccctggcactacaaagaataagtttgtcccctgctgtcgtatgctcctttagacatgtggatcccgtgctaagggtcactggctacccgcaccaggagatcctgtctccccaccacaacctccacttcaaccacttcctccctttgacttgtgcaacttttctccatgaacttgtccatgtgcgtcatactgcygggaaacagcttgctcaaattcccttcccaaatatacctaatggcagactgtggcctctatcaacaatcacactcaaattcaacacctgtgtacacagttaggcgatgaagccccaacagccgttggcacttctgtggtgctttgtaaacactgactaagcaatctggtgagcagcgtcaaaaacagaatgaggccaggcacggtggctcatgactgtaatctcagcacattgggaggccaaggcaggatgattgcttgagcccaggagtttgagaccagcctgagcaacatagtgagaccctgtccctataaaatttttaaaaaattaaaaattagctgggtatggtagtacatgcctgtagtcccagctacttgggaggctgaggcaggaggattacttgagccagccagggtgacagggtgagactccatctctacaaaaagttttttaaaattagccaagtgtggtggcatacacctgtagtcccagctactcagcaggctgaggtgggaggattgcttgagcccaggaggttgaggctgcagtgagccatgaccgcaccactgcgctccagcctgggagacagaggtagactctgtctcaaattgaaactatacaaaacaaaacacagaatgagctagcccttgtatatcagtacatcctgctccataaccttctgaagccagcttgtcatggaagcaggcaatcagtctggctcattccacaccacaaatcttccaagtgagtaagaacccactgattcctgcatctgtagaaaatgggagataggatgtatgacaacttcaaggaacattactaggcccacatctgcttgatctggccaactaaatccctaagccagttctatataatataaattaaataagcatttaatactacgcaaaataaaattacagctattcagctgacctttccccttttccactctgtatttgtgcctgtttacaagcccagtggggaaggtatgccaagaatagagatgttctgaggacacaacaagccaattaaaacaacaaaacaaaacaaaaaactagaaatgacaaatatcctgcaagtctagattgttgaacatgcctgatcaggttggagagggaagcaggaggagcccaaagaaagtctcctgtatgtcctaaagtggaatctagcttgcctactttctaagccacattccagcccacatgtgtcccttaagacatgaaccaagccaggcttggcagcaggcacctcaccattaaggccagctcagcagtggccatgctcaccactcagagcccagcaacttagtagaccacgtttatcccccagtttcacagaacacatgcccctgacagggatcccaaatttcccatccctacctagaacatgtaggcaccagcggacgtgcacatagaaacaaatattacaccagagggctacccatgttgcaacaaagtgattctcacagagataaatgttgcaacaaagtgatagaaacacagtacaacaaagtgatactccatagaaacaaatgttgcaacaaaggatgatcttatttgtgtgaaggactaatatttcctattccattttatctcattcaatatgctagttgcaactcaactacttgcacaggccactgatgggttgagccccaggtgcaacaacattgtacagatgctgcctaagaagtgaggtgttycttgtatcacagccaatccaggactgaagaaactctctaaccaggagtacttttttttctttcttttttttttgttttttgagatgaagtctcgctctgtcacccagacagaagtgcagtggcacgatctcagctcaccgcaacctctgcctcccgggttcaagtgattctcctgcctcagcctcccaagaagctgggattacaggcacgtgccacggcacgcggctaattttttgtatttttagtagagacagggtttcaccatgttggccaggctagtcttgaactcctgacctcaggtaatctgcctgcctcggcctcccaaagtgctaggattataggtgtgagccaccgcacccagcctaccatgagtattttctaaccaaatgtgaaagccctcccctccaagtcaagacatctgaatccttcacttgattctgtgycttcgaacttgggcaaattgctcccatcttcttcctcccttttcccattctgtagaaggaagggatgggattagataatataggacaacatccacttattgaggacctagcaaggagcagctgccatgtcagacacatggcatcaacacttcagtggtttgtgagctggcatggtgccgatgagcagcctctttcaccaatgaggagctgaggctcagatagatgcagcagcacggggtcatgcagctggacaggtctgattcccccacacatgcctgcccctaaggtgctctaaaagtaaagtgctatgatgagacagctgtattttctattggtgctataacaaattcccacatagtggctcaaaacaggacaattttatgaccttgcagttccagagatcagaagtctaaaatgggtggccctgggttaaaaccggggcaccagcaggctgtgttccttctgaagcttccaatccatttccttgcctttgccagcttctggaggtcacctgcattccttacttagctcatggctctttctccattttcaaagtatatcactccaaaccctgcttctataatcacatctacctccctctttgacatatcaggccccctttgatcacattgggcccacttggataatccaggacaatttcccatcttaagatccataacttagccctatttgaaagtcccgtttgccatgtaacgtcacatattcacaggtcccagagattaggatgtggacctctgagcagggagggaacattagtctactgaccacaacagccaataaccatcatctgttttactgtttcaagcatttaaattgttcactactgcttggatgaaagaactcttctccacatcattactccagagtgaaaatccactttatgctgggtagttaaggaaggtgtgccagggtggtgaacttacactaaaaggggccaactctggagttgcagaagtgcatttggccaaaacaacatttttagaagttcgctctgttgtgtggagacttgtttgtaggaggccagttggggagctgtggttgttttccaaacctgtaaggacaatggctgagcacaggatgacagctccccatcacaccctggacctctggacttcacttggttgctaaacttcagcaggctctatcccacctcagggccctcaggggtccctctgcccggaagactcctcccatctcttcccttcactaaattctgcttgggcacctcagactcctttttgaacagctttgttgaaagtgtgaaattcagtgatttctagtatattcacaatgttgtgtaaccatcacctatcattttccacatttccatcaccccaaagggaaaacccggactcattaaacagtccatcctcctcatcatccctcccccagcccccagcaaccactaatctcctttctgtctctatagatttgcctgctctggtcacctcagatgaatggaatcatccagtacatgctctttcatgactggcttctttcactcagcatgtcttcaagcttcatccatgttggagcatagatccgaatttccttccttcttatggctgaaaaaagtccactgaatgagtagactatattttgttcatccattcatcagttgatggtcatttggggttttctttcactttttgctataattataagtagtgctctgtgaacatgtacagccgggttttcagttttcttgggtctatatgtaggagtggaatgactactttgacagtaaaatacaataagcaatcaccacggaagtttctkaaatccattcatgctgcacgatcctgctgcttatcactgacccctcttgactcccagtcctcagggaggtatacaggggactactaccccaccattcacagccactttaggccgtgtcacccagacttgcaccttcagacagacacaagaacacaygtaagtgcacctagacatactccagcaagtgaaatgatacgtgtataggatgaagccaagaaatggaaaagttttacccacacatatttggaaattatttaggaagaagagctctgaacactgtaacctgctctgacatccatgctgtgtggtggtggggcagcaaagagcacacatgctaaaatcagatcatctgggtgacagtcctgcctcaaaccccccacccacccacttcactgctgggcacctcagtttccttgcctgtaaaatgaagatgataaaacagtccctgctgcatcgggctcttgtgaggactcagtgagctggcacaggtaaagcatagtgttcgataagcgtgcacagtcctccccttcccctaggagcttccagcagtcaaggccagtcagttctcctagtttacagctctgccaaaatagacctagcaagaaggggtcttctcaaggtcactcagctggttggcacaggtctgcgactataatctctttaatgatawaaaagcacaacgaaactcccttgggaagacgaacttcagaagtgataagccttttctacagcacaagcagcaatgcaagccccatttagctgaaacaatccagtgcaccatgttcaaaccattcaagagtaataacaaatctgtgttcagtcccccatttggcaatcactgctattaccatgaaggtccaatcccagagacatacctgagaaggatatgcctgagagatgttccagtatgatatgacaaaaaaggaggagaaaaatccaagtagcagagaatggctaatgagctatgaagttacagtcagataggcaagatgtacctcctttgggagcccttctctgatgtgtcccctccacaccatcaaaacaccaggtgtaatatcatcagcttggctcttgcaacccccacataacaggagcccatggggcagtgaggagaccagtcctctttcttgtcctagtcctgagcccagagcctgggcccagagaatgcatacttcaactttcgctctactcgtaaaacaagcggcccaccaagtgcttttcccaatagcaagccactcttgaaataatttaatctgaaattatcctgtctgttttacctgcctactctgtctgcctccactttgggtcatttaattattgctacccataacaagatgcaaaactgcttaggaattccctgggtgctggttggctggggacttgttggcagctaacccacaaagtctttccttagcataggcaaagaatgatgccttatactttttgttatgggctgaattgtgccccctcccaattcatacattgaaatcctaactcctattaatttagaatatgaccatatttggagagagggtcttaacagaggtaatcaagttaaaatgaagtcattagggtgggctctaattcgttatgactgctatcttgggcatttgaacacagacgcacacagagagagaagacaatgtgaagagacacagagagaagatggatactgataagctcagaagagcggcctggaacagattctgtctcacaaccctcagaaggaaccaaccctgccaacaccttgacctcagatttccagcctccagaatcatgagattatacatacctgctgcagaggcccccgattatgtggcatttcatgacagtagctctaggaaactaacatagccttcatggctccctgtggctgcctgctgccccccctccccccggtggttcactgcagctggtacaataagggaggaaaggggacccatggaaacagacagatggcctaaagaagacatctgcctctctgccaggaacctgagcaatcgtgaggaagtgactttgctgctctgtgctctccatatgtaagatggaagtaacacctgctgccatgcacaatcactactgactggtgcatgactggttattgctgtggtttgtactgtgtctcccagaaggaaatgttcaaatctgaacacctggtacctgtgaatgtgactttatttggaaatagggtcactacagatgtaatgagttaaggtgaggtcatactggagtggagtgggtcccatatccagtgtggctggttgtattagtccattcttgccttgctataaagaactacctgagactacataatttatgaagaaaagaggttaaattgattcacagttccataggctatgcaggaagcatggctggggaggcctcaggaaacttacagtcatggtggtaggtaaaggggaagcaggcacatcttcacatggtggagcaggagagagactgtgaggggggaagtgccacacacttttaaaccatgagatctcgtgataactcactcactatcatgagaacaatgagggggaaatccgtccccatgatcaaatcacctcttaccaggtccctcctccaatgctgaggatcacaatgagacatgagatttgactgaggacacaaatccaaaccatatcactggtgtccttataagaagagcaaaagatagaggcacacaagggagaactccatgtgaacatggaggcagagattgaagtgatgtagctgcaggccaaggaacaccaaggatcgctaccagcagctaacgggggcaagaaaggaccctcccatacagctatcagagggattgtgccctgctaacaccttgatctctgaattctaggctccagaactgtgggagaatgcatctttgttgttttgaatcacatcatttgtggtacattgtaatggcagccccaggaaactcatacagtcacttaaatccaaattcatgggcctggcacacaagtccctccccagtctggccctgacctgccacttttaaattcttccctatcattccccactgcacacattctgtatgccctggctgtggtgattccctgaaggacaaaccttgcccacactttggcatctgccatttcctgggtctgaagcgtccttctttgtattttatgcccaaggatagttattgcctaaattgaacatcatatcctctaggaagcctcagcccaccccaccagacagaggacaatttcctcctgtgtatcacaccacattcctgtggtggttcttggcaaacagaatattctaacttccattcatggctaacttctctacagaacggaggtctgagaggcttgaggccacagcacctaaggcaaggccaggtgtaccacatgccgactgggcactcagcatgcttgttacatgaagtcacctggcccagcatttttcagtaacaccaaaatgttccagaggaggctttcctcatctgagaggaaaagaaatgaatgatggacatacaaaatgacatgaatgaatctcagaataattatgctgagtgacagaagccaggctaaaataataataataataataataataataaagactacacgctgtgtgatcccatttctataaaactctagaaaacaaactatagtgagagaaaacagatcagacatcaatgtaaagacacagaaaacatgaaaatgcaaggaagtatgacacgccaaaggaataccataattctccaaaaagaaaccccaataaaaaagaaattcatgaaatcccagaaaaagaattcaaatcattgattctaaagaagttcagtgagatacaaaagaattccaaaaatcaaaacaaagaaatcagtaagacaattcaggatataaatgagaaatttaccacagagacagatataaaaatgaactaaacagaaattctggaagtgaagaattcattgaaagaatgacaaaatacattcaaaagcttcaacaatagactagctcaaacagaagaaagaatctcagaactggaagacaggtcttttgagataacccagttggacaaaaataaagaaaaaagataaaaaaaagaatgagcaaagccttcataatatatgggaaatcataaagtgaccaaatttacaaattatcattatctcagaaggcgaagagagaatgtaaggggttgaaaaactaataaaataatagatgaaaacttcccatgcctagcagggaatatagacatccagatccaggaggtccagtgatccccaaacaaatatgatgcaaaaaggtcttttcaatggcacattataatcagaatgtctgaggtcaaatttaaagagcaacccataaaaacagcaagagaaaagcatctaatcacctataaaggaacccccatcagactaacagcagtaaaattacaggccaggagagaatggcacgatatgttcaaaatgctgaaagaaaaaaaaaaatctgccatccaaggatactatccatcaaaatcattcttcataaaatgaaggagaaataaagtccttcccagagaagcaaaagcagagggtattcatcgacacgagactggtctaataagaaatgctcaagggagtcctaaacctgaaagtgaaaggacaacatttacaatcatgaaaacgtacaaaagtagaaaactcaatggtaaagcaaacacacaaatgagaaagacaaaggactcaaatggtaccactacagatagccaccaaaccacaatggcaaacaataagagaagaaaaggacaaacaacatacaaaacaactagaaagcaattaaaaatctgacagagatgaaacctcagatatcaataataaccttgaatgtaaatagattaaattctccactttaaaaaatatagactggctgatggattaaaaaacatgatccaactatgtgctgcctataagaagtgcactttacctgtaaagatacatatagactgaaagtaaaggggtggaaaaagatattccatgcaaatggaatccaaaagtaagcagaagtagctatagttacatgaggtaaacttatatcagttaaatggactttaaggcaaaaataattttaaaaagacaaagaaggtcattgtataatgataaagggattaattcagcaagaagaaataacaattctaaatatatatgcatataacactggagcacccagattcaaaaagcaaatattactacctctaaagagagggacagacagagagagactcaaatacgataatggtggaggacttcaacactccactctcagtgttagatcatctagacagaaaatcaacaaaataaaaattggatttaaactggactttagatcagatggacctaatagacatttacagaagactttatctaacaacagcagaatgcacattcttctcatcagcatgtggaacattctgcaaggcagaccacaaaacaagtcagtgaatctttttaaaattaaatcatatcaaatatcttctcagaccacaatggaataaaactagaaatcaataacaagaagaactttggaaactatgccaatgcctgcaaattaaacaatatgctcctgactaaccaatgggtcaatgaagaagttaagagagaaatcaaaaaactcttgaaacaaatgaaaattgaaacacaacataccaaaacctgtggaatacagcaaaagcagtattaaaagggacatttatggcaataaacacctacatcaaaaagtagaaagatttcaaataattagtctaacaatacacctcaaggaactagaaaagaataatccaaacccaaaattagtagaaggaaagaaagaaagatcagagcagaactaaatgaaacagagattaaaatacaaagaatcaatgaaacaaaaagttggttccttaaaaagaaacaaaattgataaaccaattttgctaggctaaccaaaatagctaggctaaccaagaagaagagagaagacccaagtaaacaaaatcagaactgaaaaaggggacattacaattgatgccacagaaatacaaaagattatcagagactattatgaacaactatacactaacaaactggaaaacctagaggaaatggataaatttctagaaactacaacctaccaagattgaatcaggaagaaatagaaaatctggacagaccaataacgagtaatgagagtaaatcaataataaaaagtctcagccaggtgcggtggctcacgcctgtaatcccagcactttgggaggccgaggcaggtggatcatgaggtcaggagtttgagaccagcctggccaagatggtgaaaccccgtctctactaaaaatataaaaattagccaggcatggtggcacgcagctataatcccaactactcgggaggctgaggcaggggaatcgcttgaacccgagagggggagatttcagtgagccgagatcgcgccattgcactccagcccaggcaacaacagcgaaactctgtctctttttttttttttttgagatggacttttgctcttgttgcccgggctggaatgcagtgacgtgatctcagctcactacaatctccgccttccaggtttaggctattctcctgcctcaggctcccaagtaggtgggattacaggcacctgccaccacgcccagctaattttttgtatttttagtacagacggggtttcaccatgttggccaggctggtcttgaactcctgacctcaggtgatccacctgcctcagcctcccaaagtgctgggattacaggtgtaagccaccgcgcccggcagcaaaactctgtcttaaataataataataaaataataaaaagtctcccaacagagaaaagcccaggacaggatagattcactacagaattctaaaagacatataaaaaagaactaacagtaatcctccacaaactattccaaaaaattgaggagaaggaaattctccctaacttattctatgaggccagcactaccctgataccaaaatcagtaaaggacacaatacaaaaagaaaactacaggccaatatccctgatgaacaaagatacaaaatcctcaacaaaataatagcaaactgaattaaatagcacatcaaaaaaataatacaccacgatcaagtggaatttataccagggacacaaggattgtttaacacacacaagtcaataaatgtgatacatcaccaaaatgaagaacaaaaaccacacgatcatttcaatagacatagaaaaagcatttaataaaatgcaatatcccttcatggtaaaaactcaaactaggcatagaagaaacatacgtcaaaatactaacagccatattgacaaacccacagctaacatcatattgaacgaggaaaggctgaaagcatttcctctaagaactggaacaagacaaaggtggccacttttaccacttctattcaacatagtactggaagttctagtcagaaaaatcaggctacagaaagaaataaaaggcatctatattggaaaagagaaagccaaattgttcctctttgcagatgacatatcttacatttagaaacactgaaaaactttaccaaaacaacttttaaagctgatatattcagtaaagtctcaagatacaaaaatcaacacacaaaaatcagtagcatttctatacacaaataatgaaacaaccaaaaaagaaatcaagaaggtaattctatttgcaatagttaccaaaaaaagtaaaataaatttaaccaaggaggtgaaagatctctaaaagaaaaactacaaaacactgatgaaagaaactgaagagtacacaaacaaatggaaagacattccatgctcatggactgaaaaaatgaatatcattggccaggcgcggtggctcatgcctgtaatcccagcactttgggaggcgggtggatcacgaggtcaggagatcaagaccatcctggccaacacggtgaaaccctgtctctactataaaacacaaaaaattagccgggtgtggtggcaggcacctgtagtcccagctactcgggaggctgagggaggagaatggcgtgaacccaggaggcggagattgcagtgagccgagaccgcaccactgcattccagcctgggtgacagagtgagactctgtctcaaaaaaaaaaaaaaaaaagagtatcattaagatgaccatactgcctaaagcaatatacagattcaatgtaattgctatcaaaataccaatgccatttttcacagaaatagaaaaaacaatccgaaaatttgtatgaaaccaacaaggagcccaaatagccaaagcaatcctgagcaaaaagaataaagctggagatattacactatctgacttcaaaatatattacaaggctatggtaaccaaaacagcatggtattggtgtaaaaacagacacgtagaccaatggaacagaatagatacacagaaataaatccacatatttacagccagctgatttttgatgaaggcaccaagaacatggactggggaaaggatagtctctttaataaatggtgctgggtaataaaaaatgataaaggggatatcaccactgatctcacagaaatacaaactaccatcagagaatactataaacacctagctgggcgcagtggctcacgcctgtaatcccagcactttgggaggctgaggcaggcgaatcacaaggtcaggagttcgagaccagcctggccaacatggtgaaaccccgtctctactaaaaaaaaatacaaaaaattagctgggcgtagtggcgggcgcctgtaatctcagctactcgggaggctgaggcaggagaatagcttgaacctgggatgcagaggtttcagtgagctgagatcactccactgtactccagcctgggcaacagagcgagactctttctcaaaaaaaaaaaaagagagagagagagagagagtactataaacacctctacgcaaataaactagaaaatctagaagaaatggataaattcctggacacatacaccctcctaagactaaaccaggaagaagctgaawcccaataacaagttttgaaattgagcaataatggtagttgtccatagatgaggtctattttcttatttcctgagaacttattatgtttatatttaaaagcaataaaactatctttaaaagcactgtgatrtaatacaaaggtaatagcatccaatacccctgtggtaggcagaatttctcaaggacattcccattctaacccccagagcctgtgactcttgtcactttatgtggcaaaagtgactgccagatgtgattaaggatcctgagatggagagattactctggattacctgggtgggcccaaggtaatcacaagggtccctataagtaaaacagggatgagggagggccagagtcagtgtcatcagagtaatgtgggtccaagccaaggaacgcaggcagtctccaggtctccagacactggaaaatgcaaggaatggattcactctcagagcctccaaaaggagcacagccatgctgacaccttgagtttagccagtgagacccttgtcagccttttaacctccagaatgcaagcgaatatatgggtgttgctttaagcctgtatgtgatttgttatagcagccctaggagactgctggtccctttcttctatgtatgtgttaatctgttctgtcaacaagcctttgctgagctctactatatgccagccaccatcctgggcctggggaatagcatgaacattacatcccctgccccagagaaatggacacagcagttgtcatctatttaaaagaaaccaggtgcgaaagaaagaaggaaagaaagagaaagagagagagagagagagacagagagagaaagaaagaaagaaaaagaaagaaagaaaagaaaagaaaaagaaatccaccaaccaggtgcccaactttgttcttaacagatttgcagtatccatttggaattcattctatatcctgttctgctaaacctttaacgtcacattttcaacaatcacttattcttaaaagagtgaccctacttacaattacgtatattctaattgggcaatatgacagacaaaggccttaattatggcccacaattcacaccttagtatgttattatgcctttgctacaagttggcatttatgaacattacaccatggttctgttcttattgttcttgcagggcatttgtgtgaggtaaggtgacaaacaatggcagtccaaccaccagagccttttatttacctgaggaaaacatcttttggtcactggaacccaaaccatagggaggggcttccagtagggatcaactctgtccacaaggaacttaatttgctattcttgtaaattattgcactagtcatgtaaaggtaggatgatcacactcctattttcagatgagaagactaaagcacaaagcaatcaaaggcagcaactcaaggaacaagaattcatttgccatctgttccactttccatgtggatcttgtagcaatggctccaagaggagcagccacataaacttccaggctggctcatgattggggcatgagcagcctttcttttggtgtttttttgtttgtttgtttgcttgtttgtttgtatgtatgattctacttgctgcagtgaaatctgcctgtatcactgtactgggttgaatagtgtcctcccaaattcatacccaaccaaaatctatgaatgtgatcttatttggatgaatgatctttgcagatatagtcaagttaagctgaggttataatggataagtgggccctaatccaacaagaggtgttcttataagaagacacaaacttggaaacagactcaggagagaattccatgtgaagatggagacacagagattagagtgatgcagctgcaagctgagggatgccagggactgatggccaccaccagcagcagggagagacaagattcttctacttagagccttcagggagagaatggccctcccaacaccttgatctcagacttctagcctccagagttgggagacaatacatttctgttgttttcagccacccagtttgtgatactttgttacagcagccctaggaaagctgtacaagcacacattacctaagtattctagaataatcaagagtaaggagtagagtaggtaagttaatctgacaggcttcctggaagctaggagcttgagagaaggttcttaaaggaggaagaacacagcttgggaaggaggatggcaggtaacaaatgacatcttcatctgaccaaactaaagattccctcccaggccagaagataacaaggcatccacacgtgcacaaagcaccgtgcatgacactgcagatatgcaacctttatcacagctgcttagcacgagatacttttcacatctaccatgaaggcaaaaattcaaaagatgaatggatttgggaaggatgtggaaatatggaagcccatgggccctattggtgggagtatgaaccagcagtcatcctagaagccacctggcagcacttggggtgtgccccatgatgtgatattctgctcctgggcacatggagaaggatgcttgctgctgcactgactgtggaacagggaactggagacactttgggtgtcacaccctaggacaattggaagcaacaaagcagatatagcaacacgaagagatcttgaaaacacggttctgagtgcagacagtaggaaacagatcagcacaatactattcataaaaagcacacatgcactctacatatttcacaaggatatgtgcatatttaatgacatataaagaacaggtgcttcacaaccatgtgaatgtacttaataccatggaattgtagacttaaaaacttaagatagcaaatttacctgcctgggcaacatgaaaccccatccctgtaaaaaatataaaaattagctggatgtggtggtgcacacctgtggtcccagctactggaaaagcagaggcaggagaatcgcttgagcccaggaggcagaggctgcatttggtcaagatcatgctactgtacttccagcctgggagacagagcgagaccctgtctcaaaaaaaaaaaaaaaattaaattttacatatgtgtatttcaccacaggagaaaattgggaggaaaaaaagagtggtgcttaatgaggagagggggggaaagtatagatggaggataaaggggaatataatgtaatacaagccaaagtaaggccaggcatggtggtacatgcctataatcgtaacactttgggaggcccaggagggaggatctcttgaggccaagagtttgagaccggcctgggcaacatagtgagattccatctctataaaaatttaaaaattagccaggcatggcagggtgggggtatgcctgtaattctagctactcgagaggctcagacaggaggactgcttgagcccaggagttcaaggctgcagtgagctatgactgattgactgacaaattagatagactacacagatggataaatagatagataaataaataatgtttaaaataagagaggggtcttgcacaccttccatggtgacctgagatgtgagatgaactccactttctgcatcagagagccaagagggttagactaggatgccaaacagggcctggcccatcacagtgactgcacaggaggccttcaggaagtggtgactctccccatccccagcaacaacacacttttccatggacctacttggaaatggaatcattgagtcaccttaaactccatcagatgcaatagcaacaggaaaaagaagatgaaaactaaactgaagtttgggtagtggtatttttaaaaacctaatttagggggccaggtgtggtggctcccacctgtcatcccaacactttgggaggccgagatgggaggattgcttgagcccagaagttcgagaccagcctggccaacgtagtgaaaacccatctctacaataaatacaaaaattggctgggcgtggtgatgcactcctgtagtccgtgctactctggaggctgaagtgggagaatcgcttaagcccaggggtggtggaggctgtggtgagccgtgattgtgccactgcactccagcctgggcaacagagtgagaccctgtctcaaaaaacaaaacaaaataaaaaaccaattttaggaatccttcaactatcagcctgcagagaacccaaagacatggggaactgtgctcttggaattcttgaccattcagcccagcaattctcagatgcaaaatgcccaggtaggggatgggatcctggaacaacaacaaaaaaaaacacaccaggaaaaaactaaggaattctgaataaaacatggactttaataacagtgtatcaatactgatttattgattgtgataaatgtactatactaatttgcaatgtcaataataagagagggataaagaggtcagataatgggtacaaaaacgctgggtgcagtggctcatgcctgtaatctcaatactttgggaggccaaggcagaaggattgcttgaggacaggagttcaagaacagcctaagcaaaataacaagaccctgtctctattaaaaaaaaaaattaaactttaaaatgagtgcaaaaatatagttagaaagattaagttctactattatataacacagtagagtgactctagttaacaagaatttattgtatatttcaaaatagctagatgagaagaattataatgtgctcaacacaaagaaatgataaatgtatgaggtggtggctattctaattaccttgatttgatcattacacatgatatacatgtatcagagtatcacaggtacccctacaatatgtacaatgatacatcaatttttatacaggtttttgaacaggggaaactgggtgtgtagcacatgagaagactctgctattttcacaatttttctataaatccaaaatgttctaaaatttaaaaatcaaaagaaaaaaaaaacaggtagctcctgggacctatttcatcctactcatcagcctgttttttttgttttctagtttttccaaatgtgcaaaaactttcctaattactgtatgtttactgaagacattccttttttacttttattttttaattgacaaataatagttgtacatggctggaggtggtggctcacacctgtaattccagcactttgggaggatggggcaggcagatcactcgagtccaggagttcaagactagcttgggctacgtggcaaaaccctgtctgtaccaaaaatacaaaaattagccaggtgtggggggacacgcctgtagtttcagctacttgggaggctgaggcaggaggatcacttgagcttgggaagcaaaggttgtagtgagctgagatctcccctactgcgctccagcttgggcaacagactgagaccttgtctcaaaataattaactgtagtacatattcatgaggcatatagtgatgtactgatacatataataacataatgtgggccaggtgcggtggctcacgcctgtaatcccagcactttgggaggccaaggagggcggatcacctgaggtcaggagttcgagaccagcctggccaacatggtgaaaccctgtctctaataaaactacatggctgggcacggtggctcacgcctttaatcccagcactttgggaggccgagacggggggatcacaaggtcaggagatcaagaccatcctggctaacacggtgaaaccccgtctctactaaaaatacaaaaaactagctgggcgtggtggcatgtgcctataatcccagctactcgggaggctgaggcaggagaatcgcttgaacccgggaggtggaggttgtagtgagccgagatcgtgccactgcactccagcctgggcgacagagtgagactctgtctcaaaaaaaaaaaaaaaaaaaaaaaaaaaaaacctaccaaaattagctgggcgtggtagcacatgcctgtaatcccagctacttgggaggctgaggcaggaaaacagcttgagccagggaggcggagcttgcagtcagcagagattgtgccattgcactccagcctaggcgacagagtgagactccatctcaaaaataataataataataataataataataataataataatatattgtatggtgcccacattagtgtaattagcgtatccatcatttcaaacatttatcatttcttcatgttggtaacattcaatatcctccttctggctatttaaaaccatatattcttggctgggtacagtggctcacgcctataatcccaacagtttgagaggccaaggcgggcagatcacttgagatcaggagctcgagaccagcctggccaacatggtgaaaccccacctctactaaaactacaaaaattagctgggcatggtggcacatgcctgtaatcccagctactcgggaggttgaagcagaagaatcgcttagcctgggaggcagaggttgcagtgagccaagatctctgtactccagcctgggtgacacagtgagactcttgtcacacacatacacaagaaacatatattcttgttaactgtagtcatcctaatagtatagaacactagacttattcttcctatctagctgtaattttgtatcctttacaaaatctcttcctaactgcccccttccccctagccttcccagcctctagtatcctcgaatccactttttacttctatgagattaactttatttagcttccatatatgagtgagaacatgtggtgtttcactttctgttgctatcagcctgggttttaagaggacagaggctcagggatgtaggtggtttcctgtgaagactccaatcctttgaatagaatccatggaagcatacttgtgatggcctcgtggcagaagatgattaaaactgagttacacacatgaggatcaataaacaaagatgactatgatgctggatcagatttctgtgatgttctcttttgcaatctgccaaattctctgctcttcaatagtttctctcatggtcaaggcaagtgaatgagactttcctggataataagtttagtattttctgaaaatgagcttgtcccgatgatggtccctgtgaaatgcctctccttgtgagtctgttctctcatcactagtaggaatgtctaggttctgtatccagcctaagaacctccaaaggaacctcctggaaatctcaccttgtaagttaacttctcagcatctaactcccatgtgtgcagggagacctgtacaaaccattgccatctgaggaaatggcaccactgctcctcaagccagaaacttgggcattacccatgacaactccttcccctcaccacccacatccgacccatcaatgaggccagtcaattcgacctaacaaatccctcttgcatccagtcatttccttcaggcccactgccatcaccctggtccctccactaagcactttggacataccttactctagttcatttccactttgtttctatctcatatttgtatgtaattctaatgttttcggtatgtgtgtgattgtgtcttctccagatttcttctggatcttcccaaggtgctctactgatctgacagaaaacacccttcagagtgccctgagtggctgccagtccacagctagccagtcaggagaggacggcatgtgcttgtgtcactgttgccagccaaggcgtctgctcaggccctctctttgccttcctcaataaagagctattttacaacctttgtactaaagagagaagaaaataatcagactccctctttgagaagtgttctttgaaaatgactatccatataagcaagtagttttaaaaaaaaactctttcaaacatgtttgtatctttggccttttggaggaagatggggaggggagactggggagggaagactggggagggaatagctgactggcaaggttgttctcatccccactgctggtgaggcatttgatttcataagtattaatcagaatcactcttgattatagcaaaaacaacctttgctataattttaatgcaattaactagaatatatggtaattctgagcaatcttgctcttgagattaaagaacagcctgccaggaaacatacgaataaagctttaagatcaaaatttgcataattaggtttcttccctgctctgcccaccccaaccccaccctctctggctatgctaaattctgcttaaaggagatattaaaagtcagcaagcctactgcctgggcttccctcccaggctggcatgttcctctgtgaaagcatgtttatgttccgtgcaacacagctctgatggactaacagacagccaaagacaggcggacgaattacagagtgcacagattttaagccatacttccagaggctggagtaaacaagtcacaatgccttcatggtactaaactgccaggaagcagtccgtacaaaaatgagccgggcattgtggcatgtgcctgtaatcccagcttctcaggaggctgaagcagaagaattgcttagccagtgaggcagaggttgcaaatttgtcatcctgctctgtggaggtatcatactaatcaatgcatcaaaccccagaactacaggtttcatattcaatgttttaatgcctggtcacaaaggatgtcctcatcacatattcctccctcctcccaggctcaggaactgctgccaccagaaaggctccacctcctacacccctcctttaacaggggctgggacagccagagccactgtctcaccccactgcactgcacccccccatcctagcagccccagaatccctaactctcttgggagagtccgccttgctccaggagggaagaaaaggcagcaagcagttattttcctgtataagggacaagcagaactgtgcacatacactcctgagaagagggggaatgcgaggagtgacgggagcactcgcacccatctggcacgctggctgagggctgagcatctacaggaactagcgaaacaatccctatgcctcccacacacaaaaggatttttaacatttaaaattgtgggaaatgtcgacagtcccatttccttttaaataacttattcttggatgtgcagtaaggcttgggccaaaaggttaatattcctttatcagaaggcttagaagacacagaaatcatttttgctatttgctgctttgaaaatgcagaaaggaggaaaatgacaagacaggggaacagttggtccttttttttaccttcaacctcaagctgtaaccccacaccagagattactcacataactaaaaacaggctctgacctcttgctcaagcactcatatttatatcctctatctctcaaaacccctggaaaatatcagaaaagcagcctacaagcaaatacattcatgaaagcactagaaacacgaggcaggtagggagggcatccacagattcagactgaaggttgataagattggaatgacagaaaaatcaaagctggaggagccgaacaccagcaaatattggatatggtgcagaggaactggaactcatatactgctggtaggagtagaaaatggtacaaccactttggaaaactctaactgtttcttagaaaaagttaaacatcttcacaccccatgagtcagcaatctcactcctaggttccatccaagagaaatgaaaacatatccccaaaaagccttggacacaaatattcgcagcagcttgatttgtaatagctctaaagtgaaaataacccaagtgtccatcaataggagaatagataaatagaatagatgcacataatggaaaactgttcagcagtgaaaaggaatgctgacacatacagtacggctgaatcttgaaaacattatgctgcatgaaagagcyagaaacaaaaaaggaaataatctatagtttcaattctatgaaattctagaagagataaaattaacctatggtataaaaatcagatcaggctgggcacaacggctcacctgtcatcccagcacttcaggaggctgagataagagaatcacttgagcccaggagttcaagacaagcctgggcaatgtagggagaccctgtctctacaaaaaagttaaaaatcagccagtcatggtggtacatgcctatggtcccagctacttgggagtctgaggtggaaggattgctggagcccgggaggtcaaggctgcagtgagctgtgattgtgccactgtactctagcctgggtgacagagtgagaccctgtctcaaacaaaaacaaacaaaaaaacactcataaacagatcagtggttgctgggggcaaggtggggaagtgctatgagggaacattctgggggtgacagaaaatgttctgtcttgatatgcactcattgaaactgactgaacttaaagatcttaatatgttagcattttactgtatgtgaattatacctcattaaaaaaatgtttaggaaacataccagaactgagcaacaaaattttaaaacactaccaaagatgactactgaagatcttaatatcagaaagttttcctgtgtgtaaattatacctcaatatgttaaaaaaaaaaaaaaacttaagaactatactagatacgagtggaaaaatatttaaaacactactgaaggctactctgggcacactgcctataaggcagccctgctctgcaaggagcagttaaaaaaaaaaaaatcccccactactgaagaacacaaaagaagacttgagcaaatgaaaagacacactaggttgaggataaggggacccaatatcaaaaagacatcaattctccctctgttaatttctaaataggacagtgtttaaaatgcaaataggaacaaggaaaggtatgggaaggagcaaagctcagcaaacagtagaggatgggccagtggcctgagcaggcctggcaccaagaagcagtccctgttcagttggccccaacctggtcactcaccacctacagctccagcatgcagccttccccctccacctgtgtccactcccatcctcccagccagctctccattgaggaatatcaccgagcattaccagacactgggaaaaaaccagcagcctctactcatttatccaacagctggttaccgacgagcatgaacaggtgcccagctctcatttcagccctgagaaacatcctcgaatgaggtggctgcagctgacgacctcacagagcagagttctagtgggagaggtacatccatgtagtggaatataatccagccacaaaaaggaacaaagacgcattgatccatgctacaacctggataagccttgaaaacatgatgctaagtgaaacgagtcagttgcaaaaagccacatacggtatgagtccacttacamgaaatgtccagaataggcaaatccatacagactagaagtaaattcgtggttgcccagggttgtgaggtgggacaaatatggagtgactgcttaatagatacagggtctctttttgcagtgatgaaagtgtttcagagctggtgagagacgcacagccttgtgaacgcactaaatgccattgaattgcacactttaaaatggtcaattgtatgggatgtgaattatatctcaatttttttaaagccataaaaaatgaaaagtccatttcaggatcctacattcacagggaaggtagcataaagatgattctagtgagacactgcagggaatcgggttggagtctaccatctaaaactgaggctggtctgcataacaggaagggagaagaggaatgagaaggagccaagcacccagagcatgagatggggaagagatgagtcacatgcctggctcactataaatacacctggcctccaaccagggcctgagcctgactacccaaacatgaaacaggatgtaccttccagggaccagggtgccctgcttgaacacaagttctgaacctgctgctgtgattcaagtttctgcaaattcaatcctatttccaatgacctaaggagctttcatttcaaaggaaatcctgcagtgaatgcttttcatagggttatagaaccaggaagttagcatgggaccatttagtcaccataaaccaaagacctatggagtaccaggtactagaggagacagaaagattagaaaaccagagttcttggcctcggtctagtggcagagacatttaaacaaatggggctatgagagcctcacacgtgaggtgctacctgatgccagcagcagccactagctctgcctgcaggcttttagggagtaggtagcattggagctaggctcagagacgtgagcagccattctctgggagcagagggagatggccttcaggcagaggaaacctcctgagtcaggtcttagtggtttagtagcccatcattctcagaataggaagatgctagtgagaaaaaaggaattgggagagtgggaacagagtgtgtggcaaggaacagccacaggaaaagaggaaggcaggtgagaaaggccagtgggaagagttcagaggggctgcaggagtaagagggttctgagatgacctacattgtcccctagctacaggctagaaggatggccccatccaccaaatggggggcgggggcgggggaagtatcgcaggagagggagccttcaggagaaatgccacacccaggtttgcacctggcaggcttgaggcctcattcttctgactcctctactggctttgatgtcactgggcaaccttccttgaaacactttgtcctaaacctctgcaacattttcctcctctgaatcttgtcctatctcactcatcactcctacttggtggccttcactgatctggctctgtctagctcttcaatttcggtgttccccagaaagacagaaatctttcatgttcccccattctcccagactgattccacctgttcctatgattttagtttttattttagctcccctccacaaactaggtccccacactcagagtggctcccaagctctgaacccaggccttcctgccaggcatctctctctatctgatcaattacattgagatctgtttaaatacttcagtgtttactgccacctctttcctcccttggcctccccttttctgagtacaaccctcttgcttggctgttttatactattaagtagatgtctccaggagggttgctgagtgacatgtaattcctaaagcattatattatttaattgaaatttttattgagataattacagattcacagacaggtataagaaataatacaaagagatcccttgtacacttagctcagtttactttacacaaatatcacactatgcaaaattatagtgcactatcacaatcaggatgctgacattgatataaccacacatcgtattcagaatttccccagttttacttgcactcatttgtgcgtgttcattaagttctatacaacttttcacatgagtgagtcatgtaaccaccaccatagtcaagataaagaacaagtttaatccccataaggatcccctgtactgcccttttataagagtacctacctctctcccacctcctctttcccccacacctgtccctaacccctgaaaaccactactctgttctccatctctataatagtgttactccaagaatgtcacattagaatcatgcagtatgtgtttgatatggtttggctgtgtccccacccaaatctcatcttgaattcccatgtgatgtgggagggacctggtgggaggtaactgaatcattggggcaggtcttttctgtgctgttctcatgatggtgagtaagtctcacaagatctgacagttttatgagaaagagtttccctgcacaagctctctctttgcctgccaccatccatgtaagatgtgacttgctcctccttgccttctgccctgatgtgaggcctctccagccacgtggaattgtaagtccattaaacctctttcttttgtaaattgcccagtctcaggtatgtctttatcagcagcatgaaaacagactaatacagaattcttctaagactgcctttgttcatgtcgcatgatgcatttgagatccatccaggttgttgtggtgtcaatagtttgttcttttttattactgagttgtattccatggtatgagacatgtgggctgattccagtgtttggcaattaggaataaagctgttatgaacatgtgtgtacaggaagccttacatttttcagaatgcttttgtgttgcctctccatgagaatgacaacttagatcacacacttttgccctctaagttagtagaggcattaccccaatttcttctggcatcaaatattgtcacgaagaagggtgaagtgaacctgagttcttttcttctaataggtgatttgctccttctgcctagtttcttttaaaaatgttcaccaaaagagatcacctcactaacttaatcaaggaaaaaaagggctgacataaattaggaatgagaaaatagtaactactaatacaaaacaaatcaaaataatggtaagacaaagctttatacagctccattctcatgaatgggaaaaatctagctttatttattgattacctctttcatttatttgacaaatatctaccaacacctagcatgtgccttatcctgttctaggtcctgggaatataacagtgaacaaaacagattttttaaatcctgcctttatgaaacttatattcaactagatgaaatggttatcatcatagaaatacacacattttcaaaatttagtcaggaagaaagacaaaaatctaaacagagaaaatgccacggggaagaacaggaaagttgtctttgaattacctctttaaaagaatcaacctaggctcagtccacaaaagaattatgtcagtcctcaaaagacagataatttctctcctgttccaattttccagagcagagaaataagaaaaactgcccatttcttttagtaacagctggaaaaggtagtacagaaaaactatactacagtctaatctcacttttaaatactgatataaaaatcatatctaggtcaggcatggtggctcatgcctatattcccagtactttgggaggccaatgcaggaggactgcttgagcccaagtgatcgaaaccagcatggacaacatagcgagaccctgtctcttaataaaaaaaaaaaaaaaagaaagaaagaaacaaaaaagtcataaatatacagaaaaactattgatagaatttactacattaacaggttaaatagaagcagagagaccttgggagacaccaaaggaccacttgataaaatttggcatccaattctgattttttaaaaagacaaatccttagtaaaaataggagtcaggatttatccttaatgtgataaaaatacatatcacaaactaaagtcaagaacaagcaaagagactattagcaccactattatttaatagccagtagaatcagataagagaaccagataagtgattataaagggaaaaatattggaagaggaaagtcatcactatttgcagataatatggttatatacctggaaatgccaacagaatcaagagcaaaactaggaaaggccaggcatggtggctcatacctgtaagcccagcactttgaaagactgaggcaggaggattgcttgaggccaggagtttaagaccagcttgggcataacaagagcccgtttctacataaaatttaaaaattagccaggtgtggtggcatgtgcctgtagtcccagctactcaggaggctacggcagaagaactgcttgaggccaggagtttgaggctgcagtgagctgtgatcgcaccactgcattccagcctgggcaacagtgagtccacgtctcaaaaaaagaaaacaacactaaaaatacacaaaacaataaaactaggagaaataaaaataaaaagattgttaggtaaagtggctaacgaagaatgctaggcactccaggctgggtaacagagtaagaccttatctcaaacacatacacacacacacacacacacacacacacacacacacacacacaccagtagctttctcagacaccaacaatcctcacttagagaacatagtagggggccaggtgcagtggctcacgcttgtaatcccagcactttgggaggctgaggcaggcagatcacctgaggtcaagagttcaagaccagcctggccaacatggtgaaaccctgtctctactaaaaatacaaaaattagctgggcatggtggcacatgcctgtaatcccagctactcaggaggctgagacaggataatcacttgaacccgggaggcggaggctgcagtgagccaagatcataccactgcactccagcctgggcaacaagggcaaaactctgtctaaaaaaaaaaaaagggaaagaaaacaccatgggggaaaaatgtcccattcacaacaggaatatatactacagagcacttgagaataagtctgacaagcaatgtgaaaaataaacttgaaaaaagtcataaaacacaaagacaacagaactaaatatagagagaccttgaatttgaataggaaaacttaatactactaaaaaaaaaaaagaaggaaagaaaagaaaaaaaaaaggaaaaaaatgttgattttcctaagactctcacctagtcaatgcaagtgcaatcggaatcccaacggactttttttaaaaacttgactctaaagtatatgtgaataaaatgcatgggaagataaatttcaaaacaagagtaattttttaaaggcctgcccctatcagattctaaaatttctgcaatttattaatcaaagcaacatttaaatacattttttaaattgcagtacacatatgacccagctcatcattaactgtttacattcaatgcttgaccccaatatcaattcaaaggtcattggggtccattatttggatatcactaatgtagacatttcctgctaccaactctaaataagcagttctatgccacattgctaccattgcctgctctctatcaagctaatttaaggactttcttatatacattctcccaaataacaactctacagcaaggagtgaggtcaccccttccttccaattccactcatcagagaggtcactggtatcaatgatttgggacctgctacttcaataatcaacctaaaaaatacaggtaccctggtggccgtagagaaaccttccagtagacaagaggggaagatgacagaagtcacactccagtttgactgagaattgaaggcagatgaggtagaaaggtagggagtggagacctaaaggagaaaggagataagatactagcttattaaaagggaggcagaggaaagagagatgttgaaggatgaaggaaaactttagctttttaggtgagtggaaagaattaagaaaagggagaaggtggcaattgaaaacatagagcagaagtgttgaatttgaccaataaggtccctgctctcaagtaggaagatgcatttataaaggaatgatataccatgaagtacctggcaacagataaatctaacaagaaacatgaaggactcaccgtgattcagggtatggccagggcctcctggttccaggtttagtgccctttgccttaaacagaattttactccagaacacatgatctaatgagcacataaaaggatgcccaagccaggtgtggtggctcacacttgtaatcccagcactttgggggccaaggcagaaggatcaattgagcctaggagttcaagaccagcctgggcaacatggcgaaaccctgtctctacaaaaactaaaaaaaaaaaaaaaaaaaaaaaaaaaagctcggcatggtggtacacacctgtagccccagctaatcaggaggctaaggtgggaagattggttgagcctgggaggcagaggctgcagtgagccttgttggtgccactgcactccagcctgggtgacagagcaacaccctgtctccaaaaaaaaaaaaaaaaaaaaaaagacacccaacttcattagtcactagggaaatgcaaatcaaacccaaacccatcatgagttaccacttcacacttaccaggatgactaaaataaaaatgaaacagaaaataacaagtgttggcaaggacatagagaaactggaaccttcctacactgctggtgggattgtaaaatgacacagcaactttgtaaaatagtctgacagttccttacaaagttaaacatagcattaccatatgacttcacaactccacccaagagaattaaaaacataagtccacacaaacacctgtacataactgttcacagcagcaccattcatagcagctgcaaagcagaaacaacctgaatgttcatcagctggggaacagataaacaccatgtggtctacccataaaatggaatactatttgaccataaaaaggaatgaatatctgatccatgctacaacgtggatggaccttgacaatatcacgctaagtaaaagaagccagacacaaaaggccagatattatatcattccatttatatgaatgcccagaatagggaaatccatagaggctgaaagcagattagtagctgctgagggccagggggaaggtgggaaatgggaggggctggtaaggggtttctttttagggtaataaaatgttctaaaattagataatgagagtgatggttgcacagttttgaatacactagaaaccaccgagctgtgtattttaacaggtaaatcgtatggtgtgtgaaagaaaatggaactgttttaacatgtgggaggagaaaggaaattaatcctctacacaaaaaagccttctgtagtttagaggcagtggatataaaggacgcatctgtgacttggggcaagtctctttgtgactttctaccactattttctcttctaaaaagaagattggggccttccaagaaacccaccctcactctctagttacctctctgaatttcctgtctcctaggttctgtcatggttgttcttagaatcttgtcagtacttcaatgtacttcaatgcttgagggctgcagtcacctggctgttgacctgcttcctgaggctgtcctctcctgacttccagtacccttcctcctagcgagagggagctagagcgagtgagagggagctgcctggctgtggctgggttctctcttcaccccaagtcatcctgcccttggtcccttgacctccttcctcctctccagtgtccttcatgctctcatttcacttcatcccacactggacaagaaactgtcccgccttggaaatcccactctgtggccttggctctatcttcccactcgtggcccaacctataccccagcaggcctgcagagcctgccaggccaccctcaggaatcctttctggtcctcctcaaaccttcaatgggctctacctcctttgccacctggcacagtcccagctaggtcatcgcagagattgtagccagagccagcaatacctgtcacaatgctctgcccctgccctgccaatcctcaactttgaaaagagaacccactctcccaaccccactggaccaggagctccttgaaacacagtcagtgcccgcatcaccattggtccagcaccaagcaagatgcctggtgcatacacagcactcaattaacagttcttggagggaactgaccaggaatggtgatctcgccaccagccagccttgctgtattctggggtggtgccacattgcaggagaaagtcttgtatcactgtcctgattagcaccggcacaggtgccagctcagggtgtttgagtcaagccaggcccttggggtaccttggcaatccacatttccttaattggctccctttgtacctgacagtactctttccaattttttttttttttttttttgagacggcgtctcgctctgttgcccaggctggagtgcaatggcatgatctcagctcactgcaacctccgcctcccgggttcaagcgattctcctgcctcagcctcctgagtagctgggactacaggcgcccgccaacacgcccagctaatttttatacttttaatagagacggggtttcaccatgttggccaggatggtctcgatctcttgaccttgtgatccgcccgcctcggtctcccaaagtgctgggattacaggcgtgagccaccgcgcccggactactctttccaatcttaactctctacctggctcctcatatactcagcacaagaccttgtttcctcctccagggaaaagaccaaggccattaggcaggatggctccacgtgcccttcagccatcccatgtgtacgtgtaataagagtgacaagagttaacattaactgagcaccaaggtttagactctctctctcctgcctctccctcccaccctgtaactagaaataatgttcatccaaatattatgtacaaagatatttaatgaaatgtcatttataacagcaaagacctagagtcaacctaaatattcatcaaaaattatattcaggctggacgcagtggctcacgcctgtaatcctagcactttgggaggccaagggaggctgatcacttgaggtcaggagttcgagaccagcctggccaacatggtgaaaccccatctctactaaaaatactaaaaattagccagaaatcacttgaacccgggaggcggaagttgcagtcagccaagactatggcactgcactccagactgggcaacaagagccagactccacctcaaaaaataaaaaaaaattatattcaaaacatgttttaactataatacataagatactctcacaatataatttgtgcttctagtaatggcaaaatagattatttggaccaatcttcccattacaaacaactaaaatggttgattctaaaatatcattttaaaacatttagaagtgttgaagaactgacaagttggtaaaaaaaacaaccatgagaggccgggcatggtggctcatgcctgtaatcctagcactttgggaggctgaggtgggcggatcacctgaggtcaggagttcgagaccagcctgaccaacatggcgaaacccgtccctactaaaaatacaaaattagctgggcgtggtggtgcatgcctgtaatcccagctactcgggaggctgaggcaggaaaatcacttgaagccgggagaatcgcttgaagccgggaggcggaggttgcagtgaaccaagatcacgccattgcactccagcctgggcaacaagagcaaaactccatctcaaaaacaaaaacaaaaacaaaacaaacaaacaaaaaaaaccatgacaacccataaaagacagtggaaaatccagggaggtaggagtccatgcacatgcagccacaggctctgaggacatctgccaatctggacaaattttgactttggttttgacaatcttccaaggcaggcaaagggggctgaagagcaggcccatgaccattaaaggaatgtaacagaaaattcttctcatattaagctgggaccccaacgtgttacacccttggggcaagggcgactcagaaacaaatatgcccctcccaaattccacccccagaggattgcaagaaaggctgccttgatgatggcaaaacaaagcgaaaatggtagaaactttaaggtagtcccagactaatcacacaaggcacctgacaaaaaccaaacataaattcttctctggaagaaggcaaatttaccctagacttcaaagattccccagatatatatttcagttacaataagcagtacacagccaaaaaaataaataaataagtaaaccaccaagcacacgaggaaataaagaatcatgagtgagtattagtagaaaaagaataaacaggaaaatgagccaaagacaaccaggcaattcataaaagaggaaaccaaactggaagataaacataggaaaagatgttcaacctcattagtaaccagaaagatgcaaacgaaaccattacaatattataaaaagccccagtaggctaaatatcatagtcaagtctgacaataccaagcgctggtgaggctggcacaacaacttttttacactgctggtaggaatataaattggtacaaccattttggaagacagtttagtaccacctcataaaactcaagttccaaatactgcataactcaggaaattcacttctaggtataaccctagagaagcaattttcaaactttttggcctgaaagattttaaatatactcaaaattattgaggacctcaaagagcttttatttgtatcagtgactgctattgatatttatcatattagaaattaaaacaggcatttttaaaccatatgacacaagcacacactccattagccatcagggtgatgatactgcatgtcacatagcctctaaaaaacgccactgcatactcgtgagaggagaatgggaaaggcagttaacatcctaggattaatatataagtagttgggctgggcacaatgtctgacacctgtaatccctgcagtttgggaagctgaggtgggtggattgcttgagcttggggttcaagactagcctgggtaacatggtgtaaccccatctctaccaaaaatacaaaaaattagccaggcatgctggcatgcacctgtggtcccagtgactggggaggctgaggggggaggatcaatcacttgagcccgggaagtggaggttgcagtgagctgagaatgcaccactgcactccagcctgggcagcagagtgagatcccatctcaatcaaccaattaatcaatcaataaatgtaggtggaccttgtagaccccctgaagaagtctcataggcccccacaagggtcctcagagcacagtgtgagaacctctgccctagagaaacttttgcacatctgcctaagaatgctcctggcagcactacttaaaatggccccaaactggaaattatccaaatgttcattaataagagaatgaattaaaaaacaacttgtgatatagtcaaacagtggaataacatatagcaacgaaaacaaatgaactacagtgacacacaacagatcgacaataatgttgggggaaagacaaaacagattacacatggtgtgatcccatttctacaaggttagaagacaggtaaaacaaaactatatgatttatggctgcatacataggtggcagagtataaagtaaagggagaaaatgaccgcacaaaagtcggtagtgtctacctctacagggagggagggggctgtgactgggaggggcacacaggggtctgtacaagtgttgtcaacattctatttctcgacctggtcggtggtgacacaggttttcattttatacatttttgttaaactttacatatatggctgagacaggaatattgcttgaggccaggaattcagacaagcctgggaaacacagtgagactccacttctacaaaaaaacaacaacaacaaaaaaacaacaacaacaacaacaaaaactttacatataggcttttcatgtttttctatatctgttatatttcacaatacaggtgaaaactatatacagtttgatgccaataatrtgaaatacatatttcagcatggaaaaaattattggcatactgtattctaacatgctaacagtggttatccctaggtaacgaggtttgtgtcttctctacacttctccacatttcccacgtttactacgaagagtatgtattactcttgtaattgtgtacacatttggtatgtcagactttattacaatttttagtctaccggagggtatataatgttatcttattatagtttaatttgcatctctccgattactaatgaggctgatcatctttttatatgtttattgtgcaatttgatttctacctatatgaattgcctggtcaaatttttggctcattttgctgtttattctttttcactggttcgcagaaaatcattaaatgcattaaaaaagacaaggtcaccatctaaaatggaaactaataagggtgaacataaaagagatgagacgagccatctgtggaaatctatgcagaaaataactaactacacagattggtgatgcatatggtctcactagggtgacctgaaagctcatcaaggagtctaaggtatgttcctagagttgcctgagcttagaacttgccctgtagagaagaaaaaaatagaactgtctgagctgataccaatgcacaagactggctgagacctgacttattccaacatgtctgtcctgggcaatgtgacgatggcagaaaactttagtgactcgtgaacaatactgaaaacagagcgatatttcaaagaatatatagtcatgtggccacatagcaatatatttcagccaaatgatgggctgcatatacgatggtggtaccataagattgtaactgggaccctagttattcttatcacttagtgacatggtagccatcataacatggtagcacaacacattaccttttctatgtttagatgcatgaatgcttgcctttgtattacaactgcctacagtattcagtacagtcacattgctgtacaggtttgtagcctaggggcatgtagtaggctataccatctatgcttacgtaagtacactccatgacgttcacacaatgagatcacatgacatttctcagaacatctctccattgttaagcaaggcatggctgtatccgtctttacagtcgtggttctcaacaaggggtgattcgccaccccccaccccctaggggacactcggcaatgtctggagttatttttggttgacaagactagggaggggtgtactacccgcatctagtgggcagaagccaaggatgctgctaaacatcctccaacacacaggacacccacccgccttatcccttgcagaacaattatctggtccaaaggtcagcagtgccatggttgaaaaactctgctcaatagtctatctaggagagtgctcaggccaagcaccatggctcatgcttgtaatcccaacactttgagaggctgaggcgggaggatcacttgagcccaggagtttgagattctgtctctacaaataaattaaaaaattagttgggtatggtatcacatgtttgtggtcccagctatgtgggaggctgacgtgggaagatcccctgagcccagggcttgaggcagcattgagccatgatggtgccaccgcactctaacttaggtgacagagtgagactctgtcaaaaaaaaaaaaaaacaatgaaggccaggtgtggtggctcacgcctgtgatcccaccactttgggaggccaaggtgggtggatcaactgaggtcaggagttggagatcagcctggccaatatggtgaaaccgtgtctctactattaatacaaaaattagccaggcatggtggcgcatgcctgtaatcgcagctactcaggaggctgaggcaggagaattgcttgagcccgggaggcggaggttgcagcgagctgagagtgcgccactgcacttcagcctgggtgacaagagcaaaactccrtctccagaaataaataaataaataaataaataaataaataaataaaataaaaaaataaagctcaacccccagggactcttcttccaggtgaagaagggcaaatccccaggctgccccaccttgagggttaatccaaactccttgagacctacactcagcaagctcctccaaggctacacagtaggcactgtgctgtcagaaggaggcctccctcacggagaaagcctgtacaaataagatcacttggagcccacagaacatcagtgctgaagggctctcagaatcagctgatccatcccccgctcagagagagagaacccgaccgctgaggacagcagcatggcgtcacaggaaggaacagaaaatgaagaggcacacacggagctaggctactaactggacactaacaaatatacctcatggtgattatttcataaagaactagagaggtgagagaagtcgccatcacaatagagctacaagtagttactcccagctaggagaactgggatacgctccagggagggagcaatatttcagcaggacccagaaatgtgagatttgtgcggcagttttaaatgatggctaagaattctttgacactcttcccttaagaggtaggatatatgttctcactttgaatccagactaccctcaactgactcataacctatggaattcaatgaaagtcacgctggtaacttctggggccaagtcataaaagaccatgatctaggcatatatcccaaagaactgaaaacagttgttcaaacaaagacttgtgcacaaatgtccacagcagcactactcacaatagccaaagggtggaaacaacccaaatgtccatcagctgatggctggacaagcaaaacatggtctacccgtacaatagaatactattcaaccataagaagaaatggagtactgatccacgctacaacaggcaggaactcagaaaatatcatgctaagtgaaataagccagtcacaaaaggacaaatactacctgattccgttgctatgaaatgtccagaatgggcaaatccagataggaagcagatgagccagtgccaggggttaggggagggggaatgatgatgatcacacaaaaaaagtatttaatgccactgaactgtgtgccttaaaatggttaaaatggtaaatgttatgtgtattttaccacaatttttaaaaggtttctaagcccatctgttttctaccttgtctactggaatgttcatgcttagaacctgaaggggctatgtaagaagttcaaatacagttgccttgctataaggaagctcaaaccagagaggccacatttgggtgttccagtggacagccccagctaagcccatcctttatgacatgtgagtaaaaaaaaacctccagatgattctagcccccagccatttgagtcctcctagctgaggtcctagatacagtagagcagagacagccatccttgctgcattatcctaattcccaacctatggagtctaagagcatagtaaacagttgtttcaagccactaatgtgtggaggttcattatgcagcaataggcgacagcaacggccttcaacctgggagaaagggggcaagtgtcctcttggcagatagcactacagcaataatggaatccttgtgtgtcttttaagatacatgtgactatgtatagttgcttccaggtctgtctggactttaatctccttgagggcaggtgcatgttttaccctgctctgtttcacccacagtgcccccacacgggtcctggctgctcattcaggataaggcctgctgcctgccatctgcccttcagatccactctctgtgtcccaggccactgaccggtatgagcttcatcaaagggcttctttgtcctctggcctccctggggttagcccatgggtttccttagtatctcaagtgccattcacatctcagttttttttcccccacattgcccttaggctgaaagaaatacccaatatagttccaccatcccaggctagttgaagcagcaataaaaaaaaaaaaacaaaagtagaaggtcaaaatgagccccggctgtgcctgggcactattttggtggaaataaattccacactgcagtaatacttcctgtggagagtatcacctctaatttagaaaataatcccaaatacaaccacctaacaatgacagctagatgttttctagcttctcctctacacagatgttcactgaacaggggtgtcatatctrtaggattcaactacagcagttttcaaagatatttctgctgtaaagcagcagaacgttctgacatcttgtgagaagcccgaggtagaaaactaataaaaacaaagctcaaaactggttgaagtggagttgttctgcctatggagtagccattctttcattcttttactttcttaataaacttgctagccgggcgcggtggctcacgcctgtaatcccagcactttgggaggccgaggcgggcggatcacaaggtcaggagatcgagaccatcctggctaacacggtgaaaccccgtctctactaaaaatacaaaaaaattagctgggcgtggaggtgggcgcctgtagtcccagctactcgggaggctgaggcaggagaatggcatgaacccgggaggcggagtttgcagtgagccgagatcgcaccactgcactccagactgggcgagagcgagactccgtctcaaaataaataaataaataaataaataaataaataaacttgctttcaggctgggcacagtggctcacgcctgtaatcccagcactttgtgaggccatgacaggtggatcacctgaggtcaggagttcaagaccagcctggccaacatggtgaaaccccgtctctactgaaaatacaaaaattagctgggcgaggtggcaggcgcctgtaatcccggctcctcaggaggctgaggcaggagaatcatttgaacccgggaggcggaggttgcagtgagtcgagattgcgccattgcactccagcctgggtgacaagagcaaaactctgtctcaaaaaataataatataaataaaataaaaataaacttgctttcaaaaaacaaaccaacaaacaaaaaacaacactggttgaagtgggagtgggggattcaggtgcacccattcctgtctggtcctctccccacacccccgcccccaccttgagagagagggaatggacacaattagctgaagccacagcactggtaagggcagccaggagaaaggcaggctggcagcacactcctcctcgtcctcagcgaaggggcaagtgcggcctgcacaaatcagaaaccctctgtctgctggccccaggctgcatcctgcttcaagtgcggccatcaggactggaggagaagggtgggaaaggcctctggagacagccagtggcccccactgcaggtggcctgcaacatgggccatgctccaaagcagaagtgcaggctcccatccccttgtaaagcagtttggaatcaaatgcaagcgccagaaatccagctaccttcctgggccctcagatatgcttctaaacattcattgctgcaccaaaaacatcattacaacccaattttctgcacatttattttaaaatgctgaacttagagcattctagggattgattttaaaatggtaaaactgaaacaatgtaaggaaatatcacatactagttttccaaacaaggaagaggatgctagtatctaactcttagcttcttactagcatcctgttttggctataacaaaatatactgtattcaacagtttaaaacaatacccatttattatctcacagttctagagataaaagtccaacccaggtctcattgggctaaactcaaggtgtgggcagggctgtgttccttctggaggctttagagaaaaatctgttccctgtcttttccagcttctagaggctgtgtggtccttggttcctggccccttgctccatcttcaaagccagcaatggccaggcgagtccttcccatatgacatggctctaatccccgactcttctacctccctcttctgtatttaaaggacccgggtgattacattgggtccacctggataatccaggataataatattttaaggtcagcagattggcggcctgaattccatcggctaccttactgaatttcccttgccatggagcctaacatattcacaggttccagagatcaggacgtggatgtctttgggggctcattattattctttctaccacagcctcccaccccactccatgtggaacatgtgcctacatgaaagattttccagcccgttcttgataggtgtctacgatgacgttaagcttttgcatgcaaaccaacattcaccagtcatggacctagcctcagggagggtccagtctggattgggggacaggaaccccttgagccagtcctcccaggcacccaagagcagaagaggaataacatgcaaagtacaaaacctaagagtgagccaggcgtggtggctcactttgggagctgggtaatcccagcactttgggaggctgaggcaggtggatcacctgaggtcgagagttggagaccagcctgaccaacatggagaaaccccatctctactaaaaatacaaaaaattagccgggtgtggtggcacatgcctgtagttccagctactcgggaggctgaggcaggagaattgcttgaacccaggaggcagaggttgcagtgagccaagatcgcgccattgcactccagcctgggcaacaagactgaaactccatctcgaaggaaaaaaataataaaaataaataaataaataaacccacctaagagtgaacacacagcagaaaaagcaaaacaccaggtggggaaaagaacagaacaggaggccgggcacggtggctcacgcctgtaatcccagcactttgggaggccgaggcaggcggatcacgaggtcaggagattgagaccatcctggctaacacggtgaaacctcgcctctactacaaatacaaaaaattagccaggtgtggtgacaggcacctgtagtcccagctactagggaggctgaggcaggagaatggcgtgaacccgggaggcggagcttgcagtgagccgagatcgcgccactgcactccaacctgggcgacagagcgagactctgtctcaaaaaaaaaaaaaaaaaaaaaaaaaagaacagaacaggaaagtcgacgtatctggaaggtatctctcctaaactcacaagaatgaaacccagctcctcccaacactcccttctgagcagacaaaatgggcctaatcagcatcatctccactgaaggcaacttcaggcccttcctcaatgcctactgatgctgactcctggatggtttctgtgcacgtgtttaaaaacaaacacaagctgggcgcggtggttcacgcctgtaatcccagcactttgggaggccaaggcaggtggaacacccgaggtcaggagtttgagaccagcctggccaacatggcgaaaccccgtctctactaaaaatacaaaaaaattagccgggtgtgatggcggactcctgtaatcccagctactcagtaggctgaggcaggagaatcgcttgaacctgggaggtggaggttgcagtgagatcgcactattgcactcccatctcaaaaaaaaacaaagaaacaaacaacacatttgagataccctgtgtccaaaataatggaagggatagggatgtgacctatgacagcaaggaaaaggctgaaaaccagtcaaagcaggtaagactaacaggcagagtccccagactttctgtcagacgagcgcagcaactgactagtgcccataagggcaaccctggagccatctaggaaagggaagttctccctctccctatcatgccactgttccagggaccactcctgaactcgggcaggcagggttaagcatctctgggccaactctgcagatgctttgtggcccatctggctcagcccaataccccaagtcagcccatgaggcttctgcttggatcccagcctggcatctcagcactgccagcacacggggcccactctgctcttacgccccccgaaccaagttcaaggaccttgaaaacaaccccaatccaggggtaacatgttgccacttctcacacttattctgcttggactatacagwgaattttttttaatggcaatgtaattcctatacaattcacccttttaaagtgtacaagtcagtacatagtgaatttttaaatgaagatgcagttcccatacaactcagcccttttttttgttttgagacagagtctcgctctgtcgcccagactggagtgcagtggcatgatctaagcttactgcagcctctgcctcccggattcaagagattctcatgctttagcctcccgagtagctgggactacaagcgtgtaccaccatgcccagctaatttttgtatttttagtagagacggggtttcaccatgttggccaggctggtatcaaactcctgacctcagctgatccacccgcctcagcctcccaacgagctgggtttacaggcatgagccactgcgcctggccacaattcagcctttttaaagtgtacaattcatggtttttagtacattcacatattttgcaatcataaactctatctagttccagaacattgtcatcatcccaaacagaaaccccttgcccattaagcagacactccccatcccccttcatcccagctgctggcaaccactaatctactttctgtctctatggatttgccaactctggacattttgtataaatgatgcctttcaaggtttgcatcacatatttttaaaatgtggcttggaatgtcttgctcacttggagccaggtgccgtgctaaatgctttatacgtttctactcatttaatcctaataaccaccccatgaggtagatagtgttgttatccctatttcacagatgaggaaaccgtagcaccgagcagttaggcaaatgggacagagtcatagcagcactgggcaggtacgctttaaagcctacactccatgtgtaagctggacctctctttaagggagcaggcacttggtggcttgccaacatgctcatcaagtttattcttttattcttttgttttgtgtgtgtgtgtgtgtgtgtgtgtgtgttttaagacagggtctcactctgtcacccaggctgaagtgcagtggtgcgatcttggctcattgcaacctctgcctcccaggctcaagcaatcctcccacctcagcctcccgagtagctgggactacaggcgcatgccaccacgcctggctaatttttgtattttttgtagagatggggctcttgttatgttacccaggctggtctcgaactcctgagctcaagtaatctggccacctcagcctcccaaagtgctgagattacaggcatgagccactgcgcccggccccctcatcatgcttattcttgaccacttctcacattcctattacctgcatgatccctgaaggtatctgtgttcatgccttctgctctggttatgcaggtaaacctgagttcaaatccaattcagctaagtgttaagttcctaaacctctctgggccccatatttttcatctgagaagtgggttaccaaacagttacctgtaagactctatgtaaaagggccactatggacatcaggaggtgatatgggtcacagtgccaacaggtcggggtaatgtggcgaggcagagggcctggcatataggtgttccagaaatgaagctcctgttaagattactacccatccacatcactgacagtcttctccttgctgctcaaaagaacagcttcccatttctggaggcacatacaggcagcatacctgtcctcagaggactttttggaactagtaaaatacacagcagactgaaaagccctctgtaattagaacaaagataacttgttaaccgccctttaaactcctgggagcctaaagccagcctctacttgctacttgctagagcctggaaggatttctcagattatgcagagttgcttctgtgtgctttctgaggtctgccagggttactcagccacatcccactactgaggaccaggaccaagaataaagtggctctcagcaggcctacccaaaatgccactccagggcccaagaagagccaactggtgcctaactgaggcacttgctttgtgtttgtcattttgacgcagcagctctgagactaccaggatcccagagaagaccaccaatgcaaaaatcgtattatcttattttggacaaaagatccagaaaactgttggctgggcacggtggctcacacctgtaatcccagcactttgggaggccgaggcaggtggatcatgaggtcacgggatagagaccatcctggctaacatggtgaaactctgtctgtactaaaaatacaaaaagttagccggtgtggtggctggcgcctgtagtcccagctactcaggaggttgacgcaggagaatggcgtgaacccaggaggtggagcttgtagtgagccgagatcgcgccactgcactctagtctgggcgacatagcaagactctgtttccaaaaaaaaaaaaaaaaaaaagatccagaaaactgggcccttatcttgaaaccaaagctgcttctggtttcagttaattaatttaaacaataagctgggcgtggtggctcacgcctgtaatcccagaactttgggaggccgaggcgggcggatcacgaggtcaggagttcgagaccagcctggccaacacagtgaaaccccatctctactaaaaatacaaaaattagccgggcatggtggcgcatgcctgtagtcccagctacttgggagcctgaggcaggagaattgcttgaacccaggaggcgaaggttgcggtgagccgagatcaggccactgcactccagcctgagcaacagagctagactccgtctcaaaaaaattaattaattaattaaaaataatttaaacaataaaagataactgggtagcagtcttatctgggttgaatcctggctctatgtcttctgagctatatgaccagggccccctcatctgaaagccagtgataatatctagcctgcaaaattgtcgaggcaatttaaagcaatatatgtgaagtgcctggcacacaggaagaactcaggagatggtagctggtagcaaggctgtagatctaagcctggtcccctcaaaacacctttgtgattgtcaggcatcatatggatgatcaaacaagttcggggaactcattttcccatggtccctaagtagtcgaagtggggtacctccaggtgcaagggcatatgcctagggcttaaaggcagtgactgcgcagtcagacaagccttgcatcaaatcataattctggcaatcgctgtgtgacctaaggcaagttacttcacctctctgtgcctctgtttcctcatctataaaacagatgtactgtttctgtctcctctaccacctcttaaatcaacaattgtaacgtgcaaatctgagacccaatcatttctattccccaccttctcaacgggcacaccatgttgaagactttcagaagacagctttgaagggagtatcatttttctaactttttttgtgcttctactttcaagatttccatgtcattagatgcaagtcaatcaaatgatcatacattttcctacaaatgcattgtaaacaaaataaaaattttatcccaaagggaaaatgaaaaagaaaattcaacaactctttacccctgtaacttcctttatttttctccatagcactgacaatatatatagatttcaatgttgggcttgttttctgcccggaccaggatgtaagctccatgaagacagtctcaattttgttcactaccgcatcatcagttcctagaacagagcctggcacctctgcagaatgttaaatggctcttcgtgaatcaactccaggtgggttgcccacatgaaaaacatttctgcatcttttgcaaaagtggcttggctagtaccatccactgttttccagtgttcctttatgtgacataaatcttactagaactcagtactaggacaaagtgtgtgtgtgtgtgtgtgtgtgtgtgtgtttcctgagctcacatattttccaccagctgggttcgcttctattgtcaggaagcttggagcataattcacgttcaattacagtgtttcccttaatccctttttctgatggggacataggatataaataagtgtaagaagattctgttggtacatgtttaagaccctatttttaaccacagactgcatttattctactaagatgcttctcaaacttgaatgtgccagagaatcacccgcggatctagttgaaatgcasaatcagactcagtaggtcgggggcggggcgtgagatgctgcagttcttacaagctcccaggtgatgcctatgcggctgggccctggaccacattttgagtagcagagggtctaagaaacgtgcttccttgattcagcgggatttctctctcctgctccttggcaaaacatgaccaaagtctcaaaaactgaagcggacggcagaagcacctagagagctggttagacctacgcctcgctgacccccccccccccccccacagcccatgcccgctgtgatcccgatgaaaggggctaggaatccacctaggaagttccccaggtgcttctgctgtcggtggcctcgcagcaaatttcgaaaatgactgctctcttcaaggttttctcaaaggtaaactcttggggacagctgttgtcaccagtggtacacctgctcgttcaggattttagggggcccatcccgctgtttccagcccagcgtcaggaggggacccacccctcctctccggctactccgaccgcggcggagtcaacccccacgggcccggggctcggacccccgccgctccgcctcgcacagccgggccggccggtggcagccaccgcaggcccgagaggcggggaccgtgccgctcatgcgcagagcgacccctgggcccacaaggcggggtccccgcgcggtccccgcgcgccccccgcccgccttacctcgctggaccagggtggccaaggagaaagcgaggcagacaaggaacgccgagcgccaggccaccatggctgggagcaggcggagggccccggaggagcacagttagcgcgagagcgcccgaaggggaggccgaggaggagcgggaggaggagccccgccgcctctgcagggtcccgcccaaagcccgcgcgcgcgcgcggcgcggccccgggaagatggaggtcgggcgcgctagagagccggcgcctgagggcgcctgggctggggttaggccggggggcggggcgaggctgcagtatcgggggcggggccgcgttctggaggcggggctccgggcgaggggcgtggcctgcgggcacccggtgggtggggaggcctgggttgggttgggctgggtccagcggcagcgcgcggtccgcagaccctgtcccacctcggtcctcgagaccgaagtctcggaggtggccccgcggacctggagcagtgagtcaccagtgccggggagcgggaggcggcagcgccggtgggcgccgatttcctcccgggtgaccttgagaagggctcttccccttctggccttggtgttctcccggtgaagggttgttcccttggggcccctccagacaccgtccagcacggagccccgcactctgtccccacccgctgttccctgcaggagtgaaaccctggccggagactgaagaaaaggaccgttttcgtgactggctgcggtcaacaagcagtgacacgtctcgagaaaacgaggccgggggcgcccgggtgggcgacaggggaggatgggggcgtcccggagccgaagcgccgcgggctcgggagactgggggtagggactgggtcagctctcccgaggctttgatgaatgcgctgaaagtgcaagttcatatctgcagagtcgatctcaaaaacgtgcttaatgaccgacaaacgcgctgcagtcctttcccatgaacccccgcaaacggagtccgtctcccagacccgaagaaatcagattccgatacgatactgtgccgaccagcaaaatgcccgctgcagcagttgatgggaacgctccctagaagagccccagctgcaaccggctctcgaagacaaagaggaagcgctactgctctccggagtggtagcgtgagcctgtccctgccattatgcggcaccggctgcccagggccacatcctccttagagggcggctactaccacctcccctcaatatccattcggcagctttcctgtgcccccaacccagccctcgctgccataggcacccccctcagtggctcccaccaacccctaaggaacagtggggtgtggggtctccctgagatggagccgaaatctcccgtgtggcttacatccattgccctgaatcttagggctgcagaaacaaaacagcatatgaggagtggatcttcccaggctcagggcattaattactctatgaatggaacattattccattctagctgtagaattaacagaaatagctggtagttattgaacacacactatacacatggcatattccaggcattttacccttaatttttattcctcacaatgccttatgtatcatcacctattaacgagggaaaagcagcaaaatggaggttccttgaggttggggagttagccaggtctagtctcatgtgtcaaagggggagggtaccactaggaaccccagctggtgaatggctaagaatgtgtgctgtagagccagaccgggtacaaatcctggctaaacccaacaaggttgtgctaaggattaaatgaggtggtgaaaagtggacagcctgcacacagtgacagagggcagggaccattactggttaatctagtaacggctaaggaaatagtggccactgtgaggtcaggaggttactgtctattccaggctgtggacatgcccccacctttgctactaagtgccctgagccattccataggccctggtggtaccatctgtacctggagggcagtagattttctggtctttaggagtcttccaggatctgatgggtaaaccctgatgcatacacactcatctacactgaggaggtgagaagcatgtaacctcttaagtttgaggccatgtcaatcaatatgcagtggacagtcacactcaactggaactctagctgctaaaggtgctacaatgccatatgcaataagactgtcttctagctcaagaatagttctcaaactacaccccgtgggctaaatcctactcccacctgtttgttcagccttccagctaaaagtagtggttgcatttttaaatggttgaaaaaaatcaaaagaatgttatgacatgagaaagtgatacaacattcaaatttcagggttcatgaagtttatgagaacacagccacgcccattgatttttgtattccctatggtggcttttgtgctgccacagtggagttgaacagttgtgatagagaccatggggcacacaaagcctaaaatatttactgtctaacccttacagaaaaagtttactgacctccgttctagcagattgaaccatggcaaggatgaacattagcaggtgatgatatgggaccttaagagtgtgctcctctaaagcgcaaaatgaacatagatgacctgctctgacacaggaataagaaccaaaagaaaaggacaatgtttatcattgtggccaaaagatactcacaaatagttccttaatcaaaatattgcaaatgtccgagatggattatcctaccagatacctctccctttgtaaaatagcttatcttgggcctggtttgtctctcagtctcttgtaagttaggttaatgtgagttagagagggctgatttgcctgccagactgaagacctgctgggaacttagtgagcctctcagtcaggtactgctatcctgctgaattgcaattaaacatgcagttgatttacatacaggaaattgtacacttaaaaactatgatctgggagcacctccccaacttagtttggaagtgtatttcccaggagaaaaaaaattattattaaaaaaattttttcaaagccattatctgtgctccccgcccccacacatcatctatactccccactgccaatgcacatgggttcagggacccactcttgcccaagcctgcctcgtctacacaccactcccttgttcccaccctcttgctacacctagttcctccctgaacttctcataccctgaaaactgccatcaattggaaaaccatttggcctgacaagattctctcctaaaaatgtccacctttcccaagctgtggccagtgtggcatggataaacagccaccagggtggcctgggaaaacaggagaggcacacatatagggctgggtgggtttacaccaatctcaggtaaataggattatgtgggccagctaggtatccatgggtcatgggtttgcatacaggaaattgtgcacttaaaaaccatgatctgggagcacctccccaacttagtttggaagtgtatttcccaggagaaaaaaaatattattattaaaaaaaaatttttcaaagccattatccgtgctccccgcccccacacatggtatatactttggggacaaagactatactttcaggaattgtttctgtagtacattactagagaatgtcctctgaatgtgcagagcacagaaaaatacaaaataataataaattccaaatcagctatctgagtacctgggtggcctccctcacccatgatcaaaatcagctgtggaagggccttgccaccacccccaccactgctgaagatgcccatcaggagagcaccactgtccatgctgacagcaccccttcctgaatacccaccccgccattgatccttagggaccagagccgagagggagtccacatgggaatgagggcagggaccaaaggctttgccccaactcaaggtcaccttctgtgccctgggacccaaagcagctctgctggtgctcagggcttcgtctaccctcccacagccttggagcttaatccctctaaccaaacctgttggagggccctggctgggtacaaagggacagcacaccctcccttcccacctcactccccactgtgcggggcaattaagagacaaagactcacttgcatctcaatgggcatgcaaacagccctggctggctggggggaggggcgcatggggctctacagcaattttcccaaatgcctgacttcacagtcaagtttcaccagtcccaggagaaatacaaaaaaatgaggttgtcgtggcaagtttccccccataaagctagagtattgacctttatcttgaaatcatgaacttgttttggtatacaaaagtccttttatttcatgaaaagatggtagtgttttgtttaatatgcttactttgcaaaataagaagttggcaaccctacccgtccccaaactgaaaaaagaaaagaaatctactcattggtgaagttcacaagtctgggaaccgctggctatcccaataatattcagcccaccgaggcccagatacataggaatttttggaacacaccccatatgtaaacagaagccctgaaaatgcattctaaaacaatgtttcctctgatattttttgagtcgtaagcacattatcccttagtctcctccgcctctccacagccttcttattctctcctctcttggattttacagtatggcaaggacaggcagggctttgaatgccatgctaatgagcaaagatttggttctgaaaacagaggaggagccactgaacgcttttaagcatgaagcagcagcgacagggaactggtctacaggagtgctactggcatcatgtagggagagaggctggggactgtggggctggagagaggagtttggattcctggtgtggacgtggtggaggtagcaattgccatagaaaagagggcctgggtatgtaggcctggcccaattctcagggctgggaagaaaaggaagtccaagggcggagacagatgataggcaattattactctgtgtgatgcaggtggttaaagagttgagcacacagtgtgatgggaacacggaggtgcagcccctctcccagtgcatggtcagtgtagagctgactcaaagaaataatggtttggcctgcagacggcagggtgttctgagagaaccgctgaaatgagaggaagggcaacacgtcgaatcgaattggctggaaccaggtcacacaggacttgcagaccgggtgaagatcggactgtactcaaaggcaaccatgaacccccaggagtgttaagtggggatggggtggtactgccgggtgataagatcagattgacgttccatgatttcatttatccatggagtctcaggactctgttgtacagaacccagaaaatgctgctctaggtgacaggagccattagagtgaaaagctggggagagtggagaagagacagaggtggggaaggagagggaggaggcagtgcagaagtcccgggaatgctttggctgggctcaggaggaagggcgaggtggcgtggagactctcctgctctgcctgcttgtcccagaaacagcccagtgtggtgggtcaggagcagcggcttcacagacagcagggtcatcttccattgccatgtttctgcagagcagcaccccctaccaccaccaccaccaccaatcactcctgtcttacatgcagcagagttgctcactcccaaaggggaccctctgtaatgtaatgcaacaaatttcaatgagataggaatcatctcatcttttttgattcctgttaggattcccattggtggtttgaggaattttcttaacacaccaacgaccacacgatagtgatgatattggcaattatggccatggtgactatgatcccaaaagaaaagaagacgatgccaaaggccggtgggtcacgacttcgttttaaggctcattatcacgggaaggcgtcctcttccttggaaatctaaatgcagaacacccagccatcttcaggaagcctgtgtgtgccaagtcaggcagggcaaaaccttatacctgcatgttttcctaatgtgagagactgctctgtaaatttctttctagtgctcagtcgagttaatatggaatttgcataagcacttggcaagaaataacgtatgtctctgtaatatttccgaggcagtattttctcctccaaaccctgacctctgtaggaacgggacttaacatttgcctcccaaatgcagagtagggctgtatttaacttacccagtgaagtctcccctaagcactcaggg

SEQ ID NO: 98102 - DNA, 24244 bp, Homo sapiens
tgcctccaaattcctgggaggagttggggctggagaggagggtgacctggatggggtctcaggccacatcagcccccaatggtgacatccaggcccctgagcaggatggggaccagcgaggagagccatgggtgaggaagacatgagggacacagattggccaaggatggccaggaggtgacagtctacccagagaaccttagggtcaccaggtagaattcttccttgggtagcaggtgatgggattttgatggagtagggcctgggggtaggtgagggtggggaaggaagccagtgtttggttgtgagaggctgggctgtggagggcagagaggcctgacaggagggcagtggggcagccccagaatcttcctgcccagtggtctgctgcatgcctgccacaagaccttgacagtctgtatgcctggaattcatgagctcttagaatcagtgagccaagagccctagcccactcctgcccatgctagctttggactgtgagtatggactgaggggcggggcagacagatgccatcctgagggtagcaggtccttgttgaccctctgcagggcaggggctccttgccctcctggatgcccttatgttatagtagcctggatctttctctcagtaggggtagatggcaactgagagagggcttattgctgtgtttgttgagcaccaaagggttgtccttccacctacccaaggggccgggagatgccccccaggaaagagaggaggccagtggaggctatgttccccctcccagcaccctgcagcattaccaggacaaccagtctcatgctgggctcccacggatagaaagcaaaagctgacgggacaggaagagttatggcgtgggggaagacagtctaaacaaagattgagatctcttgaagccaggtgttcaggaccagcctgggcaacacagcaaggccgtcttttccaaaaattttgaaaataaaaaaattagccaggcgtgatgacacctgcttgtagtctcacctacttgggaggctgaagtgggaggatgagttgagcccaggaggtcaaggctgcagtgagctatgattgcgccactgtaatccagcctgggtgacagagaaagaccctgtctaaaaaaattaaaaatatttggaggggaacaggagactggcatggttgttggggtccagttagaccaccagggagtatcaggcagttgattcagtgggcagctgagcccagtcacttggcctggttcagagctggacatagggctcccataaataactaaccattacagatgacaagtcctcaatcatagagagagagcgtgggaacagcacctctcctccccaggaacagcgaggaggcggagcagctgcagctggagaagggctaccagaggctgagaacaccggtcaaggcagcgggagccccaagaggctggtaaaatcccagtgacttcagagagagcggctggctgcgaggtatgggaagccatgcctgccaagggtccaaggaaggctatggcagccaggatgctgcagacccgaggtagaaataaaaggactcagctgagtgccgtggctcacacctgtaatcgcaatttgggaggccgaagtgcgcagattgcgggaacctgggaggttgaggctgcagtgagcagtggtctcaccactgcactccagcctgggcgacacagcaagcccctgtcttaatgaataaataaatataaaaaaataaaaataaggctgggcacggtggctcacacctgtaatcccagcactttgggaggctgaggtgggaagatcgcttgagcccaggagcttgagaccagcctgggcaacatggtgagatccccatctctacaaaaattaaaaaaaaaaaaatgccaggcacagtggctcatgcctgtaatcccagcactttgggaggccgaggcagtggatcacctcaggccaggagttcaagaccagcctagccaacatggcaaaaccccctctaccaaaaatacaaaaattagccaggcatggcaggcggatcatgaggtcaggaaattgagaccatcctggctaacagggtgaaatcccatctctactaaaagtacaaaaaattagccgggcatggtggctggtgcctgtagtcccagctactcgggaggctgaggcaggagaatggcgtgaacccaggaggtggagcttgcagtgagccgagatggcgccgctgcactccagcctgggcaacagtgcaaaactgtttcaaaaaaaaaaaaaaaaaaaaaattagccaggcatggtggtgcatgactgtaatcccagctcctggggaggctgaggcgggagaatcacttgaacctgggagacggaggttgcagtaagccaagattgcatcgctgcactccagcctgtgagacagagtgagaccccatttctctcaaaaaaaaaaaaaaaaaaattagccaggcacagtggtgcacacctgtagtcccagctgatgtgggaggatcgcctgaggccaggagatcgaggctacagtgagccgtgtttgtgccactgcactccagcctgggtggcagagtgagactctgcctcaacaaaataaaaatcaaagaaataaaatgactcagtgaaatgtggccatccagggtgagaggaaggaggcagaggggagtcgggagtatctggctgggatgcccattaggctagaccagaaagcctgagtggaatggaggatggaggatggagaagagagcttcgggagggcgtcataggcctgaaatgcctccatggagatatctgcctttaacattcctttgggttttttgtttgttttgagatgggtgggtctccctatgttgcccaagctggtctcaacactcctgggctcaagggatcctcccatctcatcctccctagtagctgggattataggtatgtgccaccgcacctggtttactttttgttttttgttttgttttgtttgtttgtttttgagatggagtctcagcagtttcagtggtgtggtggggacaaaagacaggtatgagtcggttgaagagacatagcgggaggggcatggagctctggagaaacttcctcttaaatgtagctgagggataaggcagcacccggagggcaaggggctttaagggaaattttttttttttttttttgagatggagtctcgctccgtcgcctgggctggagtgcagtggcacgatctcggatcactgcaacttccacctgccgggttcaagcaactctcctgcctcagcttcccgagtagctgggactacaggcatgcgcctctatgcccagctaatttttttgtatttttagtagagagggggttttagcatgttggtttgccaggatgatctccatctctggactttgtgatctgcccacttcggcctcccaaagtgctgggattacaggcgtgagccaccgcgcccggccggggaatgttttgtttttaaaatgagcccttttttttttgagatagggtttctctctgtcaccacggctggagtgcagtgatgcagtcttggctcactgcagccttgacctccctggctcaaacaattctcccacaccagcctgctgagtggctgggaccacaggcgtatgccaccatgcctggctaagtttttgtaattttagtagagacggggtttcaccgtgttgcccaggctggtctcgaattcctgagcttgagcaatcctctcacttctgcctcccgaagtgctgggattacaggtgtgagccaccaagcccggcctaaaaatgagatgttatacatttacttcagaccccagattctacaatccacaggcaagataagtggcatcaggggaggacagcagaaaactgttaagtgcgccttgtggaacccagcggttacagtttcaagtccacagcccagtaaagtctgagaccccaagggagggaatgagagggaaagtgggtgcctgcgtctgggtccctcaacctgcctgcctatgtaaggacccagtggggcacaggacaggagatctggggcaccagtatttgccttcagcgtcagacgatctacacaggacaggaggcaggtgggaggactgaaggaaacagcctctgaaacggtcagtctggaggcagcaggcgtgtgggcctcaggggttccctccaggaaggccgagggaacagaaccgcaggggcagagcacaggtgtagcagagaagggctcagtgccagttcctttgagagacggtcagggagcggacagagggggcccatagccgactaggggcggcttggtcatgggctcctctttcctcagtgggctgaggggttaggtcctttgaggagcgctgaggagactgtggtaaggggaagcgccctccatcccagaggctttcctggaacaagtgggttggaaggaccaggtgtttgggagctgctgggagcaggtgcagaagccaaggcattcccagatgggggagactgggggtggcaaggtggcttttcagggatccagcctgcatgccacctatgcagccatgctccgggggcgacatccgcctgtgtccttcagctcttcctcagcctccacccgccacccgggagtcagtgcctggactggagctctagctggagggcgtctaggaaaggtcccaaggggtgcgcaggatgacctggtgtctctccagagtcacccctgctaaaatactatgtggccagccccaagtcagttgcaggtcatggtgttgggatcttccacaaggcctcctggagtcgcgctgggggagggtggggtactcagtctgtcgcagagccccaggccatccgtcgccaagaggagcactccagcgcttccctcctaatgcgttcttatcttgccgggaggagaactgggccagccttactcacccaatctatgcatgaggcttccccaacgcgccagaagcccttccttcgcagaggtgggcttgccccggcctgtccccgttcctctaccatggttagggcacagtggccgaggactccgtcccagcgcggctgagccggaaagcgatggcggccggaggggtcgggaggttggttagcgctttacggagctgcgtgttccgtttccaagggctgtagagccttctactgggagccaccgtggatcaggccaggggttcgtcagctgcatttgccggatcgcatcgcagcacgcgcacccacacgcgcacacgccctactcgcaggagactaagcgccccgaaaaggcgcgtccccgggcgggtcgcagccggtccaggaaaggggacagggcgcaagggccatttggggaaggaaaaagggggcgaaccatgaccttgacctcatagaaggccgaggacgtgaagaggctggcagataagttggcgaggctcgcagcgaaaacccaaagcagccgagctcggagagcgccgtctcagcgggcgagggcgtagcccggggaatgcacggaggtccgtctagtcagtcggggcgcgcttcctggaggaggaggagaaggacttgcggccggagctaccgggataaatgcaggaggcggggcagccagcgggcgtggccctgcggaggtccccggtcgaaaggaggagacaggggccggccgcgtacttaaagcggacgcgggggaagccctcccggggtctgcctcagtcgcacagctcggtgggctcgtggcgcagtcgaacgttttcccagaagctccccggccccgtccagcccctaaactcgcgacgctgggtctgctgggtccggcgcgcacaggctcgaaggagccgggtctactcggtttggcccagcagctgcgggcggcggggagcagcccagcccggctggagcagcctcccgcgggtgagggcgcggggcgggcggccgggtcccagccctcggcagctctgcctaccgcgcccgggcgcggcgtctgagcggcattaggacccaggcgcggcgcgggggtgtgtcgccggctcccgccgccggcccgcccgagtcgccgagtttggggtccagaagcgccggagcgccgcgtgaggagcccggccgtgagtgcgcgagtgtgccatggccgcggccaccaggcgcgtgttccatctgcagccgtgcggtgggtgcctgaacccgggggcgcggcgggaaggccgcccgggtctccgccaccgtctcccgtcggggaccccggggagaacgcggatgccgtctgcctgcgcgggccggggccggtgggcgagagggctgcgggattcccagccgcggggaggagggcgcgggtgcgggaggcccgggcgcggcttcgcggccaccgcgcgcttggtttcattagggctctgctgtcgccgtcttgaatttcttaccaggtttgaacagctgatgcagcgggtcgagggcggggagctcgaaagtgggcagggcggagctgtggggctcccagcgccccgagcgccgagcttttgggagcctggcgggccgccgcctcggaaggtctcattttaccttccgcccgggcatcttcccgtccggcgccgcggtgggagccccggaacccctggagttttgggagtcccgggacccctgaccgtgccctgcgcggccgcagcggtttctcccttgctctgacacgggagggccagccctgggtccccgccaggacccaggtttgtacgaccgaccctttacctgcacgtgggccgccgggacggaagcggagtgtgcaccggcccaaccctcccagaccctcgtcgcccacggcctgggacgcgccccagcgcccccgccccccacttcaggatgcagccccggctcccgccccgcgcctgcattcacatcctgcgccccgacccccggggtctccgagtctggaggcgctttcctctcgtgcacgcggcccctcctgtcgcttccttcctccgacagcgaggcacaaacagccgggaccatccggggaccggcccagggagggcgcagcctcccccgacccatgtgtccctcagatactcctcccacccccaattgttctcccttttggaccaacggctctggcttccaggcggccgggacgcggtcccaggactggagaccgttgcctgtcggcccccgtgtgacccggggcgcgtgacgggggtcgggggaactgcgcctgcaatgggcgtttatggcccccaggaccggtctgagagtgagaagagggatgtgcagagagatcccccgccttggcatcsgaggagagagggggagaggcccgctcgggcccggtcccttcctctcgctgcagcggggcagggttttctcrggaaaacctggattagcgaacatggtactggtactaactcggtgggaagacatccctggaacgtctctcctcctcgcctctggcccgcctgggcagcccctagcagatgggctaagcaattgaatttctgagattaaggctggcttcccctgctatggggccccctcccgagcactgtcccctgcttccctttctccctagggtggcstgggttgcatccctcggaagagcgaaggaatgagccaggtcggggggcggggagacaggtgcacacaggaggtccagggcttggtccatggggctgstgacctttctgcttcccttgcagaaaactctcccaccatgtcgcagaatggatacttygaggattcaagtgagtacctctcggggagtgtgtgtgtgcagagagagcttgtcgggcaaaagcctccagggygcatagcctacccaccagagtcctgtggctttgctcgcctatctgggccactctagtgctggaatgcttttggcttccactcttcgggaagctagacrtgggcggatcccccgtggacctgagagrgcaggctgcccmttctcctgggctacttggaccaggtgaaccctctgggattcttacccaaggttttctgtgacaatggcctgttatctgactagccttgggccaagaattctgtgtgcccctgtccctctgtcctcacccagccctggagggaatatctgtcgttgtctctttaaagaaatataaggcctctgtgctgcagtccctcgggcaccttcctgctgtccctgcttgtaccagtccagctgtcttcctcctcatgtctctgggctggcttcaggctgtgtcctgtgcctagccccatgagtgacctgaccattcgagggttgtttgtagagcagtgcgtagacacagggctgatgttcccttacccagagccctcaggacatggggctctgtgtgctaggctgctggtgggcaggttacgtatggggctgggactaggacttggcattgcaggagccccccaggaacctggtagtgtcagctgggcaggtccttaatctaggggacctgagcactaagcctaaggtagagctgagggcatcaggggaagaatgggggaagaacggggctgtgtgaagggcagtggaggggactagtgggtgctggttgaggggcagaggggaggctgggacaagttcgggccaggggaaccagacagtttaaacaaggcaagcctgacccggggaggaaggagtttatcatgagctccagaaccaaagcagtgaggacgtcttttgttttgttttgttttgttttgttttgttttgagtctcgctctgtcgcccaggctggagtgcagtggtgtgatctcggctcactgcaagctctgcctcctgggttcacaccagcctcctgcctcagcctcccgagtagctgggactacaggcgcccgccaccacacccggctaatttctttttgtatttttagtagagacagggtttcaccatgttagccattgttagccaggatggtctcgatctcctgacctcgtgatccgcctgccttggcctcccaaaggcaaggatgtcttttgacctaatatttcttctctgggctctggaggtagtgcaggcctgggcctgggagtcaccagtccctggggactttgatgcaggaggcactagggcttcctacccagaaggggcccaggctaaactcaggacactgggggaacagggcctgggatgtgccaaggaaactggcggcgggagtagaagtgagtcagggtgagtcactccctggcaggtgcaggcgtgctgctgacccatccttgtttctgcacaggtgtctgtcaggcatcagtggggtctgggctataagggcccctttcctgggagtacctacaagtgaggaacyttaggggacccacaagacrggaagggctgccagtggccaggggtgagrcagggatctaggaggacttcctggaggaggaggttccaagtgagtcttgaaaaaggccctccagggagggaagccctcagcttggaggacaggaccttgcatgcctagggtgctgaccggatggcctgaggagccagtggtcagggcagggggagcagggctggctcaggctgtgatctgtaggctgcagggagccactgcagggctcagggcagaggaatatttgcatgttaccaggaaatcttcctgtaggaagaggggtgtgctgctggccagctgcaggaattgaggaccaaggggagcaggctctcacctctggggtcccacatcccacaggtgccattacacaccctcactctccatgtgcccttacccagggcccccaggacatgaagaggagcacgatgggggcagggctgacatgaggccttggggtcctctcccctgtcagcccctggctctgtttccctggttttcctgctccctagaccttgtctgatacctgtcctgggtctctcagcctcgatgcttctccccacctgccctcctggggaggcggagctctaagaccctgtgcccacaaggcagcgtgtgtgtgtgtgtgtgtgtgtgtgtgtgtgtgtgtgtgtgtgtgagagagagagagagagagagagagagagacgtggatactgcagcttctctgccttccctgtgttccctactttgggagggcaggggccaggcagtctcatctgcattattgcactccgtgcctgccccaatgtgtctggagtggacatgtttttctcacgctgaagggtcaaagctgcgcagggtcctggtctcagcggctagggaatgctggagactcactttgtggcagctgccatgtcctgtgtggggctggggcaggactagaagctgccttcctcgcctrtgggatggcctctcccaccacggcccgagagtgggacagtccaggggtccctgctccctgggcttggagcccctccttcctgtgtgtggcactttaacagccaggccctcttgctcttggggktctctaggctactacaagtgtgacacagatgacaccttcgaagcccgagaggagatcctgggggatgaggccttcgacactgccaactcctccatcgtgtctggsgagagtatccgtttttttgtcaatgtcaaccttgagatgcaggccaccaacactggtatgggggctgcagcaggggcagactgggggaaggcacgggactgggcakgtgtgactcgccttactaagaaagacctgaggagagggtggcaccctgagccctccccgcttttctccggcagagaatgaagcgacttccggtggctgtgtgctcctgcacacctcccgaaaggtgaatggcctgtcctgcaggtggtcctggggcctctacctgggggctgaggtgatggcttccctgagaatcctcccgctgctcccctcttcccatgcctccaggagcagctcaacagggagctcrcaccagcccagggctgggggctgggggctgggggctgggggctggactsctgcggctggctgggagggagggaccaggcagtgacagcatctcatacatgggcccgtgtggttctgtccctggggtcccctcagtacctgaagttaaagaacttcaaggaagagatccgtgcgcaccgcgacctagatggcttcctggcrcaggccarcatcgtcctgaacgagacggccacctccctggatarcgtgctgcggaccatgcttcgccgyttcgccmgggaccctgacaacaatgagcccaactgcaacctggacctgctcatggccatgctcttcaccgatgccggggcacccatgcggggtaaaggtgaggccggtctcccggcccgggcrggggcgttgggaggggmtgttgacccaccaccctccccctcactctttcctcagtccacctgctgtcagataccatccaaggggtcaccgccacagtgacaggggtgcggtaccagcagtcrtggctctgcatcatgtgagttgccaggccacttggccccccttcttgtcgcagtggaactgggtgtcccatgtcccctgtgccctgcagaggccagcccacctgtgagtcctggggctctggcggcccaaccaacttgggagaagagggctggagcactgccaaggaacgtcccatttgctcttcttttccctccctagcagaggtcgccaggggtcaaggtcgagggggttctgggtcggggagccccagctcccyggggtgcaactgtgcactgtgtcctccccgcccctgccagctgtaccatgaaggccctacagaagcggcacgtgtgcatcagccgcctggttcgcccacagaactggggggagaattcctgtgaggttcggttcgtcatcctggtgctggccccacccaagatggtgagtgggtagtgccgtgtcctggggaagaagragggccccgggttacccgccctctgcttggggtcccctcccacatgtcctggcctctgaaggcctggtcctcaccctccccttcgcctcggccctgtgggtgtgtmagaaacatgttgctaggcccggcaagtcctcatgtccccggggattgccgaaaagttcgtatttccttgactgaaaggaaacgcttttgaccactatccctattcaaacacgcggccttctctggcctgcccgcccgccagcccttctttgacttggttgactttgcratttgctrgctgagggtccctgctccttcctgggccacacaccccctggccgggacaccatgctttttgtgggagccggaactgatacaatttcgggagtcttttaaggaaaaggatttaacaagtctcaacagatgattgccaggacccctcccaaggccttggcagcgccttcagcttcagcttcccttagcttcttgtgctcctgcccctggccttctgtgtgcaaatggggttctcagggatctcagacatggcgggaacctccacaaatgcaactgtgctggtgtgagaggaagggcagcccctgggttggaaggagtggcccccagcagggtgcccacacagaaggagcaatagcccagagctgagttaaagcctggtgccttgaggcagatcccccagcccgacactgggctcctcctcaggagcatggactagttcttttggggttttgtatttgtttatttgtttgttttwtttatttatctttgagacagagtctcactctgtcacccaggctggaatgttgaggtgtgatctcagctcactgcaacctctgcctcccaggttcaagcgattctcccgcctcagcctcccaagtagctgtgactacaggcacccgccaccaccaaaaactacagccagctaattattttgtatttttagtagagatggggtttcaccatgttggccaggctggtcttgaactcttgacctcaagtgatctgcctgccttagcctcccaaaaaagttggtattatgggcgtgagccaccatgccctgccaggcacgggcctcttctacagcaaacatgcacagtgccccgggactagagctttgagcaacagacgggcagacmctgcccctaggtgagcaggttgctgtgatgagggctggacactgagttcgtgagttcatggttcacggacgggcttcaccttggccgggcgagagagagagtgcctgacgggcttggaccctctctgaaagtcaaaccagcagacagtgcaaataccactggggaaacgtagctggggaaacatttttctccactgtggtttcattatctgtgatcacacagacttttgttgcttaggacaaaagtaayatcttgagtttataagaaatcatgagtttataacaaaaatatagatcgatggtagttgcggtgatctgctgacctggttgaaatcatggcagagtacactaatgcctgaactttgtggaataaaacctgctaccagcatctgggcacagtggctcgtgcctgtaatcccagcactttgggaggcctagacagatggattgcttgaggccaggagtttgagaccagcctggtcaacatagtgagacctcgtctctacaaaaagttaaaaattaaaaattgcctggcatggtggtgcgtgcctgtggtcccagctactcaggggactgatgtgggagaatcacttgagcccgggaggtcgaggctacgataagccgtgagtgtgccactgcactcagcctgggtgacagtgagaccctgtctcaaaaaaacacaaaaaacaaacagacaaaaaacctgctgccagttcatggggagagcaccttcacctgctcggcccgggcagggcctcctctgttycwaggggtgactcccatcctccacccctagaaaagcactaagactgcgatggaggtggcgcgcacgtttgccaccatgttctcggatatcgccttccgccagaagctcctggagacccgcacagaggaggaattcaaggaggccttggtgcatcagagacagctgctcaccatggtgagccacggtccagtggcgccgagaacgaaggaacgcagcacagtctccctccctgcccacagacacccagaggtacagggtagaggccggcgggggccgscagggtcggcgggggcatgggccggacagggctaacaggcgctctgtcctctcctccagcccccaaagtgcaaggactttgtcccttttgggaagggcatccgggaggacatcgcacgcaggttccccttgtaccccttggacttcactgatggtacgtggcctctgctttccaggccttgggcccacacgtgtgcctgtcctgcatccccagcaaaccctctcycccmtcccccattcctaggcattattgggaaaaacaaggctgtgggcaaatacatcaccaccaccctgttcctctacttcgcctgcctcctgcccaccatcgctttcgggtctctcaatgacgagaacacagacggggccatcggtgaggggctggcggtgggcggtgggtgggggtatgctgggctgggccctgggctgcggcgcccacctgacctccgcacccccacagacgtgcagaagaccatagccgggcagagcatcgggggcctgctctacgcgctcttctctgggcagccattggtgattctgctgaccaccgcgcccctggcgctctacatccagggtgcagtgggggctgaggcgggagatggtgcctgagacccctggttcctgccgggccctgacccgccctgccccctgcctgcagtgattcgtgtcatctgtgatgactatgacctggacttcaactccttctacgcatggacrggcctgtggaatagtttcttccttgcgctttatgcctttttcaacctcagcctggtcatgagtctcttcaagaggtgactggcccttccgtgagctgctgggaccctcaaggcttgggatctggttcagccccctgtaaccccagggtggtgggggtgcccccaccatatkgctgccccaaggggctggggtgggctcaggcaaggcctggggccctggccttcttcctggcagggggaggcaggggactgtgcaggggctcagggaggcctcccccacctgccccctgaccacacccactctgatgaggctcatggcctcctggcaggtcgacggaggagatcatcgccctcttcatttccatcacgtttgtgctggatgccgtcaagggcacggttaaaagtgagtgcggctgggggccacctgctgaacagggcgctcagccgagatgggaggttctgcactgcccctggctgggggcacataggactggctcaagctgagtgtgtgcccgtgatcaagggtgcggtgctctgggagccttgggctggcagagggcagagccctccacgctggagggtgacggggccgccccaggtgggaccagccgtgggggcagaggcactgggccgactgtgatggggtgtcagagatgggacagggacagtgggcaggagtgtgggtgcatgggcacgtcggcagggtcccctcaccttccccctggagccctttctccctgagatcccctccctccagggcctccccctgccacacgctggagagggctgaggcctgtgggtgtgtgtccacagtcttctggaagtactactatgggcattacttggacgactatcacacaaaaaggacttcatcccttgtcagcctgtcaggcctcggcgccagcctcaacgccagcctccacactgccctcaaygccagcttcctcgccagccccacggagctgccctcggccacacactcaggccaggcgaccgccgtgctcagcctcctcatcatgctgggcacgctctggctgggctacaccctctaccaattcaagaagaggtgaggggctgcatggggaggggaggggccgcatgggtcaaaggctgtgctcatgcacctgctgtccccagcccctacctgcacccctgcgtgcgagagatcctgtccgactgcgccctgcccatcgcggtgctcgccttctccctcatcagctcccatggcttccgggaaatcgagagtgagttggggccgggcggtgggtgacgtggggtagctccccaggcgctgcaggcatagcagtagcctgtcccctactgcagtgagcaagttccgctacaaccccagcgagagcccctttgcgatggcgcagatccagtcgctgtccctgagggccgtcagcggtgccatgggcctcggcttcctgctgtccatgctcttcttcatcgagcagaacttggtggccgccttggtgaatgcaccggagaacaggtgtggagggtgggtgagggtggggtgggcggggcccgggcctctgctgtggggctctgtccacgagtgcccgtctgctgcaggctggtgaagggcactgcctaccactgggacctcctgctcctcgccatcatcaacacagggctgtctctgtttgggctgccttggatccatgccgcctacccccactccccgctgcacgtgcgagccctggccttagtggaggagcgtgtggagaacggacacatctatgacacgtgagtgtgaggctggcaagagccgtggaccctgaggagtggggagcctctggccacatgggacatagggaggagtgaggccctgtggacaggggcgcagaggtgacactcgyggctcgggccaccgcaggattgtgaacgtgaaggagacgcggctgacctcgctgggcgccagcgtcctggtgggcctgtccctgttgctgctgccggtcccgcttcagtggatccccaagcccgtgctctatggcctcttcctctacatcgcgctcacctccctcgatggcaaccagctcgtccagcgcgtggccctgctgctcaaggagcaggtgagcgcttggccctgcgagggagtggcgtgggtggggacacagccccatgcctgcccacacccggtccctgcygcccacagackgcgtaccccccgacacactacatccggagggtgccccagaggaagatccactacttcacgggcctgcaggtgcttcagctgctgctgctgtgtgccttcggcatragctccctgccctacatgaagatgatctttcccctcatcatgatcgccatgatccccatccggtacaggcgggtgggcagtgggcaggaggggcccagtctaggtgtggagaatgggcgggctggggcagcggctgggaggaggggtcccacctaggggcggagaatgggcgggttggggtgggtgcccaggaggaggggtcctgcctaggggtggagagtgggcgggctggggaggctggcgggcaggaggagcccagcctagaggtggagagtgggcgggctggggtgggtggtgggcaggaggggctccagtctaggagtggagagtgggtgggctgggggtaggcgggcggggaggagaggcctagcctggccctgtgggtgggctggggtgggctgggatgggtgtccactgccttctctctgacccaggctcatcctcctgtccctccctccccacagctatatcctgctgccccgaatcattgaagccaagtacttggatgtcatggacgctgagcacaggccttgactggcagaccctgcccacgccccattcgccagccctccacgtcctcccaggctggctctggagctgtgaggggaggtgtaggtgtgtgggtgactgctctgtgctgcgccttctcatggctgactcaggcctggggcatctgggcattgtaggggtgcagtggtatgtgcccmcccctctcccattatcctttagctttaggccaagagcgttgctcagggcagcttctgcccagggtgggtgggactgagcaggatggattttcttttgataaaagagtcgatgcctgaaagagaaaccatttccttgattgtgtaaggaacttgctggacgcacattagagaataaagctcctgtttctaggctcctatgtgccacctgtgtccctgctactgccactccacccccactctggggaggggaagccctccctggggaagtggaatgcaagggacagagtttgtggagtgccacctgtggtctgtcacctccaacgtcgcacagtgggtgctggcccaacagtgaaacatggaagatccaggaggccttcgcatggccatttctccagggacctgcagggaaagcgttctgggaacagcatgtgcaagggtccrgaggagcgagggcttggggccactgaggcgctgtggctggtgaagagcagtggggcgggagggaccatcmgggtgacagcaaagggccctgtgactctcagatgaaagctgcctgccgggaggccgaggcttcgtgtggagcacttgtgaaccatcccatctgttgtgcggatcctggattttacagggcaggggcagcactggtggcgatggagggaggtgggaggactgccgacggcaggacacggggtgggaatggtttgacggagggagaaggtgcagtgtttctggcttgctcatttgttggtgggtcagggtctcccaatggcagccgacaacagggaatatggctctgaggctcaggggagtgccgggtgcgcagcatcagtggtcagcaggaacacctggggctcacatcacctcctggactggcttgacacatgccccatggactaagttggccgacagaagagattggctgcatctaaaactgaaaatatatctgaaatatgcaaagaattcctgcaaaccagcaaaggacagcagccccaacagaagaggcagaggccgtgaacaggggaagaaggaggcccaaccgtaacaggagtagcgagaggtgctcagaccccttggtaattagagaaacgtaagcccacatgagacgccaccttacactgggtagcctggtgctgagtgggagatcaggagcccccagggccccgagaaccaatccaggtgggtatgagcatgctctccaccctgctgtctggggacgggtagcgagtgtggagaaaccaactcaaaacgttttcctccgctctcactgtgcacaacagtcaacccagaagacttctgtgaccacgcgagggatttgtcacgggacagctgctgggtgcccaccaattcaattcaattcaacctaactgctgcctgccaggaggtagcttcagaaaccccaagttgagggctcagtcccacgagaccacccctaacttcccaccagtctgaggtctgggcctgcagaacttgacacactgtcttcaacttggggttcccacgactcctcttttaggttcaattaatttgctagagtggttcacaagtcagggaaacatttacttatatttagcaggttttaataattttgttgttgttgagacagcgtctcactctcagtgtgcaagggcgtgatctcggctcactgcaacctccgcctcctgggctcaagcgattctcatgccccagcctcccaaatagctgggattataggtgcctgccactatgcctggctaatttttgtatttttagtagagacggggtttcaccatgttggccaggctggtcttgaactcctgacctcaagtgatctgcctgccttggcctcccaaagtgctgggattacaggcatgagccaccaagcccagcctaaattttttatttttttattttttaagggttgggcattgatggagttcccagtgatgaataagagctgaatgggcccagggcctcagccccaccctactggcttactaaaaaggctattacggagaattcagatgaagagatgcacggggcgaggtgtgggggaaggggcacagagcttgtgtgccctccccggggtgtcaccctccaggaacccccacatggtcggctattcagaagctccccaaaccctggccttttgggtttttatggaggtctcattatgcaggcatgattgaataaaccactggccactggttatcaactgaaccttcagccctgcccctccctggaggtgtggcggggggtggagaccgaaagtcccagtcctctagtcctgtcttggtctttccataaccaagctacctagatgctgccagccacctcattagcacacaaaaagacatcagtgtggagtttctgaggattttaaagttgtttgctaggaaaggggtcaaagaccaaatacacatgttttttttaatgagacagggtctcacactgttgcccaggctggagtgcagtggcgcaatcacggctcactgcagcctccatttccctaggctcgggatcctcccacctcggaatcctgagtagctgtgtccacaggcacgcaccaccatgcccagcaaatatttgtatttttgcagagacaaggttttgccatgttgcacaggctggttatgaagtcctgggctcaagcgatcctcccaccttggccttccaaagtgctgggattacaggtgtgagccaccttgcctggaaccagatatatacttcacagtatcacaggtagctaaagtaaaaaaaatggccagaaagtgttgtgtgcacccaggacaaaattctggaggagctgaacaggaaacacagagaggtgccctgccccaagcctatgtacccaccccacccaggcagcatgtgattcttctttggagtcccccatcagtagcctgggtgttccctgcacaggggggctacatccatgatcaactggcaaggagcaggcaggcccccagcaccccatgtctgaggcccagccagacatctcccacccacaaggaggctcaggaggctgggcagggacgcagcacctcctggggatttaacccagccggggcttgcaggcaagaggggagtgaaggaatgacactctgtcctcacccagggccgtcctgctggatggagtcacagggacggcaggggcctctccagagctgcctgtgggcacagaagcaagcctgggggtgccccaccagcctgagcccatcacgccccccttgaatatccttggggttgagcactctgacaacggagccacctggggaagtcccttccagggaatggcttcgccagggcacagagtaagggcgtgtggcataagcagggcctcccgaggggcctgcagcccgcaggctgaactgtggcgatcacgccgagtggggtcgaggactccagcccctccccaccataaaaatgaactggccattgtaattgtaaaccaacattttcgcggctctgatgtgtaacagcataaggcaaaagcactgggcgtgccacactacccagcccccaacccagcaaggcttcatggaggccctggcactacctgcgggtggggggcagcatggatccagggtggaggtcagcccgcaatccatgccattgaatgaggcaagaactcgagtggagacgtaacactccagctcacagtggcatccgaatgccttccacacggtgctgcccgtgtccccatccccacccccacccaaaaaacttcctgcacctgccaaaggagactgagacagacacctgcctggggcagggttcaaaacagatatagctggtttattttggaaacaagtctcatccagaaatgttatttactgcatttaaaaaccatggaaggcgatttgcatggttcctccccacgccctcactcccaccaagtacagctttaccacccaaggtcctttcaggaccccaggcctggcggctgtaggagagagcagtgaatcctaagggcaagagaatggcgtccacttgccagagtttctcagagcagagccagctgctcctccagacaggccggtgaggctactcgacaccctcacaaaggggaaaccctgaaggaagtacttcagggggtgcctgcccgatgcgggaggttttgggctagccctccccagatccccggcctgaggggcctcctccagctgcagaagtcaagctgccaaactgccaaagtactcctgcagctccagcagggcccggaagcgatgggagacagcgttcttctccgccttaggcatctctgcgtacctgaggggtgacagtagcagctcagggagcccagattcaggaaggaagtgcaccccctccctaccctacctcatctcatccctggagaccaaagctcacagaccccaaggaaaggggagtggggcccagcagctcctggcagccagtgaatttttaaaaatcggataaagttttcaattcccctgtaggcagaaacccccatgaatgagcatggaggggtattaaacttgctctagtgtgcccaaaagtcattaagggaagctggggacagggggggatgagctgcatgtttgatcagctttgtcatctgttgacaggaagcagtggggcctgacagagcaaacacagcagtctcctctcatgcgctgagggcgggggagcacttgaacagctggccaggggcccgacctccatgccagcaccgcagtgaggtgagaatcccataccccgcccgtggcctgcagactgctctgtgcaagacggcggccagtagccactagccaggtgtggctatttaaatgaattaacgctgaacagaaatattccgtttctgggtctcaccacacgcaagtgctccacagccccatatggctagtggctggttccacaatgtcctcacccctgctggggctattgtggggcctcacactgcgctccctaagggcccctccagcttggaaagcctgattccaacaatggcccgtgccttgtgtgaacaaggggcgatttgtgcgaactacagagaacaactggtacttggagggcataaaatagtgcccaccagaggctgcaaaagcctggacattttcccaacctagatgggggtcagaaaatgatgccataaaactgtcagatgtggccaggcgcggtggctcacgcctgtaatcccagcactttgggaggccgaggtgggcggatcacctgaggtcagtttgagaccagcctggccaacatggtgaaaccccgtctctaacaaaaataacaaaaattagctgagcacggtggtgcgtgcctgtaatctcagctgagacaggagaattgcttgaacctgggaggcagagggtgcagtgagttgagatcacgccgttgcactccagcctgggcaacaagagtgaaactccatctcaaaaaaaaaaaaaaaaaagtcagatgtacagcttacaagccaaggccagaaaggcgaaaccactggctacacagctgatgtggggtgacctggagccttagagcccaggactctcagtgccatctggctgcctccccaaccatggactgggccacccagattcctagtgtccaccccagcagagctgcctgtggctggaacagcaccctgggagcctcccctgcccatatccgcatgcctgcacttgggcggggcactggcccaacccaaaccatggctgtaccaaccccacaccccagggaagaaaagcagggctccttacgtctgctcatatccatcaggctgaaagcaggggtcccagccaaagtcctggcagcctctgggtgccacgatccggccctgccacaggaaaggggggacaggtgtgtaactgggtccagaggacaagcacgaggagggcagtggccagtatgagtttggtgagtctgtgaatttgatttgacccaacttacgcaaaatgtagttgcaaggcccctacagcacctgcaaatgtttgctgaatacaataaaaagcagagcggggcagctcttccctcacacacagggaggaggcatggacccacaggaccaccagcacctccggggccacgcgccctccgccacacccgggacaaattgggacatcactgaagaacaatgaggctactttgaaagatagacagaaagaaagatagacagaaaacgttttctcctgataggaagctaagtaccctgaactccgtggacaagccagatgccggctactatgacagcattcctgaaaatacaaggaagactttaacaataagatgaaacaccgcaacaggaagcaggtacccaactccccacttcatgaacacattagtgagtacaatacatactggctgtagtagggaaattccacagtgaaaatgttagaaaaagaacaaattgtaatccagtgacatgaaatgtcatgttgttatcaaagtaaaaaaaaaaaaaaaagaaaagaaaaagaaaatctggccaggcgcggtggctcatgcctgtaatcccaggactttgggaggctgaggtgggaagatcacttgagcccaggaaattgagaccagcctgagccacatggcaaaggcgaaaccccatctctacaaaaaatacaaaaattagcctagcctggtggtgtaagcctgtagtcccagctacctggtgggaagactgcttgagcccaagaggtcgaggctg

SEQ ID NO: 98103 - DNA, 26509 bp, Homo sapiens
gtggactgcctgactggtctggcctcaggatcccaaaccttttttcggcaaaaggctctggttcctgagaaggccactcagtcctggcaccaaagtgacatcagtccctccctacactacaggcaaatgtaggtgtccctagtgattacaccccactggtctgcctcagacatatccagtgggtgtcatcctgatcccccacacatgacccccactccatggctatggctgattgaacaggggcaaactcttgattcaagcaaagccagtcggagctgatatctggtagaagcctcattgttccatcccccagcagggaagaaaggggaaagatatgaacaggaatagggatcagcatccagagagaacaaggacaagtcagcttcttgagagaacttcaggtcctgtgggacacgataacactatattcccacaggagtcatctggtggcttacatgagctccctgtgtgtttctgttacttgctagccacaaagtccctgcaaacagaaactttagatccactgcctcctttactcctcctctctatagcgctgtgaagcaaatgtcctgcatcatccccatttcacacacgcgaaaagaggttagaacatttcaggacggtggtgaggcacggactgctcagtgtggaactccgtcccacgccctctctgggtcctgctagccctggcccagcagcgggatgtggataagtcccagaagagtgtcgggacactgggttggggtctacttcaataggtgaccttcggggcggttgttaagagccccgctactcctccgggtcccgcagtcgctgaccacacaagccctgtgtcgggatctgtcgagaccctcgttccctcgccaaccccggggcgccccgattctgcagccactcccttcttgcgccccagcttttccacacagccgggtcaggacccattcttccgggctgaattctgttctctctccatgcctcctcccacgtgcttccctcctcccggaagccccttctccgccctattcccagccgcctcccagttagcccccaacaccctcccggcacctcctccagcttcttggcgttccccgttacaaacacgatcttcttccccaccaatgaggccgccatggtgatccccggttacccagctgagccaccgaaaactccttggcgtccagtgacagaaaacttccggctggtggcggaagtgaacggctcagtttccggccaggggtcccggggaaagccgacccggaccccaaggcgcgtatcgggcgagtgggctcgcggtggcggcctagcccacagcgtccgatttgctgggggcctcccgagcctggagactgagtgacccacccctcctgcctaagggacgctatcttcaagaaccggaagagaccactcccacccccaccccgcccctgctttcgctcttctctgcaatggggtctccgaaaggagaagactgcagccctgtgaccctggaggtttgcgctctcctatgctgtctcaaaaaactgcctccttctaggcaagggcttccaaaccctcatcctgatctcaccttcagccttacccgccagctatgatccactcgactgtgaacttaaactcggcatagcctaaaacaagcccaaacttctcacccgttttcactcctaggcttgagagctcagtatgtagagttcctcacttcctcatccctccagcctctcaaatctatcaccccttctccgtggccaccgtttcagccagatctttgcattccaaacacaacagaaagtaggaagtgccctctcaaaggtgggtctgctgaacctctgctgatactctctttgcagcaagtcatctgacctccctcctccagagactcagccctctgccccccgcctggacccctgtgtcagtacctcttgaatggccacttctgcccatggacaagaaagggagggagtctgagttcttaccaagctcctcaggccattctgatgctcatcaaagtgtgggaaagcccggtggctcacgcctgtaatcccagcactttgggaggctgaggcgagtggatcacccgaggtcaggagtttgaaaccagcctgaccaacatggagaaaccccatctctaccaaaaagtacaaaattagctgggcatggtggtgcatgcctgtaatcccagttcagagaattcaggattcaggagaatcgcctgaattcgggaggtgggggttgcagtgagcggagatcgtgccatcggactccagcctgggcaacaagagcaaaactgcgtctgaaaaagaaaaaaaatgtgtgggaaccactgctttgggtggtgacctgttttcttttattgaagtagaaacactaaccattatgcagagtccctagaggagtggccatggggatttgggggcagaggagggcttgggggacatcagttaccccgaggagcctgaaaagaagaaaaacagcccaccttacatggatgcctttcttggatcttagccagctcaagccccagctcaggaaaaccttccctgagctccctttcatctgcttgcatagcactgacctctgcactgcaaatagatattcatttgtgtgattctgttttctcttctaaaaatcctaatggtaaaaaccatatctgtttttgctcacctctctttttcttttttttttttttttttgagacggagtcttgctctagtcacctggcctggagtgcaatggcatgatcttggctcactgcaacctctgtctcctgggttgaagcgattctcctgcctcagcctcctgagtagctgggactacaagcaccccccacgacgcccagctaatttctgcatttttagtagagacggggtttcaccatgttggccaggctggtctcgaactcctgacgtcgtgatatgcccacctcggcctccctaagtgctgggattacaggcatcagccactgtgttttgttgttgttgttgttgttgttttgagatggagtcttgctcttgtcgcccaggcttgagtgcagtggcacgatctcggctcacttcaacctccgactcccgggttcaagggattctcctgcctcagcctcctgagtagctgggattacagacatgcaccaccacacccagtgaatttttgtacttttagtagaggtggggtttcaccatattgaccaggctggtctcaaactcctgacctcaggagatccctccacctcagcctcccaaagtgctgagattacaggcttgagccacggtgcccagcctcacctctcattcttaaatcccagctcctggtacatagtaggtgttctgtaatgtaagataactagcttgggcacagtggatcacttgatcccaggagttcaagacaagcctagacaacatggtgaaacccagtctctacaaaaaatacaaaaaattagttgggcttgggggcacacacctgtagtcacagctgtttaggaggctgaggtgggaggatcacctgagcctgggaagtcgaggctgcagtgagccaagagtgccactgtactctagcctgggtgatgtgagtgagaccctgtctcaaaaaaccaacaaacaaaaagatcacaactgacatctataattacaagtccatagataactttctttttcattcttttatttatttattttttttgagatggagtcttgctctgttgcccaggctgaagtacagtggtgtggtcccggctcactgcaacctctgcatattgggttcgagcagttctcccacctcagcctcctgagtagctgggactccaggcatgcaccaccatgcctggttaatttttgtatctttcttcttcttttttttttttttttgagacagtctcactctgtcgcccaggctggagtgcagtggcgcgatctcagctcactgcaagctccgcctcccgggtccccaccattctcctgcctcagcctcccaagtagctgggactacaggcgcccaccaccacgcctggctaatttttttgtatttttagtagagacggggtttcaccgtgttagccaggatggttttgatctcctgacctcgtgatccgcctgcctcagcctcccgaagtgctgggattatgggcatgagccaccacacccggctaattttgtatttttagtagagatggggtttctccatgttggtcaggctggtctcaaattcccgacctcaggtgatccacccacctcgacctcccaaagtgttggttgggattgtaggcgtgagccacggtgcccagcttttttttttttttttttttttttgagactgagtctcactctgttgcccaggctggagtgcaatagtgtgatctcggctcactgcaacctctgcctcccggcttcgagagattctcctgcctcagcctcccaagtagctgggattacaggcacccaccaccacgccaagctaattttgtatttttagtagagacagggtttcactgtgtttgtcaggctggtctcaaactcctgagttcaggtgatccacccacctcagcctcccaaagtgctgggattacaggtgtgagccacctcgcccagcccatattttttctttttctttttctttctttctttcttttttttttttttttgagacagagtcttgctctgtcgctcaggctggtgtgcagtggtgcaatcttggctcactgcaacgtccgccccctgggttcaagtgattctcctgcctcagcctcccgagtagctgggattacaggcatgtgccaccacgccccactcattgtttgtatttttagtagagacaggatttcatcacgtcagctaggctggttttgaacacttgacctgaagtgatccgcccacctcggcctcccaaagtgctaggattacaggggagagccacctcatctggcccgtattttttcaaatccctttctcaccattgttcattggtcctgaatttatttttatttatttttattttctgagacagggtctcactctatcacccaggctggagtgcactggcatgatcatggctcactgcagcctcgacctccctgggctcaggtgatcttcccacctcatcctcccaagtacctggaatcacaggtgcatgccaccacacctggctaatttttgtattttgtagagacagggtttcatcatgttgcccaggctggtcttgaactcctaggctcacctctacctagacttcccaaagtattgggttaacagacgagcctctgtgcctggctcctgaaataaatctttacttctgttatcatgtatacaaaaagcttaataaattccagtactgccctcccctcccctccccttcccctcaaaagaaagaaagaaagaaagaaattcagtgtcacagatatagcaaaaccccaacccgcttccctcctcctagaggtaatcgctatcctgaagttggtgtgcatcagtcccaagcctcttttcgtactttttccacggttgtttccataaacactatgtgggattgtttagtgatttttaaaacatatatagtccgggcgcggtggctcacgcctgtaatcccagcactttgggaggccaaggtgggtggatcacaaggtcaggagttcgagaccagcctggccaacacggtgaaacccccatctctactaaaaatacaaaaattagccgggcgtggtggcgggcgcctgtaatcccagctactcgggagtctgaggcaggagaatcgcttgaacctgggaggtggaggttgcagtgagccgagatcgcaccaccgcactccagcctgtgcgacagagactccgtctcaaaaaaaaaaaacatacatagatgttttctactggacataccgtctgctataatttcctcttaacattgtgggtttctttacaccccccaaactcattttaatgtctgacattaaagcctctctgtgatgtgccgctgggcggggctccgagtagtgggcggagtctagattgggaaataggggcggggcctatgagatcccggcytcagggtggacgcagtggttctgcactgaggccctcgtcatggtggcgcctgtgtggtacttggtagcggcggctctgctagtcggctttatcctcttcctgactcgcagccggggccgggcggcatcaggtaggagawgccgctgcaccagggttggtggtaccgggttttctggccttctgagccttwgtggaccgtcgcgccgcggctcctgcgcgtgcgcacctgggcgggcgggacgcatgcgcgtccgtgcgctagtcgtgtgccgggtggggcttccgcagtgccctacctggaatcggtggccgcgccgctacccctttctctcgactccaagccagagtctggcctcatccctctcttcacccccgggaactccatacctccaaaggcctgaggccctggccggcgcacactcccatccgtcaccgtcggggccctttccctctgcacctgttagggaggccgcaggggttttccattcctcccagcctggctccagagcaggtgccaggaagggggcatctgaatattttctgcctgtcccccacgagctggagaagcgcgaggcggctccaggaaattcctgaagctctctcccttcccgccaaggagagggcccactctccctccccaatccgctccccgatcagaaggccatgtcattggccagggcacagaacagatacacccatcctccctctttccccccatttctggtcagcgggcgggtttgtatatgtgttttcctgctccctgggcccacaagctacctctgagcacctgcgcgctcccaggagcggaagggacacgctgagggaaggcggagatccagcaggtcttcccgggggaggctcggccaccgccgggaagtgtactctctggctggggagccagataaaaccacaggtggtgttaggcgagaaatcagtggattcctgcagggggtactcgatgagagctggggacatcaggataggggcctcctgacaggccagctggaaaggtggagccgggaggggagaggagtattcacacaggcccgagggaagggctgagcccccgcctgggaccaagctgtgggcctggtggaaaaggccttgccagtcagactgagaagtcggggccttgtgctgtgggcagcaggccgctaagcagaggaggtgaggcttccrggctgccgctcctcctgccatgggccgggctgggcttataggcagcattgtcatttctgtcttccctacagccggccaagagccactgcacaatgaggagctggcaggagcaggccgggtggcccagcctgggcccctggagcctgaggagccgagagctggaggcaggcctcggcgccggagggacctgggcagccgcctacaggcccagcgtcgagcccagcgggtggcctgggcagaagcagatgagaaygaggaggaagctgtcatcctaggtgagaggggcccagcctggtggggagagggtttgggttggagggggggataaaagggcccccaaagctaagtgggggagtagggtatgaagcctcagggtaggagggacgtctgggagccacacggtagagtagggggggacttgggacctggcatttgttccactgggtcaaccccccctaccttcatcttggctctcagtgtccaagcagagggcaagggtcttcagtttgattcagaatgttcctcaattcaccccttctatcctcgcacccttcctgttatgggcacacttattccctgaggatttcaccctagaggcagagtgcctggccaagagtttctgcagttcctggagtggggtcacccacaaccccaggaaaacagtttaaagatagagacattctgttgacacagaggccyccatatccctgcttccaggagaccaggagarccctcaggattgtcttctccagtacttggcagctggcttragcctgaggagggggygtctgggcgtttctcagaaactgggggcatttgaggcttttgccttgtacctttggggattatccctttagctcaagaagaggccctttctttgccgtaccttctggctcagacttgggttcagagacccttgctgcacaggcatcagtgggtctttaacttgcagctggccctgaggtagtcatagtgttgggactgtcatttcagccagggtttgatgggcaaagggataatcctggccagggactaagcccagaatcctcagcaactcctgacgattgtgaggaggatttcagatttgaggcgggataaatttcctcatgggacttcccttgcctgggggtttggcaccagagacagaagccagagaactctggagttcattagccaggatatttaaggtacattaggtgagaccagcattcagaaaggtaaaaaaccctctctgggccgggcgtggtggctcacacctgtaattccagcactttgggaggccaaggagggtggatcacgaggtcaggagatcgagaccatcctggctaacaatacaaaaaattagccgggcgtgatggtatgtgcctgtagttccagctacttgggaggctgaggcaggagaatgccatgaacccgggaggtggagcttgcagtgagccgagatcgcgccactgcactccagcctgggcgacagagcgagactccgtctccaaaaacaaataaacaaacaaaaaaaaccctctctgggctgggcatggtggctcacgcctgtaatcccagcactttgggaggccgaggcgggtggatcacgaggtcaggagattgagaccatcctggctaacatggtgaaacccggtctctactaaaaataaaaataaaaaaattaggggggcatggtggctggcgcctgtagttccagctactcggaaggctgaggcaggagaatggcgtgaacccaggaggtggtgcttgcagcgagccgagatcgcgccactgcactccaccctgggcaacagagcgagactccgtctcaaaaaaaaaaaaaccaaaaaaaacaaccctctctcctaatgcctcccctatgctgtattctggcttatcagccacagtaccttaaatatccaggcagcgctatctgtgaccccgagacacttgcatattttaatctgatacctccttctttgtggctatgcaatatctaaagttctcatctttttttttttttttttgagacagagtcttgctctgtcactcaggctggagtgcagtggcgtgatctcggctcacaccacttggcagcagatctcggcaagctctgcctgctgggttcatgccattctcctgcttcagcgtccctagtagctggggctacgggtggccaccaccacacctggctaattttttttttttttttttttttgagacagagtctcgctctgtcgcccaggctggatggagtgcagtggcgcgatctccgctcactgcaagttccgcctcctgggttcacaccattcccctgcctcagcctcccgagtagctgggactacaggcacccgccaccatgcccggctaattatttttrtatwtttttttcccctgagayagtgtctcactctgtcgcccaggttggagtgcagtggcgtgatctcagctcactgsaagttccggctcctgggttcacattattctcctgcctcagcctcctgagtagctgggactacaggtgcccgccaccacacccagctaattttttgtatttttagtagagatgaggtttcaccatgttagccaggatgatctcgatctcctracctcgtgatccgcccacctttgcctcccaaagttctgggattacaggcatgagccaccgtgcccagcccttttttgtacttttagtagagatggggtttcaccatgattgccaggatggtctcaatctcctgaccttgtgatccacccacctcggcctcccaaagtgctgggattacaggcttcagccaccgtgcccggcctaaagttctcatcttttcccttgccctatgggcccctcaccgttctcccatccctacatattcatgcacacacacacacgcactcatggcagatgcctctggagggcagagctgggctagtgacatttgcaggtgggtggaaggggatccccctgttaggggagggacgaggggttggggatccatsgtcatcagtcctctctggtcagaacctgaactgtctttctttgaccatacccagcccaggaggaggaaggtgtcgagaagccagcggaaactcacctgtcggggaaaattggagctaagaaactgcggaagctggaggagaaacaagcgcgaaaggcccagcgtgaggcaagccggagggakggggtgcagctctgggaagtgcgaaagggcactgccttcctttttccctaaggcrgactgagggcttgttgcctgctrggctggtgtttgctgcttccctggctctgtctcctgccgcctgggtctgtgccctggcccaggcattgccttccctagtctgtctgggcggtgggcacactctagccgggggtgagggatgtgcccctatgaagacctctctccaggcagaggaggctgaacgtgaggagcggaaacgactcragtcccagcgcgaagctgagtggaagaaggaggaggagcggcttckcctggaggaggagcagaaggtgaggccagcccytaccctgacctctgacycttgaccaggcaaggcagmcttgcttcttatgcagctccctggcacctccaacctagaaggtgggccatagacctggcacaagggcaggtcctggtttatttggtccctaggctccaccacagcctagaaaagccactgctgaaaagcagagcctggagtggggatttttgtgcacgtgactattgaactttcggggagcatgtgaggaacgygaggcgaggaggatagctgggcagagaaagccaggagaggaggagaagatggcagagaggtgatgggggtctggatcctgaaggccttgaggctgaggaagatcattgtaagagatggtkcttacatcgagggcctggcatacagaaggtgctcagggaatggggtccactgcagtagtgactaatgaacatttgtttgccagatgctttctttgttctgagaaccaggtttcccaaaaagagaacaccataaagatgtggggtacatagggttagagccagggctgccctagctgggaagacctgtgacctctgactgacctgttgtcccaggatcctggatggcaggaagcctggatgtgggtgctgtggctgataagccagaatacagcatgggggaggcattagcagagagggttttttcctttctgaatattggtcccgcttaatgtaccttaaatatcctggctcttctcccctgtaaccagtttcccttatccttaacrtcctacctcactttaataccttcctcacaactaatattgacacattattgttaactaaactctaacattattcagatttttctttattgattgattaagacagggtcttgctccgttgcccaggctggagtgcaatggcacgatcttggctcactgcaacctctgcctcccagcctcaagcaatcctcccacttcagttccccgtccctgcgagtagctgggactataggtgtgcaccaccatgcctggctaattttttttttttttttttttttggtagagattgggtttcaccgtgtttcccaggctgcttttgaattcctagactcaagcaattctcttcccttggcctcccaaagtgctgggattacaggtgtgagccaccacacctgaccccattattcatattttatttgttttttcccagtatcctttttcttttccagggtcccatctaggatgccatgttacatttagtggtcatgtctccttaggctcttctgtgtcatgacagtttatcagaatttctgttttgtttttttttttttttttttgaaacggagtttcactcttgttgcctaggctggagtgcagtggcatcatcttggctcaccacaacctccacctcctgggttcaagcaattctgctgcctcagcctcccaagtagctgggattacaggcatgtgccaccacgcccggctaattttgtatttttagtagagacggggtttctctatgttggtcaggctggtctcgaactcccgacctcaggtgatccacccacctcagcctcccgaagcgctgggattacaggcgtgagccactgcaccaggctttttttttttttttttgagacagagtccctctctgtctccaggctggagtgcagtggcacgatctcggctcactgcaacctctgcctcttgggttcaagtgactctcctgcctcaktctcccgagtaggtgggactacaggtgcaccaccacgctcagctaatttttatatttttagtagagagagggtttcaccatgttggccagtatggtctcaatctcttgaccttgtgatcctcctgccttggyttcccaaagtgctgggattacaggcatgagccactgtgcccggcctttttttttttttttttttttttttaagagagatggagtctcactctcacccaggctggagtgctcactgcaccttcaaactcttgggctcaagcaatcctcctgcctcagcctccctagtagctggggctacaggtgtgcaccactgtgcccagctaagactccttgcttttgatgatcttaaccttttttttttttttttttgagatacagtcttgctctcaaggctggagtgcagtggcgcgatagctcactgcaacctccaccttcagatttcaaatgattctcctgcttcagcctcccaagcagctaggatgacagacgtgcaccaccacacctggctaatttttgtatttttggtagaggcggggtttcaccgtattggccaggctggtcttgaactcttgacttcaggtgatccacccacctcagcctcccaaagtgctgggattacatgtgtgagccactgtgtccagccttaacaattttgaggagtcctgggcaagtagtttgtagaaggtcccttaatttgagtttggttgatgtttttctcatggttagactggggttatggatctgactgaagaagacaataagtgaagttccatcttcaatgcaacataccaaatatgcaagttatccgcttcacttgtccctaatgttgttaaccttggtcgcctggctgcggttttgtttgccagctttctccactgtaatgtgactgtttttttcccctcttcccgtatttctttggaaagaagtcactgtgcacagcccacacttaagggttggggagttagagttcttacataaattatatggaaatctcttacaggagatatgtctctccttccctattcattaaatattcatgcagtctttttttttttttttttttttctgagatggagtctcactctgtcatccaggctggagtccagtggcgcaatctgggctcactgcaacctccgcttcccaggttcaagcgattctgctgcctcagcctctcgagtagctgggattacaggcacccgccaccacacccagctaatttttgtatttttagtagagacgaggtttcaccatgttggccaggatggtcttgaactcctgacctcaggtgatccgcctgcctcagcctcccaaagtggtgggattaccagcgtgagccaccgtgcccgaccagccattttttttatatttgtatagactcatgagtatttattttgtactttgtgttataatccagtaacatgttatttattacgttgttgagattgttccagctttgaccattgggagccctttcagttggctcctgtgtacctttaacacacactcgttttgttttttgagcacttagtttctggcactgcaagatgccccagactcatcttgtatattacttgcctcagctttagctttctgattcttgtttttgtttttgagatggagtctcgctctgtcccccaggctggagtgcagtggcacagtctcggctcactgcaagctctgcctcccaggttcacgccattctcctgcctcagcctcccgagtagctgggactacaggcgcccgccaccatgcctggctaatttttttttttgtattttttagtggagacggggtttcaccgtgttagccaggatggtctcgatctcctgacctcgtgatccgcccgccttggcctcccaaagtgctgggattacaggcgtgagccaccacgcccggctagctttccatttaaaaatttttctgagtgctctggaaaatgtgttgggttgagggaggctgttttaccaggcagtagtggtgatggagcaacatagacagaccagggagttttctggaagttagagaaagaaggggtcaataggacctcatttctgaccagttggctgtgttaattcacagagccagggacctaggaggaggtctaaacgtagaagagtaggtcccagggtctgtctgctgcctgtgagatggcccagtagctgtgtcacatggaccgttgtgtgtttgggagaagagattcgggtggggctacaagtgtggtagtcactggcaaggaaggggttgatgctttgggcatgggcgaggtggcccagagaatgtggaggagagagaagaggcagggctgaatgatgaaggaggcgggaagaatggcccaaggagcaggaggaaatccaggagagggtgggatctggaagccaagggaggaaagaaggatcactgagaggacagacatatgagacctgaaggttgtaccttgagtttggtgagtggagggcatgggtgagactgtggcaggagttgtttcatagaactgggwacacagaagccagactggagtgggctgactgggtgagtgggtggtgaggaaatgcagggttcacatttgcttatgaggtgtggacatgacggggtatgcttggtgagttacacaaggagaggatggggcaggtgattggagggtattgtagagtggggtcatggcagggttttcaacagatttttgctaagatcccctgagcacggagggcgggagaaggggctgagcagcatttgtccaggtgatgatgaaaccgatgacaagaggggcctcggcccatggttcagcttgggggaatggagaaatgggggtcctgaaggagctctgtctctgagaaaaggctgggctatatgctctggtgtcctgcaggrgtagcagcaaccagaacaggtgcctgccctgttctgcccccgatacctgacttttgcctcctrtgtccacaggaggaggaggagaggaaggcccgcgaggagcaggcccagcgggagcatgaggagtacctgaaactgaaggaggcctttgtggtggaggaggaaggcgtaggagagaccatgactgaggaacaggtgggcctgctgcccctgggaagcccctctctgcacccatcagtgcagcctgtgccagacgcaaggctagccaccccatcccagacgcccctggccaggcagtgagaggtgrgtgggcatcagtaccagcaggcyttagtggccagaggccttgtcctcagcagaggctggtgcctccgaaaytctcaccctggaaggctctgctgcttgtgtaggcaagcggtatgtgcaggtggttgggcgggccaaaggcaggctgcaggcaggtggccctcargtgagcaggtggtacttgggtgaatgggtacagaaccctgtggscttgctagggggtgctcaccctgatttctctgcttctctagtcccagagcttcctgacagagttcatcaactacatcaaggtaagaagccactgaacagagcctgagtgtcagctccctgcctggcatgtgcaggttggatgcctccagcgggggctgcaggcagggcattcaggctcatgcaggagtggacaggggggcccagaggggcagagccgcagggtcctggccaggagagtttctctccctccaaccccgaaggtggagaaggacctgggtctgtgtgggaggcgcaarcctttgatcacttcctcacactcagtttgacagtttccctgctcttcagaccccacgctcagtgagtcagtgtgttttcaagtctcttcacatgtgttttctgtcagttctgtcacactgaggctccactgagttgaaacaagcatcctctgccatgtgctcctgactgggaacttgggtctttcagggggaacaggatggtgtttcctttggagtttagggtggggcggcagtgtgtccccttctgtccgcagccactgcgcaggccgcctcgatgctgctccaggttgcataagcacatcctactttgctttgctgctaagcaacttctctcccacgaaggatgccatgaggggagaggttttcaagtgcaactcagaggtgcagaggcggctgagggaaggagtgcagagggagcgggggcggtggtgggggtgctaccaggggctgccaaggacccagggcttgcataatcctcccgccacctctcctgaaagagagcagggtttagacgcctgccagcagcgaggggctgggctcacagccttgagtctggggttcttaagtgggggaaatgctggcagctttgagagggtcctgtctgttcaggctgtgtgcactcccctcycatggagccctctctctaccctggcacacttgattaggggctgtggccgggcaggttatttctcacacttgcctgctgctgtttggaacttgtccccacctacccagtaggcagtaagatggtcctgaagcccctccccaggaagccttcccaggtggaattagaggagggggtcagcttcaacatccccctttactctgcagaaaccagaagaaaggtccccagttctagccctcacttttggtggctccctggaggtaactattctctgggagttctccaaactcttttggagcttagaagtttttccagcttgtccgggcatggtggctcacgcctgcaatcccagcactttgagaggccgaggcgggcagatcacttgaggtcaggagtttgagactagcctgggcaacatgctgaaaccccatctctgctaaaaatacaaaaattagccaggcatggtggtgcacacctgtagtcccagctactcaggaggctgaggcaggagaatcacttgaacccaggaggtggaggttgcagtgaggcaagatggtgccactgcactccagcctgggcgacagagtgagactctgtctcaaaaaaaaaagaaaaaaagtttttccagcctgtgctggctaattcttctagagctgctgtcttgcaaggaaaaggaggacttctgaaattcagtctgtctgctttcctccttgctccaaggggatagaccttttttgccttaagatttcagaactggaggaacatgcctgcacccagcatcgtttatgagaggtgtagggttcactcgatcttgttccattctcctgtctgaccatggctgggctcaggcgatcttcctgcctctgcctcctgagtagctgagattgcaggtgggtgccaccacacctagcttgttttatcaaacgtgttttggccccagcagcacctcaggccaggtcatcagggagcacctggggtgacttcatgttctcgcaccacactgtcactgagagcccgctgcctgatccctgttttgtaggtagagaccagctgaccacgtcactttgtccttgcccatcctgacccagctgcctctcgcttgccttcttgcttgtacatacggctttggcatttcaaacaagtcacatgctatctgcagtcagggaggtgtcaccatgtcagtcctcccccagctcatttgcggtggaggattcacagaaatgcaaaagaactgccttttctcaagtcctgtgctgtgtgttggggtagtgggggcaggtgcctgtgtggacacagcggtggacccttcgctgcgcccttgggaactcaggtttctactgagggtatgaagaagcacttggagcacagaacgtggctgtgctggaaagcactcagcggtattagtgacagtgatttcaagggtgggctcagtgcctcagatggtataaagaggatggataaaaagtgtgggtgtgtcaggttgtgggggaccaggccagtggggcggccagcgaaggcaaggcaggagtgggcccccacagcctctactgagagaccttggcttgctcgggcttttatctgctctccctcttgtccatgtactcacctgtctcaccagccggactgcgagctccagggcggggactatggcttgttcagcatgtgtccctcctaccttctcagggccttgttctagtaggtcctcagcaagcataagtcctggtgacagttatttaaaatagcttttggtgactctcaccgcctccttcctccctatggtgcgtccccttgaacttgtccatgatgttaaaaagagatggctggatgcagaggatggtggctgctgtgctctgattaccactcgtgtgtctcggagtccaggacagggcccatgaggcaggtggttgttttgggtagattccttcctcgcaagaaggggaatgagagggtttatgrttgtgcgggtctctgtcaatgggtgatagtgagtgtgtgtgtgtgtgtgtgtgtgtgtgtcaggggagcaaggctgtcctacaggagtgtgtacagtgtttttccagccaccgagaacagatcagatcagaatgcaaacctggagggtgcccatgcttagagggatttgcccaagctcagcctctcttycttttcctccttctttttgtagcagtccaaggttgtgctcttggaagacctggcttcccaggtgggcctacgcactcaggtaagccctggaacgtggcctgctgtgtgcagtgtggccaggggtctgtggctagcagagaggacctgccctaaagatagagtcttgatgcaccgtctaccttgtccccaaccaagagtgagtagtgcacagaagtctcctggcaccctgggaatcctgcatttktaatggacgaacaggcaggaaagaaaaaaaaaacccaaaccccatcactctgccagcccctgtgaccaaagcagcccaaatcagttaccttgacaactctcatgcacagactgcaccagcctgtgttgcaaacatcactgccccgcttctaacaggaagagatactcttttgggggtcttgcagggcccaggaccagagccccttctacccagggcccttccaaaggcaaagcacagagtcacatttgggcgtggcatgagagggaaataaagagatttggctgtagtgggagggaggtttcagtgctttttctrgggacattggtgcctatctctattctgagagttgttctcctcataggacaccataaatcgcatccaggacctgctggctgaggggactataacaggtgagatgatgagagccaatcactgcagtcctggccttggagagtgtctagccacaggggctgcagggatgtgctgcagaggcaggatgaccacccaagatggggggaggggtgtgcaagsagggrcactgagtagctggatgcagttacaaggaggacatgccagggcctggaggtggcagcagtgggagaggacaggcagggcagyctgattcgactctcctagcaggactggatgcagccaggaaagtccaggcaggcaggaggccggaagggccctgagccagctgtgaaggagtaggtgggcattctcaggccagatggggaacgcccaggaggcctcagccccacaacctgcatgtccccacaggtgtgattgacgaccggggcaagttcatytacataaccccagaggaactggccgccgtggccaacttcatccgacagcggggccgggtgtccatcgccgagcttgcccaagccagcaactccctcatcrcctggggccgggagtcccctgcccaagccccagcctgaccccagtccttccytcttggactcagagttggtgtggcctacctggctatacatcttcatccctccccmccatcctggggaagtgatggtgtggccaggcagttatagattaaaggcctgtgagtactgctgagcttggtgtggcttggtgtggcagaaggcctggcctaggatcctagataagcaggtgaaatttaggcttcagaatatatccgagaggtggggagggtcccttggaagctggtgaagtcctgttcttattatgaatccattcattcaagaaaatagcctgttgcacatttactctgtttctttgtgccctgcaagccctgcccccaagacctagataagatctttctcttcttttgcccccactcaaattagaagtggggagcctcttgggccacatctctgttaactggggaggggaggtctcatgggtcttttttaactgatcaggagccctaagtagggctgagagccagcggggagaagaattaatgagaagcatcaaggatagagtcctagggagcatcagcctttaagaaggagggcggggggtcagtgaaggagagagccatttgcagggcaggtagaaggaaggagaggacctgcttgagctggctataattgtgcagtggagggagggacattgctcatgtgggaaatcacatgaattcagctctacatccttgacaaaaagtttaaatggtgtgggtgattccacccactggtggatgtgagaaccatatgctcagaagtgggtgggatgggagggaggtgtgtacctcctggagggtcggtcactctggttcctgttggctgttcatggcgtgagcatcctgctgtgctgagggtgaggcacatgtttaaatgtgtatttatgcaaagtggtccctaaacagaagccccctacttcctctggtgcctgatggaggaggcagctttctgttccggcccaggaggaaactctccctggatggtgatggggaaacagtacatcaggttccagggcagagccttccttaggagttgccaagggtgtttttgactcattgggtgccataagcattgactgtagaacctaaattccaagaaaggtatgactctgctacttccatcagcaacgggtacttgtcatcacctggagcgtgaagggccacatgtattgtttggaaggccatctggagcctacattctagtaggagagggaagaaacagatgtagccaaccacagtatgaggtggaaacataaaattacaaagggaaaagaagagaatgacttacagttagatcactggtccttagcctggttgctcattggattcacctggggagtttttagtcgtctcatgccagccccgttgcacccaggaccagtcaaatcagaatctgtgagggcatagtcagggagcatgagtaggagattccagtgtgcagccaaagttgagagctagggaacagatgggggtggggtggagaggcaggccaacaagttgcaagtaattcaaatctccattggaaggggcttctcacagagcaaggcggcagctccagggctctctagtcctttccctcagctatcctctgccactgccatgcagatggcaagatggccaaggcagcccctgccccagcatcccatgctcaggacagtacccaaaggccaggagtgggaaaaggcacattccttccttatatcctggaagcacccagatattcttcatgtcccatgggcttagtgtggaggaaaaaaatctatgatcctttgagcattatttagtgctcagttaatacatttattaaatgaatagtttattaaaagtaaacatttttctaaatatatacgaactactttcacaactaaaaaatgaaaaaataaagggaaaaatgaaaataaaatgaaatttaatgcttttttttttttttgaggcagtctcgctctgttgcccaggctgtagtgatctcggcttactacaacctccaccacccaggttcaagcgattctcctgcctcagcctcccgagtagctgagattacaggagcgtgccaccactcccagctaatttttgtatttttagtagagacggggtttcactttgttggccaggctgatctcgaactcctgacctcaggcaatctgcctgcctcagcctcccaaagtgctgggattacaagcgtgagccaccgcgcccagccgtagaccagacatagtattataatgattacattactgatctgtacatgtgacactaaaactgatcataaacacttcacaagctctacttttttttttttcttgagttggagtctcactgtcacctaggcagaagtgcactggcgcaatcttggctcactgcaacctccacctcccacgttcagtgattctcctgcctcatcctcccaaatagctgggattagaggcatgcgccaccacacctggctaatttttgtatttttactagagacggggtttcgccatgttgggcaggctggtctcaaactcctgacttcaagtgatccccccgcctcagcctcccaaagtgctgcattacaggcatgagccactgtgcccagccttgctagctctaattaaattttattgattcacttatttagagagggaatctcgctctgtcgcccaggcaggggtgcagtggcgcaatctcagctcactgaaacctccacttcccgagttcaagtgattctcctgcctcagcctcctgaatagctggaattactggcgccctccaccatgcctggctaattttttgtatttttagtagagacaggattttgccatggttgccaggttggtctcaaactcctgacctcaggtgatccgcccaccttggcctcccaaagtgctgggattataagcgtgaacccctacacctggcctttaatttttatttttgtctgagggtagttttcacttactctggagcgccagggttaccgtgatagctgaggacatagctatgactgatggatgatgattcagaaccaaggactcaagacttcattgtaattctttttcatttttacttatttatttatttattttttatttattttttttgagatggagtcttgctctgtcacccaggctggagtgcagtggcacaatcttggctcactgcaagctccgcctcccaggttcacgccattctcctgcctcagcctcccaagtagctgggactacaggcgcccgccaccacacctggctaattttttgtatttttagtagagacggggtttcactgtgttagccaggatggtctcgatctcctgacctcgtgatctgcccgcctctgcctcccaaagtgctgggattacaggtgtgagccaccgcgcccggccaatttttatttattttatttttatttttttgagacagcctcgcactgtcgcccaggctggaatgcaatggcgtgatctcggctcactgcaacctccacctcccgggttcaagcgattctcctgcctcagcctcccaagtagctgggattacatgtgcccaccaccacgccctgctaattttttgtatttttagtagagatggggtttcactatgttggccaggctggtcttgaactcctgacctcatgatccacccgccttggcctcctaaagtgctgggattacagccatgagccaccacgcccagccaacttcattggaattctacctgagtcttttacttgttgggtagtccctttttcttttctttttttattagtattgttatttttttgagacagtctcactctgtcactcaagctggagtgcagtggcgcgatctcagctcactgcaacctccgcctccagggttcaagcgattctgcctcagccttccaagtagctgggactacaggcacatgccaccatgcccggctaatttttgtatttttagtagagacggggtttcaccatgttggcctcccaaagtgctgggactacaggcacgagccaccgtgcccagcctggtggtccctttttcatagttagattttggaacccttgactcttggctccaaccaatcagatacattttgatttttgtaactctcaagcagtgcttgtcctgggtgccttatcttcacagcccagccctacacaggtctattgtgatactacttgcgccctatagagtccagtaacttctctttcttgtggatcttcaaggcttattattgacaagttctagattggagttatattacacaatttttcaaaaaatagttatttacaagattaaccatgagctgaaaattactgaaaaactgggaatgggtacatggaggttgtgctcattttctttcttctttctggtttttttgtttgtttttttgagacagagtcttgctctgttgcccaggctggagtgcagtggcgtgatctcggctcactgcaagctccgtctcccaagttcatgccattctcctgcctcagtcttctgcgtagctgggactacaggcgcccaccaccacgctcggctaattttttatatttttagtagagacgcggtgtcactgtgttagccaggatggtctcaatctcctgacctcatgatccacccgcctcggcctcccaaagtgctgggattacaggcatgagccaccgcgcctggccttgtttttgtttttaggataagatctagctctgttgcccaggctggagtacagtggcacgatgtcaggtcactgcacctctgcctcccaggctcaagccatcctctcacctcagcctcctgagtagctgggacttacaggtgtgcaccaccatgcccggctaattttttaactttttgtagagatggggttttgccatgttgcctaggctggtctcgaactcatgagctcaagcaatccacctatcttggcctcccaaagtgttgggattacaggcatgagccactgcacccagccatctattttcctacatgtttaaacttttctataacaaaacataaagagtcctagatggccttgtgtatccttggctcatgctaaacctcaagaaaaggagctaaaatagctgggttatgtggagctaaagtagctgggttatgtgaagccaccggtaatatggtggcagttcagtgattcccccaggctaccacagtgatactgatactggatgcatgttggatttttgttttttgagacagagtctcactcttgcccaggctggagtacagtggtgtgatcatggctcactgctgcctcaaacttctgggctcaagtgatcctcccacctcagcctttctagtagctaggactacaggagcactccaccatgcccagctaatatatatatatattttttctctttttggtagagacgggatctcactatgttgctcatggtagtctcgaactcctgggctcaagtgatcctcctaccttggcctcgcaaagcactgggattatagccgtgtaccactgcacccagcctgtattgaatctttgtaacagaaaagtatttaaacacatctgaaatatgttgttaaaaaataacgtaatttatggggagcttactgagtacaaggcatgattttgaacaccctagggaagtacagtgagcaaaacatggccccagccacaagtaggggttagtgcagtggtatttttttttttctttgagacagagtctcgctctgtcgcccaggctggagtgcagtggtgcaatctcagctcactgaaagctccgcctcctgggttcacgccattctcctgcctcagcctcccgagtagctgggaccacaggcgtccgccaccacgcccggctaatatttttgtatttttagtagagacggggtttcaccgtgttagccaggatggtcttgatctcctgacctcatgatccacccgccttggcctccctaagtgctgggattacaggcttgagccaccgcgcccggccagtgcagtggtattaatctgacagagagaccaatcaatcacaagctagcaagtgcacagccagatgctggagtgtatgaaagggaccagtggataataggagaggccttccaggctagaaggaggacaggtgcagagatctggagtggagaataaggcctgtggttccctgaggggagcatggagtgttgggtggaggaaaggccagggcaaatgagagacaaagctggaaaaggaggctgggacctggctgggaaggtctgagcccagagatctgagctatgtttgttaagtctgggtggggaagaagtgggaatgtttatttacttagtgttttgaatctgttaactcatttcttaaacctttacatcactttatcccacaaattgtcattataccatcaacttctccctccacaagccactggactatttgagaatatccctcaagtcttcatgcgtgcatgcctcagccccaagattagagacagctattccactaaggctgtgttttcagactcttttaacagtatctcttagtaagaa

SEQ ID NO: 98104 - DNA, 31906 bp, Homo sapiens
ctttttaacaactacctctcacaggagcgaacagagtaagaactaattatcacaaggactataccaaaccattcaggagggaaccacccctatgacccaaacacctcccactaggccctaccaacaacattggggatcaaatttctttttcttttttgagacagtctcactctgtgacccaggctggttgcagtggtacaatctcagctcactgcaacctccatctcccgggttcaagtgattctcatgcctcagccacctgagtagctggggttacaggtatgtgctaccacacctggctaatttttgtatttttagtagagatggggtttcaccatgttggccaggctggtcttgaactcctggtctcaagtgatctgcccagctcagcctcccaaagtgctgggattacagacgtgggtcaccgtgcccagctgggatcaaatttcaatatgagacttggaggggtcaaacaaaccacatctagagaaagagctccagaaatctgcatggggttccttaagcattttatattaataacaatcttacatactcaatagccatgttattagtattgacacattacataattacattgatcatgtagatctagaccaaccactgtgaaaaaaacaaggtgcagctaataataaaaaagatgagttgataatgaggtaaaaaaaatgatgaagatgaaatatcatactaactatgcatgtatatgtgccaggtactgttttaattgctatctatgtcttaattcagtgaatatacacaacacaaccttaagatgtaggtattacctacatttttacaggttatataatttatcctagtagaatcagaattgtagtctaaacagtgtggctccaagagtctacagtcttaactataatgctgtatgtaattccttgcagtaagtagacagtagtagtgttttgttatattgttattaaatgccctttcttgaccaaataaaaaattggcaaacctatcttgacttcccaatttaaaaatttattggctgatgaaatctaaaagcctggaaatcatcaatttatagggccagtaaagaacaaaaaaaattaaaatttgagaagtaactgatggagcaaggtcttaaagggattcagctctagaatacagggagcagttagatttggagaacagaacaaaagctaaatatagaagggattatgaccaagtagagatgatggtgagaaaagcttctctagtaactaaaaatcaaggtcatctgagctcaaaataagcctggtaatgttaatagaagacataattattaatataaaatagtgaagatttgaacaacttttgtcaggaatgagaaaaataaataaatccaggaatgggctgacagagcagaaaaagacagggtttcaaaactaaatcaaagaatgtttagtggcagtaaaaatgtaccagaatgtgagattgtggtcaccagtaaaattgctgaatttaaggtctgaaagccagagtaaagggtcattcattgatggtaaagacgataatgataataaccattcattgagtatattacaaaattaattgtatctagtcataaccactggtatcaccatatcaaagagaagaaaactgaggccctaattaattttcagtaaaaagttaagtttttcatacaacttgacaagaggactctgaaattcatagagtagtaacaaggccaggcattcacaatgcaatttgaagaaaacaggtggggaagcttatcttgctagatattaacacttacttatatagttgtagcaattatgacagtatggtattgttatagaggttatacaaatacagcaatggaagagaataagcaacccaggatgtgtggaaacctgatttgagataagtgacattacaaaccacaaaaacaagtttaactcttcaataaatggtgctagaacatagttgtctgtatgtaaaataataacaaatgagagtagatccctttctcatgcacaaaaagtaagtactgggttgagtaaagccctaatatgaagaatataagtttaaaacttttagcaaaaacacaggtgaatacctttgtgatttaggggtagaaaaagatttcttaaacaagactcccagaacacaaattgtaaagaaaaagatgaataaatttgactacacccaaaccaaatttcagtataaaaacagacatacacggccaggcacggtggctcacgcctgtaatcccagcactttgggaggcagaggcaggtggatcatgaggtcaggagttcaagaccagcctggcaaatatggtgaaacctcgtctctactaaaaatacaaaaattagccgggagtggtggcgggcgcctgtagtcccagctacatggaaggctgaggcaggaggatcacttgaacctgggaggcagaggttgtagtgagctgagatcgcgccattgcactccagcctgggcaacagagactctgtctcaaccaaaaaaaaaaaaaaaaaagacatacactaggagaagataagcaacaggaaaagataagcaaccaatgtaaccaacaaggtaatattttccagaaaacatgtaccagtgaaactgatgaacaaaccaatagcacagtgggcaaagatgtcaagagcagactagtaggcatttggaattagactcctagaattaagattagcctaaagaaatctgggctggaaatagagatttgggctatatcttaacgatcatatttgaatttggggcactggatgacctaatgggaaaaaaacatgaaagaaataaaagtcttgggcctagctaggacaggcagaagatgagtgatccaagctcaagtgcttgaaagtaaataatgactcctttaactgtatttacatatttatcttgagttttctgaccacagtttctttatgtcttttaaagatggagtctaaaaacactatcgcataaggtggtcagataagcctattacatctatttagagcaatattatctttagaccatgtttcatgtgcagccaagaaggcagggttgtggaaatgaaatacaaatataaatgaaaacaggatttaaattttaagtaaagggaatttaagaaaatattccttttaagtggataataaggatttttaaattggtggagttaggaattatctcctattacacattcgcatagctcatgtaatgcatcagaatacctaatatatgatccacaccttttctctgaatttcaaggcctcccaaaaaagttttatccatatagacttgcattcactacattttttctacttgaaaatagcaaaccagctattcacataaactgctaagaggaagtaagccaaccataaaaaattacatactgtaaaattacttatatgtgagggtcaaaaacatgcacagcaatacagaatagtagtaatggtggtggatgtggttggaagggtcgctttttaaaaacgcctctattgaacattctgtatattgatgtgggtggtggttacctggaactgtacatttggcatttgagcattttactatatctttaaattgaggtatgtattttttaattctttaaagaaaaactgcttggaggtcttattcttaatgcacaacaatcacaaacattaaatttatacagtccagagaatgtaaagttgctttaaaaaaattctttccttttctcactttaaaataccaaggggaaaaattaaactcaacacagcacgtcttgcccttgtcaagatgacagatcctctaagagaagaaacgaataggtaatggccttttccagattttcttttcctaatgtaccccacttccaacctacccctacctcaactagggtatctagttgtacccaagggtgcttctacattagatccacagagattaaagataacagttaacagaatagtccagaggacaaggatattcaagttccatcatcttcaggataaaaaagctccagggtttacctccaaactctctctaaaggaaatcccatcaaccttttaaacatcactttgtatacaccatcttctatactgccctagctcaaaaacatgaacctgtatctaaacgtgtttgtagaatttccattgtaagttttactttaacaattttgaacaattataatgatagaaaattatttaatctagattttggtcaactctattactgatattcttttttagtgaaggacaatcacaaacactaaatttatacagtccagagaatgaaagattgctttaaaaaattccttccttttctcactgtaaaataaaaataccaaggggaaaaatggaaagtatttattataactggctgttacactgtcatacacaatgaaatactggaccattagcagttcgttattatatgttgttaagtgtagaactgtaaataatgaggcatattattaagatatcacacacattatccaatcagcaagtgcacaacttcggacattttgacttcagccaaaatatgaaacaaagtcatagcaagaaagttatttcaagggagtgaaattttctcctcttacccttcaaatcttttagagatattaataaaaacaactatccagcctgggcgatataatgggactccatctacatacacacaaaaatttttaaaattcgttgggtgtggcagcacacgcctgtaaacccagctacttggaaggctgaggcagaaggatcccttaagccggagttagagtctgcggtgagctatgatctgaccactgcactacagcctgggcgatagagcgaaaccttgtaacaacaacaacaacaacaaaattaaaaccttcaagatcaagcttgcccaacaggatggctttgaatgccactcaatgcaaatctgtaaactttcttaaaactttatgaaaaaaaatttttttttagctcattagctaccattagtgttagtgtatttatgtgtggcccaagacaattcttcttccagtgtggcctagggaagccataaggaccccctgcgctagacttcagcagaagccttgtaacataaagaaaaccatacataaggctttagattcttttttttttttttttttgtgacggagtcttgctctgtctcccaggctagagtgcagtggcacattctcggctcactgcaacctccgcctccctggttcaagcgattctcctgcctcagtctcccgagtagctgggacaggcacctgccaccgcgcccggctaatttttctatttttagtagagacggggtttcaccatcttgacctggctggcctcgaactcctgacctcgtgatccacccgcctcggcctccctaagtgctgggattacagacgtgagccaccgcgcccggccagctttggattcttttaccactttcccgaaggaaaaggaactgaaaatatctaaggaaggactactacgaatcttctctgagtggcaaaaaccagaggtttttggagctagggctgcagttaagttgccaaggggcagagatgtaaacagttcctggtttagttaaaatattttaatttttatttttttaagcctggcctttgggtgaaggagtaaaattaggcactggggtctgggtagggggaggatactcatgggcgagtatgcaaccctagggccacagcaaccaaactgtaggggaagaggcggggcgagaggggacgaagtagagacagcaagagactcacttttgaaaggcactttcggttagaaagcattctcacatgcttatctcatcgcacacagtatcctttctgctggtctccagcatctacagacgttaaaggcccaagaggagggccaccttcacacgagattccgaggagggcctcgctacccgccagttcccgcgcctcggcagtccgccgcgagcgtacgtcactcgcccgccgccaatcggcgcccggcaggtcacctctcctcccagggcccgccgccccgcccgccgcccaggccgaggccgccagtgcccgccggccgcttccgctcccggcgcaggcgckgcagcttggccagagcggagggggctcgggagaggagtggacgccgctggccaggatggtgctggagagcgtggcccgtatcgtgaaggtgcagctccctgcatatctgaagcggctcccagtccctgaaagcattaccgggttcgctaggctcacaggtaatcctcccccatcagccagtccccatccttgcacgttcgccaagcgggggaaggaggcgtaaaaatcctagggccaaggggcgggacggagctcggcgcctggcacgtgatccccgcgcgcagaggaaggtgggcgcgcgccgacgcagctgcctggggaacgcctgtgaggcagtctccgggtgcttgatgccccagggtcttttgtcctcggagttgtctccggtgtcattccgtggcaagataccaggtttttgcagagaaggtgctgagttgggaacaggccagtctctttcatctcctgtcctgctcatcgctctctgtagcgtacttgtttattttaaagcgggctaagtcgtcgttatctaaggcctcatgtaacaggcagccccagctaccggctgggttgtaccctcagcatgtgggtgggagtgtgtgggagagaaatatagacttacacgtaacacgtatatgaccgttttatttagtaacgaaattaggagataacctccattccctcaggttagaattgacctatcataggtggcatttgaggtcatctccgtttctacggtcccggggcccgctgcggtaacttaagttggaagaaagataccttacccaagaaagtattcgaaggccggtatgaggagtgaaatcttagaaaatgaaatttagtgaatatatgtaacgttctatacttaaggaccctcacttaacccacacaactcatgaggatttcacatctaaaggatgaaaatctccagaatgcagtcaacacttgggagattgtgttgagttatgagcatttcattgtaagggggatatttctaaacggaactcagaccgagtaggatggtgaaggaatcagcaagtattgaactcctatgtcctaggttatcagggagtgcaaacatgaattaagataattctgaggtaaatagggttgcttcgccgggaacgttctaaagatctgtagtacctgacctaaaatacagcaatcgcacagctgtctggtagaagaaaaataagatttgtgtagactaaaatatagaactgataacaaattaaccaaattagtgaaggttattgggaggtgaatttcagtctaaggaagatttttttttaaattaaagaatgctttccccaaacaaatgtggtgcttcagtgatagcccctctcaaagatgaaaaaaacaaacaaaaagactctggtggtgggtggtcgatagatttagaagggataaactagatgacaaattctcttccaaatctagagattcattgaattatggtcagacagacgctctgttgagtggattgtgagattttaatattttttaaatattaagagttttagtagaaaacatgcaattgaatagaaagcatggtaacaataataaacattaaaaaggaacattaaacatcagaagcaatgcaaaagtaaaataaaatgaaaaacgtttcacatcaagtgtttataaacatcagatcttttgatcctaccagtttactctgacagaattgcagcaattccataaaattttggctttccccacttcttttacttaagtactttacatattttaatataatcctcattttttccctaacaactaaatacttattttagttttaacatcacaatgggcctaaccattcattcccttacaactggaaattagaaatgtttctattttttaaaattcattatgtaatagttcattggcaagtaagcaaataccagttgtcatatttctcccttttggatgtcttcacttaaatagcaataccaggccaaaacggtatgatcatattgtgacttttgtacccttttgtcattttgacatttgtaccttcttactaatttgcataagttaactgttgaggaatttttaacagtcaagaaaggaaaatgtccaatgaattacctatgttttttccagatggtggctgcatttgtattagtttcgattctctgtaaatcaagtataattgaagaaaattagaaagtatgaaactagatttaatggctagattttagaagtatgctttcttttcttgaggatccctagtgtcaacaaatatttaattcctattaaagacattaagaaaactcaaccaaaaccttttctctcttaagaatatatagtaacttcctcttaaaagttgttaaatatttaatatgaagactgattctcagaaataatgaccattctgagaagtattttaataacatacatttaacttaagtcccattacagtgtggctatagttaatagttctcattttattgctggtttatttaggaaacatgaacatgcttgtaataactggtttatgaaaaacatgagatagccctttttggattggacaaaacaattgcagggtttattttggagtactatagaagaaaaatttcagtggctattttccactctcggtctcccattctgaatagattgtaacagttaatgacatttggctttcttaaatgagttacttgtagaatccataatgtacacttttgttaaaataaaaacctggaagacaactttttagcaattgtttaaaatgtctaggagaccaaaaaatatttccattttcttctatgaaaattagagcaaaaaacaatacagttcacattattattgcctacatttccttccctatttaaatctagctgttttttaaagctattgactctcttatgatgactctgcattcttagaaaccacatggagatctttaatgaccatatactagttaaatacaggcagttctcacctatcagaaacaacttaactatctttgtttatgtcacattttcaagagtgaggcgttcaagataaattactgtgattatctaatttatgtttaacttaggtttttgttttgttttgttttttgagagggagtctcttttgcccacactggagtgcagtgtcggctcactgcaacctctgcctcctgggttcaagcgatgcttatgcctcagcctcctaagtagccgggactacaggcatgtgccaccatgcctggctaattttttgtatttttagtagagacggagtttcaccatgttggccagtctggtcttgaactcctgacctcaggtaatccgtctgcctcggccgcccaaagtgctgggattacaggtgtgagccactgcgcccagccctaccttaggttttaagtggtaatagtaaactcatgcawtgaaaatattttatcttttctacagttaagaaatagaaataatttctgtgtttagctacatatgataaatgagaaaatatgttataaaataacyagcaaccaagctgccagtattatttttatggtatcataagatgatatggctatattatatgtagatgtttgaaaatttgaaatggaaaaattctgttctagttctgtggaatgtaattcctcattaagatcggagtttgtctatgtcatttttatgtcattttatgtcatttttagctattattaaaaaatgttttaataatagtatttatatgtcataaggaataggtgtcatagctagcctgtgtcactatatataataaaaggttaaacctaattttgtttcccaaagaagatacttcattttgacaatgtctaaactttcagaaaatttatgctaaaattggtagctaccgtattattccgttttcatactgctataaagaactacgcaagactgggtaatttataaaggaaagaggtttaatccactcacagttcagcatggctggggaggccttaggaaacgtacaatcatggcggaaggcgaaggggaaacaaggcaccttcttcacatcatggcaggaagwagtgccgagcaaaggaggaagagccccttataaaaccatcagatatcatgagaactcactcactatcaccagaacagcatgggggataccacacccataatccaattacctccacctggtctttcccttggcacgagattatggggattataattcaagatgagatttcagtggggacacaaagcctgaccaaatcagctattcaagttgctttgaaattttcttttctgactagattttggttttcttttgtgagaaagggtttcactctgttgcccaggctggagtgcaggtggcatgatctctacccactcattgcagccttgacttcacaagctcaagccatcytcccacctcaacctcttgagtagctggtactacaggtgcacgctaccacacctggctcatttttttgtatcttattttagagacggggttttgccatgttgcccaggctggtcttgagctcctgagcttaagctatccactcacctcagcctcccaaagtgctgaaattataggtgtgagscactgtgagtggcctagattttgtttctctgatggtgctggttctttcattcttcctttttggtcctgttatttatcttaatagtgggatacgtggaaggctgaggcaagagaattgcttgagtcgtggcactacattccagcctaggcagcagagcgaaaccgtctcaaaaaaaaaaaaaaaaaaaaagggatgtaaaagtcaatatgwatattaggtccttgctcagtattgagctcaataagaagatgaacaactcacatttaaaaattggcaaaacaggccaggtacggtgtggctcatgcctttaatcccaccgctttggaaggctgaggcaggcagatcacttgaggttgggagtacgaaactagcctggccaacatggtgaaaccccgtctctactaaaaatgcaaaaattagccgggtgtggtagtgcacacttgtattctcagctactcaggaggccaaggcaggagaatcgcttgaacccaggaggcagaggtcacagtaagctgagatcgtgccactgcactccagcctgggcaacagagtaagactctgtcttcaaaaaaaaaaaaaaattggcaaaacagaaaaatgaacaaaatcttatcctttgcagcaatatggatgcagctggagaccattatcctaaggagattaacacagaaacagaaaaccaaataacacatattcttacaactgggagctaaacattgtgtattcatggacatgaagatggcaacagtagacactgggaactgctaaaggggagggaggcaggaggtcaagggttgaagactattgggtactatcctcactacctaggtgggaggatcagccatatcccaaacctcagcatcacacaatatacccatatgacaaacctgcacatttacctcytcaacctaaaataaaagtcgaaattatattaaaatattttaaaaaggaaatttgggcacacacaaagggagaacaccatgtgaagatggaggcagagattggggtgatagacctacaagctaagggacaccacagcttctccctcagatcctccagaaagaatcaaccatgctgacaccttgattttggacttctcgccactagaactgtgagtgaatacgtttctgttgttttaagctaaaaaagaaaacgaaaatgcaagcacgaacacattgttctctgcagtttagggaatcctagtagagactactgctcacatttgttctctcttctctgctttaatggccactaccttagttttatctcaaactattttcttccagaccatttccatggattttcaacaggttgtcttgccttgtcttcttccactagccctctctgctattcctgtggccctctaatccatcttccatctgataccagagtgacttcataggtgaacaatttcctagttaggctaatattcaaatatttcagtggtttcctattatgcacaggttagattcttacttacctgttgaatatcagagtttgtcatcatacggcacctgctcagttctacagctccctttcattaaattctaacaatactatggtgcttagtttcccagacacttaatgcatgtcatatctccgtacctttgcctatgcagcttcctctgcatggaatgaagctcctcctcccatattcccatgaacttctgtactcttcatctttcagaaacctatttaagtatcaaaacctgtacagtttttgctcatgccagtaaaaagtgaataacttgtacctctgcgttgcttctgtattattgctgatagtacacagtattatgatcgtcttttataggtctgtcttccatactaaatggcaagctcctttctaacagggagtgtgttttataatttttgtatcttcagtacctgtcccaccacctgatacatgtgagtgaggtattacaattttagaaggtgctgaaagtttttttcttaaatattttaagtagtcttcctgtattttaacttacactgtcattattcataagccatgaacaaagacaagtaagtacagaccttgtaggaattatctcaaatgccagtttattggagtacaaactcaattaggctaaaacttactgaggtcttggtttatgtaagtctctgttaaagggtagggagttagggattttttgtttagttggggaggagacaaatatttacctaactrtatagttttaaggcagaatgcattaatagtttgaattgtgttctgtagtttttactgagtgggttcctacttcattcgtttctcccagcaatcctatgaagttagaagactctttacttttctttgtgccttgaaaattctgcgctcaagtgcttgagctcctggcttctcattcgttaggtctctgcttaaaggttcttttttcagaaaccttccctgaccccttacctaaaattgcagccaccctactgctttgccccaggttagtttttctcttatgtcatcctttatttcctttataacagttactatagtctgtgatcatcttgtttatttgttcacttgtttatagtctctgtcctctgaaatatataccctatgagagaagggaccttatctattagcctgtatccccacatagtgcartttgtggagtgtggtaggtactaagtaaatattgttgaacaaatgagcttacagttgttattcctgctttacagacaaaagaaacctggttccaagtatatgaaaatctggatttataccacagataaactgaattagttgtttactgaagtcctgttatgtgcaaattactaagcactggttacatagatataaataagacagctactgtatttgcatttagcacagtatctctacatagtaggtgtattagtctgttttcacactgctataaaggtaactactcaagaggccaggtgctgtggctcatgcctgtaatcccagtactttgagaggccaaggtgggcagatcatgaggtcaggagatcgagaccatcctggtcaacatggtgaaaccccatctgtactaaaaatacaaaaaaattagctgggtttggtgatgcacacctgtaatcccagctactcaggaggctgaggcaggagaatcacttgaacccctgaggtggagattgcagtgagccaagatcatgccactgcactccagcgtggtgacagagtaagactccatctggaaaaaaaaaaaagataatacccaagaatgggtaatttataaaggaaagaggtttagttgactcacagttctgcatggctaggtaggccttaggaaacttacggtcatggtagaagggagcgcagacaccttcttcacaaggaggctggagagagaagagtgaggagtgaaagggcaagagccccttataaaaccagatctcatgcgaacagcatggggaaaaccactcccatgatccaatcacctcccaccagtttcctccctcaacatgtggaaattatggggattataagaggtgagatttgggtggggacacagagccaagccatattattccacccctggctcctcccaaatttcacattcattttgcatttcaaaatcaatcatgccttcccaacagtcctccagagtcttaattcatttcatcattaactcaaaagtccacagtacagagtctcatctgaaacaaggcaagtcccttccacctatgagccagtaaaataaaacataagttagttccttttaagatacaatggcagtacaggcactgggtaaatacacctattccaaatgggcaaaattggccaaaacagaagggccacagggcccatgcaagtctgaaatccagtggggcagtcattaaatcataaagctccaaaatgttctccttgaccccatgtcacatctggagaacactgatgccaggggtaggctcccatggccttgggcagctccttcaagggctggcatcgagtgcctgcggcttttccagatgcatggtgcaagctgttgttagatataccattctggggtctggagcaggtagccgccttctcatggctctgccaggcagtgacacagtggggactctgtgtgagggctccaaccccacatttcccctttgcactgccctagcagaggttctccatgaaggctccacccctgcagtagacttctgcctggacatccaggtgtttccatacatcctttgaaatctagggtgaagttcccaaacctcaattctagacttctatgcacccacaggcccaacaccacatggaagccaccaaggcttgtggcttgctccctctgaagcagtggctcaagctgtatgttggccccttttagccatggctgggacacagggcatcaagtcccaatactgcacaaagcagcaaagccctgggcctggcccacaaaaccattttttccttctaggcctctgggcctgtgatggaagggcctgctgtgaagacctctgacatgtcctggagacattttccccattgtcttggcaattaatatttggctccttgttacttatgcaaatttctgcagccagcttgaatttctccccagaaaatgggtttttcttttttttgggggggcggggggaaggagggggacagagtctcacactgtcacccaagctggagtgcagtgacacaatctcagcttgctgcaacctccgcctcctgggttcaagtgattctcctgcctcagcctcccgagtagaactacaggtgtgcaccaccatgcccagctaattttgtatttttagtagagacggggtttcaccatgttggccaggacggtctcgatgtcttgacctcatgatcygccygcctcagcctcccaaagtgctaggattacaggcatgrgccaccagcacccagctgggtttttcttttctgttgcatcatcagactgcaaattttccaaacttttatgctctgcttcccttttaaacctaagttccgatttcaggtcatctctctctcaagtttcatcagtctcttgggcaggggcaaaatgccaccagtctgtttgctaaagcatagcaagagtgacctttgctccatttcccagtaagttcctcatctccagctgagaccacgtcagcctggatgttattgtccatatcactgtcagcattttggtcaaaaccattcaataagtctctaggaagttccagactttcccacatcttactgtcttctgagccctccaaagtgttccaacctctgccagttacccagttccaaaattgcttccacattttcaggtatctttatagcagtacccaactctctgttgtagcaatttactgtattagctttcacactgctataaaagaaataaaaacataaaataaaaatactaccccaaactgggtaatttataaaagaaataagtttaattgactcacagttacgcatgactagggaggcctcaggaaacttacaattatggtggaaggggcacctttttcacgaggcaggagaraagagtgaagagcaaagcaggaagagcccattttaaaaccagatctcatgagaactcactatcaggagaacagcatgggggagattgccttgatgatttaatcaccaaccaccaggttcctcccttgacgtggggattatgggattacaatttgagatgagatttggatggggacacagagccaaaccatattagtagatacttaataattatatagtaaatatttaatttttatagtaataattatatagtaaaaatttgtttaacaatgagaaattgatttattctttcagaaaatgtttagtaagcacttaataaaaatcagaagggggggattgattgggaaagtactacaagagcaaactttctggggcaatggaaatgtattttgtcttaggtggtgtttataggtccatatagttacaaaactcatcaaactgagcgcttcacaaacacaaagcttggccaggtgcggtggctaatgcctgtaatctcagcactttgggaggctgaggcaggcagatgggagtttgagaccagcctggccaacatggtgaaaccccatctctactaaaaatataaaaattagcagggcgttttggcaggcacctgtaatcctagtgactcagaaggctgaggcaggagaatcgcttgaacccgggaggcagaggttgcagtgagccaagatcatgccactgcactccagcttgggcgacagagcgagactccatctcaaaaacaaacaaacaaaaagcacaaagctcaataaactgaactgtaaattaaacacttcaaacaaaagtaagttaaataaattgagccagacgttatatagacactggggacacagatgatcagacaaataaggtccctgcccttgtatctctctttttcttttattttttattttttttatttttttgagatagagtctcttctctgtctcccaggctggagtgcagtggtgagatcttacctcactgccacctccacttccgggatttaagtgattctcctgcctcagcctcctgagtagctgggattacaggcgtgtgccaccatgcccagctaattttctgtatttttagtagagttgggatttcaccatgttggccaggctggtcacgaactcctgacctcaagtgatctgcccacctcagcctcccttagtgctggaattacaggcgtaagccaccacgcccagcccccttgtatctcttatattgtgagtggggaacatgataggtagatgcagccattaaaatttatgtttccaactgatattaaggagttggggaaataatataataatctgacataccattaagtgaaaaatgcaatatagccttattttttaagcatttacagcctatgtatttacataccaaaaaagagatacatttaccaaataaatacataaatgttattttttataatcctaagacaaaaataaataatatgctgaataaaatacattattttatacaaaaatttgcttggtgtggtggcgcacgtccataatcccagctatttgggtggcggaggcacaagaatcacttgaacctgggaggcagaggttgcagtgagccaagatcatgccactgcacwycagcctgggtgacagagtgagactatctcattaaaaaaaaaawatattttaaattattttatttggtcaggcacggtggctcacgcctgtaatcccagcactttgagaggccaaggtgggtggatcacctgaggtcaggagcttgagaccaacctgaccaacacggtgaaaccccatctctactaaaatacaaaaattagctgggtgtggtggcgtgcgcctataatcccagctactcgggaggtcactgaggcacgagaatcgcttgaacccgggcagtggagattgcagtgagctaacacgacacacactccagcctgggaaacagagcgagacgctgtctcaaaaaaaaaaaaaaaaawttttttttgcacattatttacagttagtaatattttcctttcaaagtatctaaaatatctgtaatagctgaacatatatcaaacagatctatagagactagcacatgtaaaattttttttaagtttcttgtttgattcttctgtatttyatctttcttcatataaaatcagccttaattgacagagaaatattctatgtactcattcatatgtgggaactaaaaaagttgatctcatggagatagtcaaatggtagttaccagaggccaggaagggtagggagggagagaatgaagagaggttggttaatgggcactatagtacggttatatagaaaaagttctagtattcaatagcataatagggtgactattgttatcagtaattttagtgtatatttcaaaataggagagraaatttggaatgttctcaatataaataaatgataaatgaggtgacgaatatcccagttacactgagttgatcattgcacatcatatgcatgtatgcatgtagcaaaatatcacttgtaccccataaatatgtacagttattatgtatcagtacaaaaacagcctgaataaatgtacttacagtcatttgaattgagcttttcaagctgtattgctttcatgtataaagtttttcagtagttaaaytgtagttggttatctttaaaaagtagattatgttaagactttggtaagttattactttgttgtaggaggtaatagtacctctcatcactgtatttttaagcatagtgttttaccaaggaattaagtgttcaaaagaatattttctgaagtggattttaaaacagtagtaataccatttgttcttgaggtttgtgggttaagataggaaatgctatatttaagagtctaacattaaggttttcaaccaggcatggtggctcacacctgtaatcccaggacttygtggggctgaggcaggcggatcacttgaggtcaggagtttgagaccagcctggccaacatggtgaaaccccatctctactaaaaatacaaaaattagccagacgttgtggtgtgctcctgcagttttagttacttgggaggctgaggcaggaggatagcttgtgcccgggaggtggaggtggtagtgaccaagagcacaccactgcactccagcctgggcaatggaagtgaaaccctgtctcaaaaataaataaataagattttcatctttgcgttcccattcactcgctttttgataaatttaagctcttatgacttctaaaatattgtaatatgtacaataatacttaatgttattctacattgaacaaacatttaatgactgctatttcgagttacatactggatgctggggccaattgcaagctaagataattagtcagataaaacagaaggaactccatatgcaaagaactcaaaaaggctgcttactagacagtagctttcgctggcctcaggtacatgaagagaccatgtttgtggaagttgaagctggaaaggtagccttgccattctttggagatggcaccttatagagccaatgatctatagtagcattgtccagtaaaactttgtggtaatggaaatgttctctgtactgttcaatatggtagtcagtagtcacatgtagctagctattgagcctctgaaaggttaccagtgtgtcttagaaacagcattttacattttacttaattttaatttatttacatgtgaatagccacatgtgtttgttttgttttgttttgtttttgagacagagtcttgctcttgtcacccaggctggagtgcaatggcatgatctcggctcactgcaacccctgcctcctgaattcaagcgattctcctgcctcagcctcccaggtagctggaattacaggcgcctgccaccacgcctggataattttttgtatttttattagagacggggtttcgccatgttggccaggctggtcttgaactcctaacctcgtgatctgccctcctcagcctcccaaagtgttgggattataggcatgagccaccacgcccacatgtgtatattaaccgtgttttcaattttctgtattttattatgctttaatatcttaggagccttgttggctgtggagacaatttaattcctagagatactaaataacttgcctgtgagcatgcctttcatatgcaaaccaaccaatccaaagcccatgcccccaaccacctcctttatctaacccttacacatgaagtcagtatttctccagtcaatatttctcctgccctaagtcaccccagggacaggtaggagacgactagggaccactacttttgcccagaacccactgaaattattcaagctagccagtcctgaacagtttcctgccttgccttttccatggaaaccacagtaaaggcctgtgcccatgctttttccctttcctctttcttcctcctgatcaaccctagtacctctcatgtggccctgcattgcatagtgtatcctctcctcttgggaactataagtaataaactgttatttcaagacagtttctacaagtctgttgggtacaaatctaaacagtatggctagtggtgcccatattgaatagcacagatcttatacctaggcctccttctccccgcaaaaacagttctgtgttatctccagagctttaattcactcaaagaacctatttggagtgtctccactttggttatgagaatgtaacagccagcatggcagacaaagttcatacttttacagagttttattctggtaactacaagattatattcctgaagatttttgcccatatagcattgtcaagttatttggcaaaatatttttttcaaaggagttgctagtacttcctcaccaatctctataatctctgaataaaagctaccatttattgtgtcttttttgccagccactcttataggtgctatctatgaaaatggtagataaataggttttttcatttagatttctttggcatgatgttatatcaaaaataattccattttggaagagttcatattgtctttctttcaatagttaaatagtactattatctcctgagagtagttttaccaagataggcacagattttaattttagatctattgggtttgattcatgataactgacaacaggctttggatttagggtgtcctggactaaacctgcttaggctacagttttctcacatgtaaaatggggataataatgatacctaccacatatagttgtttaagctaacatagtgttaaatgagctagtgcccttatacycttagcataacctgttcatttatctttaatgtttattagcatgagttagcatattattttctgtttttctcttttctcaactaagctatttccacatagtgcctagcaaggtatcagattcggcattcagtgaaggaagttaactggtaattctataagaacagaaaagagcccagcagaggcagggtgctagcagacatttgataaatgtatgttgaaatgtttatcttggtttcctggtatttttgtgtccacatgcatagggactgtttcatttgtatcacttatattccctgtccccttaagacaggctaggtactccaaaaggctttaaatgaagtttatggaattagatrtatcttaaaatgagaacattcaacatagaaggtttcaatttgttctttaaaatagtagcttttacacaaaatttcagtgttctttagcaacatttaccaaaaatgtaccttaaagcatcagaggacatgttctctctgatattatgaatcagtggtaaaaattctgcagatattctgttgtatgattttgacatagtattaaggagataaaatgttttcttaacttataaaatatacattgaattttgtttatagttatagtgatcataactcctaaaataaaaatagacaaacacaaatagacttgatgtagacaatgagataggatatttgaaatggaacctatttctgaaaagttaggtttctagtttcactggtctcaaattataaataaagtaaggtggtctttggtagagctggctttattgtgttatttattcacagttttatggatccattaaaaaggaattaatgtaaaaagtaacaaagaataagctcaaggatgaaactagacatgctattttgaattcttttccaagagcactgcagattctgacacatctacatgtttagtttcagaatggcttcggttattgcctttccttggtgtactcgcacttcttggctaccttgcagttcgtccattcctcccgaagaagaaacaacagaaggatagcttgattaatcttaaaatacaaaaggaaaatccgaaagtagtgaatgaaataaacattgaagatttgtgtcttactaaagcagcttattgtaggtgttggcgttctaaaacggtaagatgtctgtttacgtgtacactaaaattttgcagtgctaggattgtttcgcctcttaaatccccagttttgaagttctttaagatgagagaattttctgtaatatttggtattgaaagaccatattcctaaattgaagttttcatgtcatgatagatactacctacattagaaaagttggagcagcaaagaagaataaaaatctaatgccttcgcaatgtttggcatttatgtagagtaacatgtattttaaaatacacattctttgagagaggacctaaggtttaatggaaaaaagctttggtgtcatagtaaatagtggtcaaatatacttgtcacagtatgagtttggttggacaagttacttaatttttaatctctaatcttcagggtttgttttaacctgatacatccacattacatatctttgagaagtgagatgatatatgtaaactgctttaataatatgaggtagtaaatgatagcctcaattatagatgatttttaatgtgggaaggagtttggagtgataagtactataagtagttgacaaaatctgtttcttgtacttgatcatagattatttgaggtttttaatacagtattgctcatcacagcatcctttgtaatagcaaaatttttataaactaaatatctgataaaaagggaatgatcatgtttttaaaggatatataatgacatgagatcctgatatgagtaagaaagcatattacagtgtgatcccaattttgtttaaaaaacgaatacacgcaggccaggcgcggtggctcacgcctgtaatcccagcactttgggaggccgaggcaggtggatcaccaggtcaggggttcaagaacagcctgaccaacatggtgaaaccccgtctctactaaaaaatacaaaaaaaattagccaggcgtggtggcatgcacctgtagtcccagctactcaggaggctgaggcaggaaaatcacttgaacccaggaggcagaggttgcagtgagccaagatcacgccactgcactccagcctgggcgacaaggtgagactgtctcacaaaaaaaagaaaaaaaagaatacacacaataaatgcataggaaaaaatataccaaactgttaattattattaygtgtatctggatgggttatgagtgaattttttaaaatttatttttatttattctttatttatttttgcgggggacagagtcttgctctgtcactcaggctgaagtgtgatggcatgatctcagctcactgcaacctccacctcctgggttcaaggaattctcccacctcagcctcccaagtacccgagacacaggcgtatgccaccacgcccagctaacttttgtatttttagttagagatggcgttttaccatgttggccagactagtcttgaactcctgatgtcaagtgatttgtctacctctgcctctgaaagtgttgggattacaggcgtaaactaccgcaccagcctaaaatatatttttgttttcaaaaattgtgtggtatgcatgagttttatagcaagaaaaaattataatttattttgaattaaattccattgttttaaaattaagcaataggtgagctcgaattttaagctccacaaatgaccaagaacttattcgattcccttttaaacctgttgtctattttaatcactcatatggactcattcataggtttttatttaaaatctaaaccaaataatgaagtaactgtttaaattgttagattttgaatatggttcagttggatgtagaatgtaactattactcaggaaaacgatctgattttttttagcaagtgatatgctttctttctgagagcatttcacaaatgtttctacctaatgaatcatattttaaaaataacacttgtaattcttttttctttttagtttcctgcctgcgatggttcacataataaacacaatgaattgacaggagataatgtgggtccactaatactgaagaagaaagaagtataataataataacaatattttctcattctttgtgtatagaaaattttaaaatggtggtcttaattattactactggttgaacaattatttcttccaatttattttcttcctgcactactgtttgtatttgatcctttgtctattcagtcacttaattagaaattaaattgtcaagcctcttattctgacttcaaagaattaatgtatcttccaacaataaaatcacttctgattttaatctaggaaaacctaaattgtggctatggatccaaagctgtttgtttctttgaatatcaatattttcaacaggatcttgtatttaaaattcccacctacattgttaaatatgttattttttcatatctcttttggttttgataatctgaagtgtttttttctcgttttggccttccaaactgcatttggttaggtgaattaagaaaaatattgccatcaagaattacttgtgttttcacagagatagactctttgctttatagagattgttgtgtatttaatatgaatatcccagctttagaaaagaagtaaactggatacaaaaagttccattgaggaacagttatttacagtataaaagatttgtttactttacaaaaggcttgtgtctgtgtgtgtgtgtgtgtgtgtgtgtgtgtattttaaactgactcagtgacagctggggtggaatggcaagaacacttacaaccaaactcatgggctgctgcaatttgaagataattggtaataaacataagacattaattcatattaaaatagttcagtgttcaaaattgtgtttatgtggatatttttctctttttaacactataaaccattaaaatacagtcatcccttgtatacgctagggactggttccagggccacacatataccaaaatctgcccatactcaagtcccacagaaagtcttgcagaacccatatgtagaaaagttggccctccagttgaccctccgtacacatgagtttcacatcccatgcacaaatgctgatctgtgtgacctcacctgcatttgattgaaaaaagtatgcgcgtaaktgtacccacccagttcaaacccgtgtgtaagggtcaactgtacaaaaaagtttgtgaaataaacgtactggagaatctttaaaatttttgtgctttttaatcctactattatgaatctttttagtttcatcttacattactactctcataatagctatccttagccaggtgccatggcacaggcctgtagtcccaactgctgggaagattgaggtgggaggatggctgcagtacaagagcccaggagttcaaggccaggctgggcaacmtagtgctccgcctctgctgggctctgtagggaatcctttctgttgtaaaagagttaccatttaactcccttcactgagtgcgtttctgagaccttgctaggcactctggaaactgcttagttgagaaaagacaaatacaaaagcttttctttagtctatttaagatacagtttattcagttcactttgctttctttttataagaatgtacaagaggcagacagaggtaatccttctagaaataaaactaattgttattgggcacttgtatgtaccagacactacactaagcatggtacttgggtttttaatttattacatgtaatgtcagtaggttcaattatatgatcgtaacatcttcatgaccagcagcatgtattttagagttagaaatgtagtctggtttttgagaagttttacaaggtgtatgtccaaaattgttctttcctcacatgtcagtgggggataaatacagcattgctctcacttctttgactctgggtgctttttcggatacattttcttcaacactgttaaggggcctcactgtcagattaaccaattatttttccacagttggtcaccagactttggaaaaaatccacctcaccaaaattttggatatcctgatctgtgttcatgaaatgctcttctttttgtaaaatctatcactgcatctcacagcaacttgttttcacacatgttctagtggttcccataacttagattttacaggaggcaaatttactaaaaatgaggagactaaaatgaatgaccaactttgaattttgtcaaataacattgaaaatgaattatctcataaaaggtaattttaataccccaaaagtaagatggttgtactctcagaataaagactttttccctgccacattttcagttgttaaaatatgctaagagctatgcccatatcttttcccacctgtgcacatttttcagaagcgtagggttggtagtaagctgttgctttaataactcctttaaataagcattattagcagtttgcattacttcttgtaaatttacacaattttatcttgtccatctttaaaaaatagacatctaataaccaaatgtatttgaattgatgcagtgtaagtaacttgtagaacttgaggataagtggtaaaagaaaaaaaaaagtaacttggctcttgaaatacatgtcttcggtttctagagccttcaaaatacagccctgttgttactgcgtcacatgattgttttgaggactgcttctgcttacctaggaaactactcatgccttactcagcaaatgaacatcactattacataaacatcaggtatccaaaagtgttagcaggcttgaggtatgaatgattcattcatatgggtaattaagcaagttgaattatggaaagcacctcacaattcacacaattcagctttgagttcaatgccaaatacgatgattcattaagttgactttgtattttgtaacctaatttgttaataagtaagttacaggaagccaattaagccagctgctgatctatatagtactaccttcctcattgtgattccatagtcttccaatagaaatgtgctgtcagaatctgtatagagagtttgtaaatgccactatttaacaaggttcttaagaatttaggtggatgttttatttgatacctaccaaagaagcctaagtaattgtataatacttaacccatttagaattcagttgtggcagcataaccaatctggagagaccaggggagatgttactaatgcttgtactttattcagaaatgagtgcctcattggcttggtgcagtgacgacacacctgtaatctcagcactttgggaggctgaggtgggtggagtacttgatctcaggagtaccataccagcttgggcaacgtggtgagatctcatctctacagaaaaatgcaaaaattagccgggcacagtggcgcaccagtagtcccagttactcgggaggctgaggcacaagaatctcttgagttgaggaggccaaggttgcagtgagccaagattgtgccactgcactccagcctgggcaacagaagtgaaaccctatcttaaaaaaaaaaaaagtcttttttttttttcatctaatcaaatttattgtggcagaaatcagtacgaagttcgtaggacaggaggaaaccaatataaatatctcagcattgtaggaaatttaacccatggaaagcaggggtgaattaaagaccactttgaaggctgggaaaagcagataatttagatatagtcaaagtatgaaatcattgatagatccagaacaaggaaatgatgtatgtgtttacatattacatctactttattaacaattttccctctgttaaactaatatcgactaatagtagtctaggtaagtcaagttcaaattaagtggtaattgaaaaagtcttctttttaaaaaatttttaatggtagaggcagcagctacccagagtctacttattcttacttcacattgaattctaacaagtttggttatctgatttctgcttcttaacaaatcacaagtatcaaaagggtcttgcagaaggggtgaactacaaaatgtgacagctgacagcaagtcaggggaacaaaaataaatttaaggtgaacattaaaggcatagcagcttgagacaatttataggattctgcatacaactgtctctgaggacatcactgtgatcaaattatacaagtgatgtttagtgatgaattggaatcaagataagtagtatgtgttattcaaaaaggcaggatatgtgttgcatttggtggtaacaatttccccttagctatttagttaaaagcttagtgcttaacatgttggaaaatttatatgtaaaatatattgacttactcgatgattggaggctttatcacaggaagttttcccattcaattgaaacatttttcaagcttaatgactataatttactacataattatttattttgttaaagtttgaggaaaactaaataaagcagtagcaatttaagtcataataaattttgttagatgacttcttccactttagggggaattaaaaatcatgtttaaaaaccacatgtgcagcagttctgtgactccctcaacatccggttggccatatagtccctttgcaccacagaggttggagtatagaatatgcccaaagctgttttgttttgttttaactatgcttcatcatctgaggttgtgttaacatagtttgtcctaatagtcttttactggaaacttgctatatttgatcatgttcagcaagtaaactaattttatctactttcatatattttgagacaaagtctggccctgtcacccaggctggagtgcgggggcatgatcgtagctcactgcagcctcagcctcttgtgctcaagcgatcctcccacctcagcctcccaagtagctgagactacagtcatgcttcatcatgcccggctaattttttatttttctaagagacagagtctcactgtgttacccaggctggtctcgaagtcctggactcaagtgatcctccctgcctcagcactcccaaagtgctgggattgcaggcatgagcaaccatgcctggtgttttatcttttgcagaaatccaatttagtaaagtcatgttgtagcaagcatcactttaatataaaaagtgtacagcttatattattagcaattgtactgtttaattttatattagttatggtcttgaaggacattgaaaatctgttcagaaagactatgtttttcaaccagagatgacatcactctaactttcctttggtttaaatgcttgattcttcgcttacaaaacttctgttttgaacaactatggtgagaaagtatatttgtgatactgttttcttagaacactgttgtcagatagatcagccataatgttaacacatttctgatctctattataaggctgtaattttccaaaataatacagaaaaggagaaaagggtagtacatttcataattagagataaccctgtactagtgagaaaataaaaatgtcaagtttattaaattttcagatttcctgtaatttttccattactatccctcataaatttctctgcatgatcacactaaagatataaattaatcacatccattcaacaaattaagaaactcaaaactcacaagtacaatcttcaaccctatagaatgctaccaagaagtaaaataagatgaaggtagaaagattctctttgagggccaggtgcggtggctcacacctgtaattaattccagcactttgggaggccaaggcgggcagatcgcctaaggtcaggagttcaagaccagcctggccaacatcgtgaaaactcgtctctacaaaaatataaaaattagctgggcatgatggcggatgcctgtaatcccagctactcgggaggctgaggtggaagaatcgcttgaatccaggaggcagaggttgcagtgcgccaaggttgtgccattgcattccagcctgggccacagagcaagactccatctcaaaaaaaaaaaaaaaaaaaaaaaagaaaaagaaaaaagaaagattcactttgaaatgctgcatgcaactatttagcaacacattggaaaatctagagaaaatgggtaattttctggaaaaatataaatgaccaaaactaatccaagaagaaatttaaaatgttaatagaccagttacaaagaagagaatgtaaagtgattttttaaaatccataatttaaaaagtactagggttgcaagaaggataattccaatgttatttaaagtatcccaaattttttttaaaaagaaaaaccaattcatttcacataggcagtgcagcattaatatgaaaacctgataaacataagacaaaactgtaggccaggtgcagtggcttacacctgtaatcccagcactttgggaagccaaggtgggtggatcacttaaggtcaggagttcaagaccagcctggacaatatggcgaaaccccatctctactaaaaatacaaaaattagcctggcatggtggtgcatgcctgtaatcccagcttgaacccaggaggcagaggttgcagtgagccgagatcacgccactgcactccagcctgggtgacagagcaagtctccatctcaaaacaaaaaaacaaacaaaaaaaccaaaactatagaccaatctgacatacatatgaatgaatattctaaataaaaacccagcactgttatcaataattgcaacaacaaaaaagagtaatacagtatgcaaagagcactgtatttcaggaattcatgggtatttcaatatcagttaagtatattaacacaattacataaatgacatcaaagaagagaaaaatgtgattatatcaataaatgctgagagggctattgttaagattaaacatccactcctaatgaagattcttgagtaaaatagaaattgaaggaaagtgtctaaacataaccgttatttatgaaacgcctacaaaacaagtattttaaatcatgaaacaacgtttcaattaaaacaaggaaccagtaggaatagctgctgtcattatttgttattaaagattatcttggaggatccatgaatgtaacaagatttttaaatgaaataatcagtataaatatatagaaaactttttgtggatatgattatatgcctaggaaatcatagagattaggaaaaacagaaatttcaaatattttaaagaggaatattggtaagttatttggaaataagatgataatacaaaatatattagcaataagcaccttgaaatgctagtggtaaaaatattcacaataacaaaaataataaaggtaaaataaatttaccaagaaaggtagaagatctataagaaaaaaactataaaaatgttaccaaaagctactgaataagaaacacatgaggctaggcgcagtggctcatacctgtaatctcagcactttgggaggctgaggcaggaggactgcttgagcccaggagttcaaaaccagcttgggcaaattgtgaaacgctatctctaaccaaaacaaaaagctagttgggcttggcgcatgcttatagaaccaggtacttgggaggctgaggtgggaggttggggcttcagtgagctgagatcccaccactgcactccagcctgggtgaca

SEQ ID NO: 98105 - DNA, 132517 bp, Homo sapiens
  misc_feature (1)...(132517): n = A,T,C or G
agccttgactttttagaaacaacaccaaaggcatgatctatgaaagaaaaaattataaactggacttaattaaaatgaaaaattctgctgtgcaaaagacactgtcaagaaaatgaaaagaagggctgggtgtggtggctcatgcctgtattcccacactttgggatggtgaggcaggcggatcacttgaagtcaggagttcaagaccagcctggcccatatggtgaaaccccgtctctaccaaaaatacaaaaaattagccgggcatcatagtgggcgcttgtaatcccagctactcaggagactgaggcatgagaattgctcgaacccaggaggcggaggttgcagtgagccgagatcacactactgcacttcagcctgggcaacagggcaagactccatcaccaaaaaaaaagaaggcctcatactggaagaaaatatttgcaaaagatgtatctgataaaggacttatccaaaatatacaaagaactcctaaaactcaacactaagaaaatgaacaactcaattaaaaagtggggctggcgcggtggctcacacctgtaatcccagcactttgggcggtcaaggtgggcggatcatgtgaggtcaggagttccagaccagcctggccaacatggcgaaaccctgtccctactaaaaatacaaaaattagccgggcatggtggcacatgtctgtaatcccagctacctgacatgctgaggcaggagaattgtttgaacccaggaggctgaggttgcagtgacctgagatcctgccactgcactccagcctggtcaacagacagactccgtttaaaaaaaaaaaagggcccggcacggtggctgacgcctgtaatcccagcactttgggaggccaaggcaggcagatcactaagtcagatcgagaccatcctggctaatggtgaaaccccgtctctactaaaaatacaaaaaattagctgggtgtggtggcaggcgcctgtaatcccagctactcgggaggctgaggcaggggaatggcgtgaacccaggaggcggagcttgcaatgagccgagatggcgccactgcactccagcctgggcgacagagtgagactccgtttcaaaaaaaaaaaaaaagtgggccgaagaccttaacggacacatcatcaaaaaaagatacagagatggcaaataaacatatgaaaagatgctccacatcaggctgggcacagtggctcacacctgcaatcccagcactttgggaagccaaggtgagcacattacctgaggtcgggtgttcaagaccagcctgaccaacatggagaaaccctgtggctactaaaaatacaaaattagccaggcatggtggcgcatgcctgtgatcccagctacttgggaggctgaggcaggaaaatcgcttgaacctgggaggcggaggttgcagtgagccaagatcgtgccattgcactccagcctgggcaacaagagcaaaactccttctcaaaaattaaaaaagtccatgcacagtggctcatgcctgtaatccccacactttgggaggccgaggcgggtggatcacctgagattggaagttcaaaaccagcctgaccaacacggagaaaccccatctctgctaaaaatacaaaattagctgggcgtggtggcacatgcctgtaatcccagctactcaggaggttgaggcaggagaattgcttgaacccaggaggcagaggttgtggtcagccaagatcactccagcctgggcaacaagagcaaaactccgtctcaaaaaaataaaaaaatgctccacatcatatgtcattaaggaaatgcaagttaaaacaacaattagatactgctacacacctattagagtggccaaaatccaaaagattaacaacattaaatgctggtgaggatgtagaactgatggaaatgcaaaatagtaaatccactttggtaggttgatgattttttctttttttaagtagctgggattacaggcattcgccaacatgcccagctaatttagcatttttagtagagacggggtttctccatgttggttaggttggcctcgaactcacgaccttaggtgatctgcccatctcggcttcccaaagtgctgggattacaggcatgagccactgcgcctggccgatttctttctttcttttttttttttttttgagagggagtttcagtcttgttgcccaggcagtagtgcaatggcgtgatcttggctcactgcaacatctgcctcccaggtttaagcaattcttccgcctcagcctcccaagtagctgggattacaggtgcctgccaccatgtccagctaattttgctttgttttattttattttatgtatgtatgtatgtacttattttgagacaaagtctcactctgtcacccagggtggagtgcagtggcgcgaccttggctcactgcaacctccgctgcccaggttcaagcaattctcctgcctcagcctcctgagtagctgggattacaggcatgtgccactgcgcccggctaattttttgtaattttagtagagagggggtttcgccacattggtcaggctggtctttaattcttgaccttgtgatccaccccacttggcctcccaaagtgctgggattacaggtgtgagccaccgcacctggccctgtatttttagtagagatggggtttcaccatgttggtcaggctggccagtttctaactcttgacctcgggcgatccaccggcctcggcctcccaaagtgctgggattacaggcatgagccaccgcgcccggccttaggttgatgatttcttacaaaagtaaacatattcttaccatatgatgtaacaattgtgctccttcgtgtttacccaaggagttgaaaatatattcaccccaaaagctgtacagagatgtttgtaacagctttattcatacttgcaaaaatgtggaagcaaccaagatgtccttcaggtgaatggataaataaaactggcacatctggacagtgaaatattattcagcactaaaatgaaatgagctatcaagccatgaaaagacatggaagaaactgaaatgcattttttttttttttgaggtggaatctcattctgttgcccaggctggagtgcagtggcctgatcttggctcactgcaacctccgcctcccaggttcaagtgattctcctgcctcaccctccggagtagctgggactacaggcgtgcgccaccatgcacggctaatttttgtatttttagtagagacgggggtttcactatgttggccaggctggtctcgaactcctgacctcgtgatccacccacctcggcctcccaaagtgctgggattacaggcatgagccaccgtgccccgcctgaaatgcatattattaagtgaaaaaagccagtctgaaaaggctacatactgaatgatttcacctatatgacattcgggaaaaggcaaaactatgaagacagtaaaaagattagtagtcgctaggggaataagggggagggaaggatgaataggtggaacacagaggtttttagagcagtgatactgctctgtatgatactgtaatggtggatacatgcacatttgtccaaactcaaggtataacaccaagagcgaaccctaatgtaaactatgggctttgggtgataatgtgtcagtgtaggtttgtcagttgtaacagatgtatcgttctggtgcgtgacattgataatgggggagggtattcatgtgtgggggcaggtggtatatggaattccttgtgctttccacacaattgccgtgaatctaaaactgctctaaaaatagtctataaaaaagtgggtctttggctagagttacagaaaaaaaaaaaatgtggggtcaggaccaggcatggcggctcaagcttataatcccagcacttcgggaggctgaaagcaggaggactgcttgaggctaggagtttgagaccagcctgggcaacatagggagactccccctctcaaaaaaatgttgttgttgttgttttgtttttttagctaggtgtggtggtgcaggcctgtagtcccagctacttgtgctgctgaggcaggaggaccacttgagtctgggggattgaggctgctgtgcgatatgatagtgccactgcactctagccttggcagggacagagcgagactgtattttagagcctttgcacttgctgttcctaatgccagcatgttccgctccccgtctcgcatatctgcttggttgcttttttctcaatgttcagatcgagttatttctttcgagaagacttcctggttcaccataccaccattcttatactggcgcgtgcgtgccgtgcacacgtacacacacgcgcgcacacacacacacccctttctcccttaccctgcttcacctttttacagaatttaatactgtctgaaatgtacttgttggtggtgtcctgccactaaatcccggagggaacggatttttgtctgttttgctccccatgatctaaaacagtacttggcacaagaggttcaacaactcgttgaattaatgaatagtggacatgaacttgacaaaacaggttccctgcctcaagaggcatggccgcagtgaggagacgttaaaagaattaaaactgtatatgtttagtgggaacacaggagcctttaaattagctcagaggatttacatagatacctgcgataaaatggttcgtataaggttcatataatagttacgtaagactcttgaaaactgtaatgtattatgcaattttaagattgtatcatagctggcgaaaatgaggtcacatcttgccattcttttttcgcctcgaaaaattttatgaggaaaatttcctttcacttcctcatttatttccttttcctgtaacctaaatggtcaagcggctgtgaatgttatcttctatgggcagcaataaatacggtttggtgtcggagtctgcgtagtgaatggctcactggatctggcgcatgcgcatcttttgtggtgccgcaagatggctgccagccattttgtcgcgcgttgctcctccgaggagttgggggcgatggctgcagccccctgaagactaacagtggtctcagtggtgggaattttctgtctctgttgtgtgagctgaacacacccaagagagcggccaaaagcagcaaagggcggggcaggggaacccccccacccggctaaccttagttataccagctccctcacccatccctcccagtttttccttccatcccgttacacgcttatcttctgcgcaggcgcaaaaataatcgtagcgcctcctgggccctgggggcttcagagctcctgcgcgcgcttgtggttctccactcctgattggtcaggttgccccgccatcacgcctccctctgctttcaaggttgagaaggaagcaggggtaggggggtggggccaagtggcgcgtgcgcgatactgttgctgcccctttgctgctattgcgttgcaaaaaaaatcctgactaggtagccttggaccttttctgtgctagcgagtctaaaggaaagaaagatttctgcaactgaaggggcagtcgggtagtattacatttaagatattaacgcccgacctggctcacaggagtgtgggaacaggggcggggaagggccttagcactgagagccgaaaagtataaaacgattagtttcggcgtcaggcgttttgaaaggctttgcaggtcctgttttctgcgtaatttttccgtgattactgactggtttaaacacgaccccttgaacaatattgataaaacctccgagacccgcagcccctccttgcagcgtgtaggagctgccagcgtgcccagcagctggtgttcccgtccgtacctccagaagagcccagcgcgtgcaccatccccaccccctagcttccctccccacctacggctttcacgcactcgcagtgattgttttgcccgctcccgccgccgccgccgccgccgccgccagaggagcagcagcgcttgtgcaaaccgggaagatggcggccggcggcggcggaggcagcagtaaggcctcctcctcgtcggcctcttcggcaggggctctggagtcctcgttggatcgaaaattccagtckgtaaccaacaccatggagtccattcaaggcttgtcgtcttggtgtatagagaacaaaaaacaccacagtactatcgtctatcattggatgaagtggctccggagatgtgagtgttgggggtgactagggaagggaagactggggaaatggaaggaagtgtggcctgaaacgcttggggttttcccacggagccgcagcatttggttggggttgttcacattaaaggtttgaccccagtggtcccaaacccagactccattcctagccaggattgtcctgaattgcaggagactcatttcttgggttttttagccattgaattgttgtgaccttgggccgttgggcccagatccatggagatttacgtatattgtttttaatatttcagagccttgtaaggtgtattgatttttccgaaccttcgcggaaattgtagcgtctgtttatttcttacaggccttgacgtgttaatgatttctggctttcctgatggtaggcgagctgtggttttaagcagtagtaaatccagtgatgtttaatgaggagtgccttgtctggatgaatgtatctaaaacttgtgatgtgtagtaaggagagccttacctggatgaatgttaagaagcagcatgagctctacatagatctgaggcaccaccgggttttccctgtacctgtgtttgctgcaataaaatacaggtttcttggatactgaccagaaacaactgcgatacagtagtcagtatcatcgttaataccttcaaatataaagcgtgtccagttcctctttttttttgagacggagttttgctcttgtcgcccaggctggagtgcagtggcgcgatctcggctcactgcaacctccacctcccgggttcaagcgattctcctgtctcagcctcgcgagtagtcgggattacaggcgcccgccaccatgtccggctaattatttgtatttttagtagagacggggtttcatcattgtggcctggctggtctcgaactcccgacctcaggtgatccacctgcctcggcytcccaaagtgcagggattacagacgtgagccccccgtgcccggccccgttactttttaattacctgaaatacctttttacacaattgagttgatctcatgggtaatgtgcacaggaaatgtgctttttgaatatgtagtacctttttctccagttatgttttttttgtctttatcctggagatttttccattttgctgctttactgcagaaacgagctctgttaaagcatggattgtttgcagaacgtttcaaatcttataggaggaagtgtggagaagttactgtttcctgctgagaagagagggttaactcatactccatatacatctattagaatttttctttgcttcctgcctgcggcatttcaccagtgagacccatcatccagttattctgccttattccacttctgccattgctcctgtagtgttttgatttgtttaccttttagagaacagatagataaaacttgcaaaattataggccccatgcttcgaactatttgtgtttaaagttttgggagggatgttttgtggttctttgaataataatgcagagaaattagtagataccggacagaattacctgtgtttaccaataaccgatcaaagagttattttcttgcccagaggtaaaattataacgtgcaaaaacatcaaatatgmtaacagtcatcattgaagactcacatgttaagtatctgctatgtgcccagtcatctcattgtaccttaaaatcgtctgagaagtagattttttaatcactgatttacaaacgaggaaactaagactcggaaattaagttgcttaaggttactcagtaaaatggtggggttagggtttgacttcatcattaactttgtaaaataatgtttaacgttcttggtataccagtgatatattgcaaacagttctaatgtgagtgagagaacctcttctccaccctattttaaaacatttttactgamctatgcaagcattttacatttcctcaccttgggctctggggctttaactgtatggttacatcatttgcaagaataagttggtccctgtcccgtctctgctgtgtgggatcacaagcgacaattacagttttttttctagtcagcaataatgagataaaatgaagccagaattttttacctcagctgttgttgctattgtgcctgagcttatttcctttattgataycttaagagtgaaaaaatgaatgctccaggagggcagtgtgtcagttgaagtgcattgtgtatagtttatatagttaagtgcttttggctaaatatgatgttgtttttctagtggaatggaatttaactttctaaaatgattaagggtaattttagtcgttttgtatttacatttaatgaacttcactggtctcattgtaaataaagcgttttgagagaaatattcagcagaatggtgtggggcgcaatgaaaacagtttatgcatgggccttgttttcatttaagttcttatttctttacagttatacttagtttactctgagtttggtttctaagtcagctttaggaaaaattgtgaagcaggtatctttggactctgagtttggtttctaagtcagctttaggaaaaattgtgaagcaggtatctttggcattcccagcctttctgtccattttcctgatgccactttgcttctcttttttcttctgacatccgttatttagtaatttatatttatatttagacctcagtataaatttaagtaactattagattccagagatattttaattttatcctttatttcagtgtgtaatgagacttttgttcatataaaaggaaataatttagagaaataggctatctaaggatatgttccagagatatttttattttatccttctttacttttttttttttgagatggagtctcgctctgtcgtccagactggagtgcagtggcrcgatctcagctcactgcaacctccacctccagggttcaagcaattctcctgcctcagcctcccaagtagctgggattacaggcacgcaccaccacgtccagctaatttttgtatttttagtagagacagggttttaccatgttggccagggtggtctcgaactcctgacctcagaccatcattttctaaggtgatctttctgtagcataaacaaatgtcattcctctgctttaaaaccctgcagtgatatcccattgcaacaagttgaaggtctgaatttcttttacattgatctgtaagtcctgtaccatctgctctgcctacctcgggcttcttcacatcctgcctccttctcattgtttagatcaaatctcaactattacctcctcagaaagacctactttgatcaccttatttcttgtttttttttttttttttttaatacggagtcttaatagatttttttaaattacatgtatctgttttttatttattttaaattaatttaatttaatttaatttttttgagatggaatttcgctttgtcgtccagtctggagtgcggtggcgtgatctcagctcactgcaacctcttcctcccaggtcaaagtgattctcttgcctcagcctcctgagtagctgggattacaggcgtgcaccactaagcccagctaatttttttttttttttttttttgagacagagtttcactcttttcacccatgctggagtataatggcacgatctcagctcactgcaacctccgcctcccaggttcaagtgattctcctgcctcagcctcccaagtagctggaattacaggcatgcgccaccatgcctggctaatttttgtatttttagtagacrcagggtttcaccatgttggccaggctggtcttgaactctggacctcaggtgatccacctgcctctcagcctcccaaagtgctgggattacaggtgtgagccgccgcacccggtacctggctaatttttgtattttttgtagagacagggtttcaccatgttggccaggctggttttgaactcctgatctcaggcgatctacccacctcagcctcccaaagtgttggaattacaggcgtgagccactgcacccggcttcgctttatttcaagtagtgccttcaattgctgtcacatcatcttattttcagtatatgatattaccttgtttgttacacgtttattgtctggcttccctccaccagatgacaagtttgtcttatttgttgccctgtccccaaacaactaggatagtgctggcgtacagttagcaatcagtaaatgtttgccaacataatgtgaaatagctaatcaagaacttaaggaacagaattgctttaatttctgtttatcagaaggaagcatttataatttagtgaaagaaattacaggtgcagcagttggaggcatatggacttgatgtgcaatttgcccagattatcatttctgtacttcgttcttctttctctcttttctgtggggaggtgggggagggacagagtctggctctgttgcccaggctggagtgcagggcatgatctccgctcactgcaacctccgcctcctgggctcaagcaatcctgccacctcagcctcctgagtagctggaaccatgccaccacacctggctaatttttttttttttttttttttttttttttttttgagacggagtcttgctctgtcgcccaggctggagtgcagtggcgcgatctcggctcactgcaagctccgcctcccgggttcacgccattctcctgcctcagcctcccgagcagctgggactacaggcgcccgtcaccgcgcccagctaattttttttttttttttttttttttttttttgtatttttagtagagacggggtttcaccgtggtctggatctcctgacctcatgatccgcccgcctcagcctcccaaagtgctgggattacaggcgtgagccactgtgcccggcctacacctggctaatttttatgtttttgtttttgtttttttttgatgcagagtctcactctgtcgcctaggctggagtacagtggcggaatctcggctcactgcaacctccatctcccgggctcaagtgattttcatgcctccgcttcctgagtagctgggattacaggcacatgccaccacgcccaactaatttttgtattttttagtagagatggggtttcaccatgttggccagactggtctcaaactcctgacttcaagtgattcgcccacctcagcctcccaaagtgctgggattacaggcgtgagccaccacgcccggccaaatttttatgttttttgtagagacgaggtattgccatgttgcccaggctgaactcttgggctcaagctatctgcctgccttggyctcccaaagtggtaggattacaggcgtgaaccaccaggcccagaccttctttcccatttttaatggtaaaatgggaatcaatatggaaaaatataaaagaggcctgtgttaacatgttaactccggtcacttaatactggatgacactttgcaaagtacttaaactgtgaacctcagtttttcatctataagtagttctgtacctgtagatgaaagttctacaatctacaagtagagataattctgtctggaatttacattccagacactgtctacagtgctggaaattacattcccagtttgtgagagacgaattggactagcctctctgtagtaaattagcatatgctttgaagaactaggaggacaaaatggaaaatattgtgttaatgacatccattttgtcttttttttttttttttttttgagacatattcttgttctgtcacccaggctggagtgcagtggcatgatcttgactcactgcaacctctgccccctgggttcaagtgattctcctgcctcagcctgccaagcagttgggattacaggtacacacaccacacccagctaattttttgtatttttttgtagagatggggttttgccatgtttgccagtctggtctcaacctcctaagctcaagcagcccaccctccttggcttcccaaagtgctgagattacaggcatgagccaccgcactcttcttagctatttttcatagaaactttatgtataaaaatagaagggtaatgacacaccacctttctactgatctccccacttcagtagttatcacataacagtcttttttcacctatctccttcactttacctcctctcccttagtactttgaagtaaatctcaatgcaagctggtatgtttttcaaaatgaaacatataaacatggactagaaaaaaatctcttcatacaggatttggttttgcagagaatttacaaagtacggttaatgtatgccaatggtttctcagtttggatatcgagatccttagatggaccatgaagctggtaataattttatagctaacttttgttaagtgcttactatatgccaggcactgttctaagcattttacgtgtattcattcattcagttctcacaactcttttaattaggtattattatgatctccattttacagattagaaaacagaggcacaaagaggttttttgtttttgtttttgtttttgagacggagtctctctctgtcacccaggctagagtgcagtggcacgatcgtggctcactgcaagctccgcctcccgtgttcactccattctcctgcctcagcctcctgagtagctggtagctgggactacaggcacccaccaccaggctggctaattttttgcatttttggtagagatggggtttcactgtgttagccaggatggtctcgatatcctgaccttgtgatccgcccgtcttggcctcccaaagtgctgggattacaggcatgagccaccgtgcccggctgtgccaagaggttaagtaacttgcccrtggttacasagctaataggtggtggagatggagacagaattcaaacccaggcattcttgatctacagtatacactcttacccaccatcctacacagcctttcttattcataaaatattttctacagtgcaagaaaattttgatagcttgcttatttattcaagatttagactatatagattaactagactatcaagattttaaattcttgtgttttttgtttttttccccctctgtggcataactatctcttagtgatttgaagttctgataggcatttatttatgtttttgattaattaaaaaaagggaaaaaaatggaacataattattgaagctatcgtytaggtaaaaacctttctaaatgtaaggttcatttagattgatgacctgtagagtgtaacagtattgccataggcatacagctttttaatcacatatcatacataaacaaattagtaatacaggtgggtagatacagaccctaactttgagctctaagatgaaatttgtttataaatccctagtttccattcagttttttcaatatttatcaaacacctactgtgccaggcattgtttaggcacaggggatacagcaggagaacaaaatgaacaaaattttttgccttcacagagcttaaaatttagccgggcttggtggtgcacacctgtggtcccagctacttgggaggctgaggcaggagaattgcttgaacccgggaggcagaggttgcagtgagccatgatcatgccagcctgggcaacagagtgagactccgtctgaaaaaagaaacacacacacacacacagacacacacacacacaaagacagcatatactctagtaaggggagacagacagcaaacagataagtaaaatattaaacataatagaaggcgataaatgctctagagaaatagaaagcagggaagggggaaacagaggggtttgcagttttacattaaatggtaagggaaggcctcactgagaaggtgacatctgagtaaggaggtatgatattaagcaatatagacatgagggtatgaggtgggcatgttcaagactaagtgaacagaaaaaacaaaagtcctgaggttagagtgtgcctggtgagtttagggagcagcaagaaagcttctgtgactggaaaggagttgttaaaatgaagattagtggatgagttcaaagagattatggtgggtggtgttggggaggggtgaaatgggattcaccaagggttttataggcattgtaaggactttggtttttattcagagtgagatggtgagccatttaagcaaaaggagatgaactctttttttttcttttttttttgagacggaattttgctctgttgctcaggctggagtgcaatggcaccatctcggctcactgcaacctctgcctcccgggttcaagcgattctcctgtctcagcctcctgagtagctgggattacaggtgcatgccaccatgcccagctaatttttgtatttttagtagagacagggtttcatcatattggtcacgctggtctcgaactcctgacctcaagtgatccgcccgcctcagcctcccaaagtgctgggattacaggcgtgagccaccacgcctggcactcgtttgtttttaaaaggttattcttgtttctgctggaacagggataccaattagatggctattgtaatccagtgtaaaatattgatggcttggaccaggttatggccagcggaagtgataagtaatttaattctagatctattttgaaagtaggtccagccagatttctaggtggattaaatgtggggtgagagaggaggagaataatcaagaatgactttttttttttttttttttttagcttgagcaactagaaagataagagttgacatttattgatatggggaaggctgtgagtggagcagattttgggaagaagatgagaaatttagttttggatgtgttaggtttgggatgtctattttaagaaatcttttttaaagatataattcacaaaaaatatactcatttaaagtgtacaattcaattgttttagtatattcatagagttgttcagcaatcaccatagcgtgtctagtatatggattgtttttagagccaggaagctggaagagatcaactagagagagagtgtagatagggaagtaagtctagtaagatagagcagcaagtacagatatagaagaggtccagagagaaggctatggtattatgaaatctctatttggtctctgtcccatttcctggcatactacttcaaaaatccttgggtcttcaaggtgataagtgtcattttgtatgctaatgagttgactgatggttggcatcccctgggtagcctaaggatgggggctggtcactggaaagaataaggcaggactagaggttgtgactttccgccctaccatctaacctctggggaagggagaagagctgaaggggtaaactgaacaccagtggccagtggtttaattaattatgccttcataacgaaacttccataaaaatccaaaaggactggttttgggaagcttctagacagcaaaacatatggaggttcctggaggttggcatgcccagaaagaacctagaagctctgcactcttagccctaccttgccccctccatctcttcatctggtgttcattggtgtcctttgttatgtcctttataattaaccagtaaacgtgtttccctgagttctgtgagctgctcaagcaaattaatggaacccaagaagggggttgtgtgagccccgatttatggtggttgggtcagagcaaatgttaacctgagatttgtgattggcatgggaagtggggggcagtcttgtgagactgagcactcagtctgtgggatctgatgctctcttccagtgtcagaattgaattggagggcacctagctggtgttcattgcagaattgcttgcttggtgtgtgtggggagaactctcatacatttggtcaaagaagtctttgttgattgttgaatgagaatgtaggaaaagcacttttaagtttgtttattctctattctcagaaggctgttggggcattctagtattttagatgactctttctacttagtctagtgtgttattggcttaggttctttttgaggttcaaggtaaactttgtctcagccccccaaagaagtaataaatctattttggtctcttgcrtatttttactcttggtttacgcttaatggcatttctgtattcattgagcaggagctctgttataattggttattatccaycctctccctcccctttagatgcctaagtcaccttttttttttttcattccattgctctaggttcatagagttataggtggtatttttccaggtttctggcaatgtttcgaaacatggaactgtcttaattataaactataattattgtaatggtatatattaagcctttttgtctgtattgtgagactttccaagcagttgttatcttcttccttttagctgcttagtctcttacagcagaagggtgatttcatccatggccttaggtgggtttgaagcaatatgtaaaacataattttactataccaaattccatagtaagctaaagagtaaattttgtagcaaataaacattcccataactaaaagtgtgaaacactactgacaaacttcacatggttctgtgacatggaggtatcttgaaaggaaaattacaatagcagtggaaaaacactaatattaaaatttgctcacagaggccacccagaattactttaatgttagttttgtctgtagaggagggacgagtgtatgtatgtgcgtaattttttagggagtagaagcttactgattttattcttttttgttgttatcagcttccttgggttgaatgattttactcttaatgatttggcttcctgcctttcttaaactaataaataatagttgcatcaaaattctttcttcctcctaggcttttgtcagttatgttctcttttttcctcccactttttccaggtgtttattgttttacagcagtacttttaaaagtcaaaaggggagattttggtcagttgttktaaaatttcaattgagaattaaggatacatgaggtttaatttgttgaaggaactcagagaccctaataaaaattacccaagracagaacaatttacaaaccagcttgactgactttctcatctatttgtcaaggaaacaaaaagtagttgtgtttcgtagtgatttcaaattccactgcccccacagatattaattatagaacactggaggaatgtacatcttagggagaaagtagtagaacctagttattccttttgagaaaaggcaacaattccatctgtgctttgaaatattaaagcttttctggctaagataaagatagtttttaaaaatgcttcattcttattctcttgtttttagagaaatattgaaatagaggctctttgatgaaggaaatgaaaatgtttggtttgctgggtttaaattttactagtgtttgattgaggccttgatctctccctcatctctctttcttcacttctttctcttataattaatttcacttacttgcactttctagttctctggaatccattagcagagagagagagtgattctttattaccctttagtaaaagttgcactgtgaaaggaaaaaaggatcttttaatgtttgggattataacttaacattttttgttttaaaaaacctagaatggatcctgagctgtttttgtgttcctttactgtcatcatagttttagagtgtagcatgatacagtctttttttttttttgagacggaatcttgctctgtttgttgcccaggctggagtgcagtggcgccatctcggctcactgcaagctccgcctcccgggttcacgccattctctcgcctcagcctcctgagtagctgggactacaggcgcccgccaccacgcccggctgattttttgtatttttagtagagaaggggtttcaccgtgttagccaggatggtctcgatctcctgacctcgtgatccgcccgccttggcctcccaaagtgctgggattacaggcgtgagccaccgcgcccggccgatacagtcttttaaaatgatgatctttgtgtctaggaggcagtattacttgaaagattaaaattctcttataatatgttatgcctaaagatacagaatgagaaaatgaacttagaaatactgagtgctggccgggcgctgtggctcacgcctgtaatcccagcactttgggaggccaaggtggggagatcacctgaggtcaggagtttgagaccagcctggccaacatggtgaaaccttgtctctactaaaaatacaaaaattagctgagcgtggtggcatgtgcctgtagtctcagctactcgggaggctgaggcaggagaattgcttgaacccaggaggcagcagttgcagtgagctgagattacgccactacactccagcctggtgacagagcgagactatctccagaaaaaaaaagaaaaaaagaaaggaaatattgagtacttcctctatgtaaacccctgtattgggtgctgaaagagatggaattataaggaacttaacatttagtaaatgggccgggcgcggtggctcacgcctgtaatcccagtactttgggaggccgaggcgggcggatcacgaggtcaggagattgagaccatcctggctgacggtgaaaccccgtctctactaaaaatacaaaaaattagccaggcgtggtggcgggcgcctgtagtcccagctactcgggaggctgaggcaggaggatggtgtgaacctgggagacagagctggcagtgagccgagatcgtaccactgcactctagcctgggcgacagagcaagactgcgtctcaaaaaaaaaaaaaaaacatttagtaagtaagataggaattgaacacatataactggttctgggaagtataataatatgagttttatatgctctaacagtttagaataggtatcactttggttggattgctggatccttattgtttactgaggatccttactagctatcatacatgtattacctataatcttgatgtcagctctgcaaaatatgaatttgtaaatttataaaaaatatgaatttataaaatatagatgtgtaacagttgaatttataaatttattaaaaatttataaattgagtctcagagaagtaaattgattattttggggaaattgtcagaacatttatagtgtaggaaaaggaaacgtgcctggtttcagagtggctaagcataagcttaattttgttttatataagcagaagtcacgtgaaggtaagtgggagaaagaaaagaaatacggtggattcaaagcccaagttgcttacaagtatgttgttattacttaataatcttatatttccagtcattaatgtagttaattttacaaacataacactaatagtttagtaagaaaataacatttactgagttcttatgtgatttcatttaatataacaattcattagttaatgtattattactgagtaaatctattagtgatgtatatgtaaattacactggtgacaggtaaaataataaaccctataaatgacaataaattaagtacttgagggctcagtgaggttaaaataacttgttcaaggtacacaactaatgaacaatagagccaggttgcaaacttaagcagtcttgactccaaggcctacactttaccattatggtagacggcttcctgcttctttcagagtatattggtattttatagtgttccatggacagtgtggtatatacaggataaaagttcccaaacagccttgcacctgcccattctcatatagaagcaagtagaagaacacacttctctccttttaagccagaccattaaacagatttgcaaaaatgraaaacaatttgctcccactaaatttttgttttacaaaatatagttatttttaattaagaaataatttattggctagacagggtggctcactgagtgcctgtaatcccagcaacttgagaggccaaggcgggtggatcacatgaggtcaggagttcgagaccagcctggccaaaatgaagaaaccccatctttactaaaaatacaaaacttagccaggcatggtggtgcgcgcctgtaatcccaaccacttgggaggctgaggcaggataatcccttggacccggaggtggaagttgcagtgagccgagatggtgccactgcacatcagcctgggcaacagagtgagacttcattaaaaaaaaaaaaaaaaaaaaggcccagctgaattggctcatgcctgtaatcccagtactttgggaggcccgagcagacagatcacaaggtgaggagttcaagaccagcctggccaacatggcgaaaccctgtgtctactaaaaaaaaacaaaaattagaccgtcatggtggcgtgcgcctgtaatcccagctactcaggaggctgaggcaggagaattgcttgaacctgggaggcggaggttgcagtgagcccagatcacgccgttgcactccagcctgggcgacagagcgagactccatctcaaaaaaaaaacaaaaagaaagaaaagaaataatttattgattgtaatggatttattgtttttaatgggttaatggatgtttttaaattcttaggtttaatttctgtttattttatttttatttacgtatttttttttgagaccgagttttgcttttgttacctaggctagagtgcaatggcgccatctcggctcactgcagcctccgcctcccaggttcaagcgattcacctgcctcagcctcctgagtagctgggattacaggcatgtgccaccatgcccggctaattttgtatttttagtagagacggggtttctccatgttggtcaggctggtctcgaactcccaacctcaggtgatctgcccgcctcggcctccctaagcactgggattacaggtgtgagccactacgcctggcaaatttttgtatttttagtagagatgggatttcaccatgtgtggccaggatggcctcgatctcttgaccttgtgatctgcccgccttggcctccctaagtactgggattacaggcgtgagccaacgcacccggccaggtttaatttcatatagtaaatagccatagctataacccacaaaaacawaactctttgaggtcctcagtaatttttaccaatataaagggtttctgaaaccaaaatatagaatgacctttgtcaattttctgcaatgtagatatccattgtctctcatcttaacatcgcatattgcccgatsgtctctaggctttattttatcaaccagttaatttttatttttaatttgtgagatcataagtttgttagctttttattttgccaaaaatggacataaaaatatactacatttatagcatcactacccaccattttataaactatcactttattaaaaaggttatactttaattccaaaagtgttagaaggacattttctcagaataaaggataaaccttcaaactacataaatttagctatttgaaaaatttgctttgatgtccttgtctttcagatctcagctcaggtgtcatctccttggaggttgaccttatggtggttgtctgagagcccacctctttccctcgcccatcattctcttatcatattaccctatttttttttgttttttttcctcctgggttcaagcgattctcctgtctcatggcaagcagttctcctgtctcagcctctgaagtagctgggattataggcatacaccaccatgcccagctaatttttgtatttttctagtagagatgaggttttgctattagccaggctggccttgaacttctgacctcaggtgatccacctgcctcagcctcccaaagtgctgggattaaggcgtgagccaccacacccggctcctattttattttatttttatttttttgggacggagtctctctctgtcgccaggctggagtgcaatggcgtgctgtcggctcactgcaacctctgcctcctgggttcaagcgattctcctgcctcagcctcccgagtagctgggattacaggtgctcgctaccacgtccagctaacttttttgtatttttagtagagacggggtttcaccatgttggccaggatggtctctatctcttgaccttgtgatctgcccggcttggcctcccaaagtgctgggattacaggcgtgaagcacgcctggcctttattttctttatggcttttctcattataagatactgccttgtttatttatttgcttatttattgagacacatggcccccctcacccccaaaaagaatgtaaactgctaacaacagattatttgttttgttcaccactgcatcctcagcacctagaagaaggcatggaacatagaaagtgctgtaattgtcagggtgtgctggcttatgcctgtaatcccagcgctatggtaggccaaggtggaaagattgcttgagtccaggagttggagaccagcctgggcaacatagtgagacccccatctctacaaaaaaaaaaaaataggtagacatggtggcgcgtacctgcagtcctagctactcaggagcctgaggtgggaggattgcttgagcctcagtggttgaggctacactgaattgtgattgtgccactgcactccagcctggaaaacagcaagaccctggctccaaaaacacaaaagtgcttaatcaatgaatcttccttaagtgtgaccccagaccacacgttgagaactgctgcaataggacacaattttttttttttttttttgagacagggtcttgctctatcgcccaggctggagtgcagtggcgtgatctcagctcattgcaagctctgcctcctgggttcatgccattctcctgcctcagtctcccgagtagctgagactacaggcgcccaccactgcgcctggctaattttttgtatttttagtagagacggggtttcaccgtgtcagccaggatggtctcgatctcctracctcgtgatccgcccgccttagcctcccaaagtgctgggattacagacgtgagccaccgcgcccrgccacaggacacaatgtttttgttagatttatgtatgtagggagacatactgtattgtactgttgtatgttggttagttggtaaagaacatgggcttcgatctcaaatagacattatggttgctactaacctctgaaagcttttaaatagggataataattgtatagctcaccttatatgattgttggaattaaataagatgcttcatatgaagtgtttggcaaactacctgacatttagaaaattcagcaaatgataacttgtcatttaaaatgcagttatgatatacagttattataacrttttatgcaggcctgtctgcataagctttttaaattcttccgattaatcctgcgtactctatgtgaaatgtttattaaggttaataatgtaaaggagtggacayggctttttttgagccctttcttattaatattagcaaatagcaaaagaacatataatttggaagctgttttcctattttgattatttcaaggacctattcatatagcaacatcttgtagttctagaaattcattgagaacttaagaattttttatgtttttatagcttttttgtttgttaatttgtttgtttgttttgagacagagtttggctctgttgcccaggctggagtgcaatggcgatctcggctctgcctcccggattcaagtgatcctcttgagtagctgggattacaggcacccatcaccatgcccggctaatttttgtatttttagtagagacggggtttcatcatgttggccatgttggtcttgaactcctgacctcaggcaatctgcctgcctcagtcacccaaagtgctgggattacaggcgtgagccactgcacctggcctatagctattgtgctaatataaatgcatcttgttgggtgcggtggtacttgcctatagtcccagctacttgggaggctgaaatgggaggatcacttaaggccaggtgtttgaggccacagtgcaccctgatcatgcctgttaatagccactgaactccagcctggtcaacataggaagacacctttctagtttttaaaaataaatgaataagagataaggtttcaccacgttgcccaggctggtctagaactgctgggctcaagcaatctgcccacctcagcctcccaaagatgccagaattacaggagtgagccactgtgcccggctgggattttttatttttatttttttgaaacagagtctcactgtgtcacccagtctggggtgcagtggtgcgatcayrgctcactgcagccttgacatcccggactcagttgatctttcccatctcagcctcctgaggtgctaggactatgggtgcaggccaccrtggtcagctaactattaaaattttttgtagagatgatgtcttgctatgttgcccaggctggtctygaactcctggactcaagctatcctcttgccttgacctcccaaagtgctaggattacaggtgtgagccacgagacctggcctcaaataagaggktttttttttttttttttttggtgacggagtcttgctctgttgcctaggctggagtgcagtgcagtggcgcaatcttggctcactgcaacctccayctctcaggttcaagcgattctcctgcctcagcctcctgagtagctgggattacagatgygcgtgccaccacgcccagctaatttttgtatttttagtacagacggggttttgccgtgttggtcaggctggtcttgaactcctgacctcaggtgatccacctgcctcggcctcccaacttgctgggattacaggtgtgagccaccgtgcccagccaaagaagagattttaaaaggacatcagtattcttggtgtcactggatttttaaaaataaataatagaaacaaggagtataaaacaatttcactttaagaagacttaaaaaacctgataatagaaaagtgaagagcttttgaaattcattcataggacatccccacacatgcatgctatttttagtatcaactaggataagaattcacttctgtcctcttaggcttctcagattgccatatgtagcacatatgcatcaactgacaaatgtgataagatatggagaaaatataccatactatagtagtgaacaaaaataacagtacaaatttgtactttgtgcaacagaatttcccaaaaagtggtgatagtttagggtttcactgtcaaagtttaggaactaccaaattaaagttaaacctgctttcatgctgctggactttagtacccttaatacaaagacctatgagtttctggaaggggtgggtaggatattcagcattttccaaacttatttgaccatggaatccctttcgtttttagccatctcatgtgactattgtttcctggaacgtgcttggggaaaactttggtaatgtaagagtttctgggaaaatcctagttgcagagcagggagtaccaatttatatttgtatacagtaagaaaggcttcatggaggaaacggtttttcaaaaactatgtgaaacaggtgaaagaagacatccgatatataagcaaaagtgtgaaagartcagagaggagtcataaccagaaggcacgcatgcatagctaagtgagaatggaaaagacagaaggaataaaaggcatcatcatcatcyattattatyattattattattattattattattattattwgggatggagctcttgttgcccaggctggagtgcagtggcasratctctgctcactgccacctccgcctcctgggttcaagcagttctcctgcctcggcctccaagtagttgggattacaggcgcctgccaccacgcctggctaatttgtgtgtgtgtgtgtgtgtgtgtgtgtgtgkgtgtgtgtgtgtttttagtagagaccaggtttcaccctgttggccaagctggtcttgaactcctgaccccaggtgacccacctgcctcggcctcccaaagtggtgggattacaggcgtgagccactgcacccagccaaaaggcatgatttttaagacattaagagttgtggtaggggaatatatttaaaagaaggtaactagctgagtgtggtggtggcgtgtgaagtcccagctagttgggagactaaagcagaaaaatcactcagcccaggagttaaaggctataaggcatgatgattctggctgtgaatagccactgcactccagcctgggcaacatagcaagactccatctcttaaaaaaggtaattacatgtacacataaaagctacaataaatggtgattgtaacactgagccaagattactttttgtaatactagtattaatataacatttgggttttattcaaagcttttgaaattcataaaattgaaattagtgaagtggctggatgtgcggtggctcatgcctgtaatcccagcactttgggaggctgaggtgggaggattgcatgagcctgggagtttgagatcagctggggcaacatatttaagagtccatatctaaccccrcaccacccccaccaaaaaaaaaattagtcgggcgtggtggcatgtgcctgtagccccaagtactcgggaggctgagacagaattacttgaacccaggaggtcaaggctgcagtgagccatgattgtgccactgcactctagcctcggcggcaaagcaagatcctgcctttaaataaataaataagtagttaatatatttaatattttaagtattatcattctagaatatcaaatcaaaatataaatttacaaaactgtaaatatgtaaatattaagtatgggttatcataatacaaatcattagctcctactggctttgccatgtcctttgactttggtctttttgctagaggtacccttagtgttgtcatatgtgatgtagctggttaggttggacttcagtatcatcttgccatgtttaactcccctgagtagtgctttcagagctgtctctgttgagtggttcaaaattgctgaacttttaatttttctcttggccaacttgactaagatgccctaatagaaatctgaatattttctttccccaaggagaaatcctttgttatagagggcttttttcccccttgggtgcatattctcaatcttttaagtaggtggtgacaagggtagaggggaatgagttaggggagtttcctgagttgagtaataaatcgtaggtaagtagggtagagtttgtattgaaagtgagaggggtgtggtgtatgattagatagagagaagacattaaggtaagaaagataaataaagctgattttgtattatgccaagaaaaataccatattttggttcttacctatttttatttatttatttattttactttttttgagatggtgggggatctcactatgttgcccaggctggtctcgaactcctgggttctagtgatcctcccaccttggcctcccatcgtgttgggattacaggcatgagccaccgcacccggcctgtattttggtatttgaaatagcacagttggccaggcgtggtagctcatgcctgtaatgccggcattttgggaggccgaggcaggtggattgcttgagcccaggagttygaaactagtctgggcaacgtgacaaagccccatctctaccaagaatacaaaaaaaattagctgggcttggtggtgctgcatttatcaataccataagtttatgtcactttttacaaaatgaaccatctgaaatggtgggcacctgcggctggacacctcaatctgtggtacatattgagcagtccaactttttttgataatgtcatgacttttctttgcttctttgragcacttttaacatcactagtggcactttgtgtgggtctcatggtgtttacttaaggtttacaatattgcactaaacctgaaaaatatgagaaccacaagagatcactttttactgacatatgcaattttctggagagatgaactgcttacatagagataattagcatcacagggtgttttgagtggatactcacaatgcttgagctccctgaagtagcaacaggagatggctacaaaattattacagtatagtatgtacagtagtgaattttattcagttatgatataatactgaatttttatgattgtttacattactctcaactggatggctgcaygtatgtcttttaagtgtgtgcataagttttgatagatgttaactttttaaaatagatttgtgtatatttaatggtagtaaatgagaaaatagactagtgtctacatagtttttatgcattcatgacatacctaattttctcaatttctaaaatacttttagactacatggttcatctgtgagttttttcaaattgttgtaaatctcctaaaattttgaaaatgtatttattgaaaaatccacgtataagtgagacctgtgcagttcaaacttgtgttgttcaagggtcatctgtctaagcatatgtttactagttaatggataagcacttcagaccacagtgtgttaagtgagaagagaatagggccaatgaaagaaccttgggagcaccagagtttcaaggttagtgcaaaaacaggtgtgttagggaaaggagagaggatcagaacaaaatggtttctcagaaactaagagaagagaaagtttgccagagggaaggagcatgattgtactgggttgcaggtgaaactgtactgtttctagtcatgtgacaggctagatattttgcaggatccttccaccagaaatacaactaaatcttacagaagttgcaacagaccttttttttttttttttttttttttttttttttttttgagacggagtttcmctcttgtcacccaggctggagtgcagtggcgtgatcttggctcactgcaacctctgcctcctgggttcaagtggttctcctgcatcagcctccccagtagctgggattgcaggcaggcaccatgacacccggctaatttttgcatttttagtaracagagattcaccatgttggccaggatggtcttgaactcctgacctcaggtgatttgcctgcctcggcctcccaaagtgctaggattacaggcgtgagccactgctcctggccatttttttctttttttcttttctctttttttttttttttttttgagacagtgtctctcactctgtcacccaggctggagtgcagtggtgtgatctcagctcaatgtaacctctgcctcctagacttcagccatcctaccacctcagcctcctaagtagctgggactacaggggtgcactagcacgcccagctaatttttgtatttttttgtagagacggggtctcactatgttgcctaggctggtcttaaactcctgagctcaagcaaaccacccaccttggcctcatatagtgctgggattataggcatgagccactgcacctggcccagacataatttttaaataaaattttagctttgcagtagttttggatttatagaaaagttgtgaagatagtacagagagtgcttgtatgtgtgtgtatatatgtatgtgtatatacatgtgtatatacacacacatatacatatatacatgtatacacgtatatacacgtatacacatgtatatacgtgtatatacacatgtatatatatacatatatacatgtatacacacatatatatgtatatgcatatatacacatacactatatatatatacaccgcgcacacacacacacacacacacacacatatatatacaccctgcatcctgttgcccttgttgttaacatcttacattagtatgttacgtttattaaaaccaatgaatcaatattgatatgtaattttttttttttttttgagatggagtctcactctgtcgcccaggctggagtgcagtggcgcgatcttgcaacctccgcctcctgggttcaagcgattcttgtgcctcagcctcctgagtagctgggactacaggcacacaccaccacacccagctaatttttgtatttttagtagaggcggggtttcaccatattggccaggctggtcttgaacccctgacctygtgatctgcctgcctcagcccctcaaagtgctrggatacaggcgtgagccactgcacttggcctaatatgtaattattaagagtccatattttatgaattgccttagtttttacctactgttgttttctccataactccacatttaattattatatctctttaggctcctctagattttgacagttttgttttgttttgttttgtttttccctgcagacagagtcttgctctgttgcccaggctggtgtgcagtggtacaatcacagctcactgcagcctcgacctctcgggtctaagcaatcctcccacctcagactcccgagtagctggggctataggtgtgcaccacaggtatgcaccactacacctggctaatttttgtaatttctgtagcaacagggtttcaccatgttgcccaggcttgtctcaaactcctgagctcaagcgatctgcctgcctcggcctcgcaaagtgctgggattacaggtgtgagccactgtgtccacagttttcttttaagcttccctagatttggtcagatattttgtagaatgtccctcaatgtgggtttgtctgtttttttgtggttgttttttgttttaatgattagctggggttattgtttctttggaggaagaccacagaggtaaagttccattttcatcacatgatatcaagagtgtccatcctatcaacatgttttaccgctaatgatactaaccttgatcacctggctgagatagtttttttcagatttcttcttttttgaagcctcttacacattgtactctttgggaagaagtcactgcacagcccacaatttaggggagttatgcygtctacctccttgaggaggcagcatctatgtaaatttttcagaattctgtgtagacattaacaagcacacattttaatgcattactgggtgtactaaaaaagtaagggaggtttccaagggtctgttcattcacagaagtaaagagtcagctgaaacaggagcagtgagtaagcttgtgagcaaacaagactggcaacgttttcctgaaggcaaacgctcacatcagcactaatgggagactaagccttgggcccccagaaacgttgaaaagccccttgagaaagatgctgaattgaacctgggtcactactgcccttgactctctgccagagtaaatgcaaatacatttttagaaaaagctttctctgattagrctttcagaattcccatagataaaattcaacaaaatataagcttacaataaaagaattgccaaacacaaagaaataaacaactgtgggtgagatttaatagaaacaaaccccaaagacttaaactattgaaataataagatatgaaatataaaacaactgaccaggcacagtggctcacgcctgtaatcccagcactttgggaggccgaggcaggcagatcacctgaggtcaggagttccaagaccagcctggccaacatggtgaaactccatctctactaaaaatattaaaaaattagccaggcgtggtggcacatgcctgtagtctccctgctgctcgggaggcagaggcaggagaatcgcttgaatctgggaggcagaagttgcagtgagccgagatcacgccgttacactccagcctgggcgacaagtgagactcygtctcaaaaaataaataaataaataaataaaaagaaccatgtataaaatatttaaattaataaaggaatctaaaatatatcaaggaacaactcttagacagttatgcaaatttgaaaaagaaccaaagagaaatgttagaaataaaagtataactgttgaaattgaaaacttagtggatgatttgaacaacagataagaccattggcaaagggagaattcatgaactgaaagatctgaagtaatttcccagaatgtaatgttaagaaataagttaaaaggaagagcataatgagtctaacatgtgtgattgaagtcttataaggagagaattaagaacaggcaatattttaaaggaataatggagaaaatggaataattgatgaaatatgtgaatatatatagggaccatatgcatatgaaggaagggggttaaataaaaagaaatctacttgtacatactttatagataactgaagaatatcaaagtcaaagagaagctcttaaaaacagtaggagaggatgggtattctatcctcagtatacagtattcttacagtatgaaactatcactgcacagatcatgaaatgcaaattgataattatagattattaattacttacaaaggaatgacagattgataactatggaagcaagaggacattggaataaaatattcaaagtgcagagagaaaacagccatcaaattagaattgtctacctagcaaaactaagttttaagaacaagggcaaaataaagacatttccataaagacaaaagctagaaaccaacagatcttcacctaatgacctttattttatttaattcatttatttatttttgtagagataagggtctcatgtgttgcccaggcttatctcaaactcctgggctcaagtgatcctcctgctttggcctcacaaagtgctgggattataggtgtgagccaccacactggcccrttaatgacctttaaaaggacatatacttcagggaaaggaaaataatcccagaaaaaaatctaagagataaaatgcagtgctaagcaagtaaattggtaaccataagagtaaatctgaatgaacatttcctgtatgagatatttaattagtatagtttaaaaagccaggacaggccgggatcagtggctgacgcctgtaatcccaacactctgggaggctgaggcgggcggatcacctaaggtcaggagtttgagaccagcctggccaacatggcgaaacactgtctttactaaaagtacaaaaattagccgggcctggtggtgggcacctgtaatcccagctacttgggaggccgaggcaggagaatcacttgaacctgggaggcagaggttgcagtgagccgagatcgcaccactgcactccagcctgggcaacagaatgagactccatctcaaaaaataaaaataaaaaaaaggacaaaactatctctgttcggtattgtagttcaagaagagagtggactgggcatggtggtgtgctgttaagaaatgtttgtgtgttgctcaaggcccatctctactaaaaattgaaaaaaattagccaggcatggtggcaggcacctgtagtcccagctactcgggagaatcgcttgaaccgggaggcggaggttgcagtgagccaggatcgcaccactacactccagcctgggcgacagagcaagattccatctcaaaaaaaaaaagaaaagagagaagaatagagtgatttaggggtgggtgcagtggctcacgcctgtaatcctagcacttgggaggccaagatgggtggatcacctgaggtcaggagttccagccagtctggccaacatggtgaaaccccatctctacgaaaaatacaaaaattagctgggcgtggtggcacatgcctgtaatcccagttatcgggtaggctgaggcagaagaattgctggaacccaggaggcgaaggctgcagtgagctgagatcgcgccactgcactacagcctaggtgacacagtgagactccaaaaaaaattgggtaaaaatagaatgtataactttcagccactagaagggggagaacaatttaaaaaataaatttcttggccatggctcatccctgtagtctcagcgctttggcaggactatcgcgtgaagccaggagttcaagactagcctgggcaacatacatagcaagacttcgtctctactaaataaaaaatagctgggcctggtaacaagtacccgtagtcccagttactggaaaggctgaggagggaggattgcttgatcccaggagttgcagatttctgtgagctatgatttygccatgcactccagcctgggcagtagagcaagaccctgtctagaaaaaaaacaaagaaaagaaaacttccccaaaaggtacagaggtatgaagggaataaagaagtatgaagcatagaaaaaggcagggcaaataaaagcacaacataaaatgatagaaacaaattcaaatatatcaatcacagttaaacataaaagaataattttagcagttaaaagatagggatgatcagttcagattttttttaaaaatgtggctatatagagagacatatctaaaatagaaaagttaaaaggcagttactaaccaaaaacaataaaaaacataccgctatagtagctgcatgaataaagacgttaagacccaaaccaaaacattattaaagagggctgggtgcggtggctcacacatgtaaatcacagcatttcaggagggtaaggcaggcagatcgcttgagcccagaagttcaagaccagcctgggcaacatggcaaaatcgcatctacagaaacattagctgggcatggtacatgcctacagtcccagctatttaggaggctgaggtggatggatcgattgagtccaggaggttgaggctgcagtgaagtgtgatctgccactgcactctagcctgggcaacagagagaccctgtctcaaaaaaaaaaaaaaaaaaaaaaaccaataaaaaaaacattgggtgaaagactgttgaggagcagtatatagtattcctacagtgtgaatgtatcaccccatagattatgagttacaaattgataattatagattattactttattgtagagggaaaaacatgcatttataatgcagagagaatttggcatcaatagtagtgggatggcatgaaaattatatgtctcttacggaaggtagtgggtggtatacaatgccaacaaagttgtattcttgccaaaawtgtttaacctgaacctactcttgagaaaatgaatgaatcctgaaatgtgggatgttctgcaggacatctggcttggatcatcaaagtcatgaagaatagggagaggtaaagggactctcctacattgagagataatgaaaatcaaacataagaactttggttcttggagtgaaaaaaacaaaggtaaaaataacagtatataaaaaaaaaccccaactataaacagtctggtgattgttgggaaaatttgatgatgmgctttatatcggctggtgttgctgaattaatgttttttgttgttgttgttgttttcttctcttttcttttgagacggaatttcactcttaaaagttgcccaggctggagtgcaatggygcgatctcggctcactgcaacctccgcctcctgggttcaagcgattctcctgactcagcctccttagtagctggcattacaggcatgcaccaccacgcctggctaattttgtatttttggtagagacagggtttcttcatgttagtcaggctgttcttgaactccctacctcgggtgatccgcccgcctcagcctcccaaagtgctgggtttacaggcgtgaaccactgcaccaggcctgaattaagtttttttaagatataatgctgctatgattgtatgagagaatgttccttctgaaatatttagggataaattatattgctctctacaatctactttaagatggtttggcaaaagagaactaaatgttgtawatatagagagatagagctgatgcggcaagatattaacgattgctaaatgtaggtaaaatataggaatgtttactgaactttcaacctttttgtggagtttttttttgttttgtttttgttttgagacgaagtcttgctctgtcgcccaggctggagtgcagtggcatgatctcggctcactgcaacctcagcctcccgggttcaagcaattctccacctcagcctccagagtaggtggtgcacaccaccatgcctggctaatttttgtattttttgtagagaccaggtatcaccatgttgcccaggctggtctcaaactccagagctcaagcaatctgtttcctcggcctcccaaagtgttgggattacaggcgtgagccacagcgcctggccacaaaaattgcttctgcataggataaaggcaaatacaaaaggctaacaaaacaaaggttttatcagaaaataaagaacatctttatgaccatagtatagggaaataattcttttttttaaattaaatttttttatttccataggttattgggaaacaggtggtatttggttatatgagtaagttctttaatggtgatttgtgagattttggtgcactcatcccctgagcagtatacactgaacccaatttgtggtcttttatccctcacccccttcccactctttcctcctgagtccccaaagtccactgtgtcttccttatgcctttgcatcctcatagcttagctcccacatatgagtgagaacatatgatgtttggttttccattcctgaattacttcacttagaatagtagcctccaatctcatccaggtcgctgctaatgcaattaattcattccttttcatggctgagtagtattccattgtgtgtgtgtgtgtgtgtgtgtgtgtgtgtgtgtatacacatcacagcaccacagtttctttacccattgactgatgggcatttgggttgatttcacgtttttgcaattgcaaattgtgctgctacagacatgtgtatgcaaatatctttttttttttttttttgagatggagtcttgctctgtcacctaagctggagtgcagtggcaccatcttggctcattgcaaccactgcctccgtgttcaagcagttctgctgctcagcctcccaagtagctgggattacaggcacatgccaccacgcctggctagtttttgtatttttagtagagacggggtttcaccatgttggccaggctggtctcgaactcctgacctcgtgatctgcctgcctccgcctcccaaagtgctgggattacaggcgtgagccaccgcgtccggccgcaagtatctttttcatataatgacttcttttcctctgggtagatactcagtattgggattgctggatcacatggtagttctacttttagttccttaaggaatctccacactgttttccatagtggttgtactagtttacattcccaccagcagtgtagaagtgttcccttttcactgcatccatgccaacttctattaatttttgattttttgatyatggccactcttggaggagtcaggtggtatcacattgtggttttgatttgcatttccctgatcattagggatggtgagcattttttcatatgtttgtttgacatttgtatgccttcttttgaaaatcgtgtattcatgtccttaactcactttttgatgggatcgtctgtgtgtttttttttttttttggtaatttgtttgagtttattatagattctggaaattaatcatttgttagacgtatagattgtgaagattttctcccactctgtggattgtctgtttactcttgctgactgttccttttgctcttcaaaagctctttagtttaattaagtttcagctttatatctttgtttttattacatttgcctttgggttcttggtcatgaaatagttgcctaagccaatgtctagaagggtttttccattgttatcttctagaattttatagtttgaggttctagatttatgtccttgatccatgttgagttaatttattttgtttaaggtaagagatgaggatccagtttcattcttctacatgtggcttgccaattatcccagcatcatttgttgaatagggtgtcctttccccactttatcttgtttgctttgtcaaagatcagttggtaccaccatcatcctttacagaattagaaaagacaaccctaaaattcatatggaaccaaaaaagaccccacatagccaatgcaacactaagcaaaacaaatctggaggcatcacattacctgatttcaaactatactctaaggtcatagtcaccaaaacagcatggtactggcataaaaataggcacatagaccaatggaacrgaataatgtagggaaagaattctcaaacgagacacactatgctagccataataaaaataatgattaccataataaatatataaattcagcattattaaaattaaaattttctttctttatttttatttttgagacagagtcttgctctgtcgcccaggctggagtgcagtggcatgatctcagttcactgcagcctctgcctcccagattcaagcaattctcctacctcagtctcctgagtagctgggatcacaggcacctgccaccaccttcagttaatttttktatttatagtagagagggggtttcaccatgttggttaggctgatctcaaactcctgacctcacatgatccacctgcctcggcctctggaagtgctgggattacaggcgtcagccactgcacccggccacaacagcaagtcttattgattctgttggtgttttgctttttttgggtggtggggagtcaggtttattgtgttatgatttacatacaccaaagtttaccctttaaatgtacagttctataaattttgatgaatttataattgtgtagccaccacaattaacatatagaacttatataagttctgttactccccaaattcttccccatttttattgaacccctttcgtctgtgacccactatttgaccttatagttttgactcttccagaatgtcatgtaaatggagtgatgtaaccttttgagtctgacttctttcatttagcatgatgcaattgtagtaaaacatacatagcaaaattttgtttctttttgttgttaaatagtattccattttaaggatgtttcacagttgttgaaggacatttgggttgttttgttcttggtaattatgaataaagccaccataaacatttcttatttatttatttattgagacagagtcttgctctgttgcccaggctggagtgtagtggcgccatctccgctcactgcagcttctgcttcccggattcaagcgattctcctgcctcagtcagcctccggagtagctggaattacaggcatccaccaccatgcccagctaatttgtttctgtttttagtagagatgggccttgagcaacacacaaacatttcttaacagcatctttaattgtatttatttatttattttgaggcagggtctcactgtgttgcccaggctggagtgcagtggcatgatcttgtctcacagcaacctctgtctcccaggttcaagccattctcctgcctcagcaccccaccccacccccaccccgcagtagctggaattacaggcacctgccactatgcctggctaatttttgtgtttttatatttattttattttattttattttattttattttttttgagacggagtctcgctctattgcccaggctggagtgcagtggcgcgatctcggctcactgcaagctctgcctcccaggttcacgccattctcctgcctcagcctcccaagtagctgggactacaggtgcctgccaccacgcctggctaattttttgtatttttagtagagacggggtttcactgtgttagccaggatggtctcgatctcctgacctcgtgatctgcccaccttggcctcccaaagtgctgggattacaggcgtgagccaccgtgcctggcctattttattttattttatttccttccttctttccttccttcctttccctttccctttcccttttttctgacagagtctcactctgtcacccagactgcagtgcagtggtgtgaactcggctcactacaatctccgcctcctgggtttaagccattctcctccttcagcctccggagtagctgggattacaggtgcgcaccaccatgcctagctaatttttgtatttttgtagcaaccgggtttcaccatgtcggccaggctggtctcgaactcctgacctcaagtgatccaccctcctcagcctcccaaagtgctgtggttacaggcatgagacaccacacccggccttaacagcatttttaaaaaagcaataatttcttaattttgatgaagtccagtttattttaaaaatgttaacagatkatattttcgttacatataagaaatcctttaattcaaagtcataaagaatttctyctatattttcttacagaagttttatttattttaattagtttattttttgagaaagggtcccacttggttacccaggctggagtgcagtggtgccatatagctcactgcagcctcaaccacctaggctctagggatcctcccaccccatcctttggagtagctgggatcacagacgcaagcctcctcacctcggttatcttttaatttttctttatagagaaaggtcttcctatgttgcctaggctggtctcaaactcctgggctcaagcaatcctcccaccttggcctcccaaagtgctgggattacaggcatagaagttttatagttaggttttaccttaggtctataatgcattttgaattaatttttgcaaatagcatgagatatggmtcaattttttaaaatgggtatccaattgttcgagcaccatttattgagaagccagtcctttcatcattaaattgtctatgcatcttgcacctttgtaaaaaatcgattgccggctgggcgcggtggctcatgcctgtaatcccagcattttgggaggctgaggcgggtggatcacckgaggtcaggagttcgagaccagcctggccaacatggtgagacctcatctctactaaaaatagaaaaattagccaggtgtgatggtgggcgccwgtaatcccagctacttggraggctgaggcaggagaattgcttaaacctaggaggcagaggttgcggtgagcagagatcacgccactgcactccagcctgggtgacagagtgagaccccatctcaaaaaaaaaaaaaaattgattgcccacgtatatatatgctgccttgattattgtagcttgtatggaaatcaggtagtatgcatcttctaacaaaattttcaaaactatgttgtctattgtgggtcttttgtttttccttataaattttaggatcagcttgttgatttctacaaataatcctgctgggattttgattaggactaaattgaatgtggacattaatttgggggcagaattgttaaatatgtttagtctttcataaatatggtatatctcgccatttatttaggtcatctttgatttcttttatcagtgtttgcttttcagcatagcgatcttgcatgtattttactaggtgataatctaagtctttcatgctcttataaatggtactactttctttaaagaaaaatttaatttccccgtttgttgctgtgtaagaatatagttgactttggtatcctgcaaccttactaaacttacttattagttcaagtacctattttgtagggtctctgatttttctatatggataaatcatgtctatacatagagatggtttagtttcttcctttctaatctatataccttttctttctttcccttgccttattgcattggctgaaacttctaggatgatggtggcagcagttcccaactggaagagactgggatggggttggttttgggatgaaactgttccacctcagatcatcaggcgttgttcttatagggagtgcacagcctacatccctggcatgcgcagttaacaatagagtttatgctcctatgagaatctaatgatgccactgatctgacaggatttggggctcaggggttaatgytcgctcacccaccactcacctcctactgtgtggcccagttcctaacaggccattggggttgggaaaccctgtgtagaggaagggtgagggtgaacattcttccttttccgctgttcttagggggatagcttttggttttccaccattatatatgatgttagctgtaagtttttaataaatgtcctttgtttgaggaagttcccttatatttctagttttctgagactttttatcataaatgaatgtggaattttattgagcctttcatagtactttttttttttwwaaaaaagagggctgggcgcggtggctcacgctggctcccagcactttgggaggccaaggtgggtggatcacgaggtcaggagatcgagaccatcctggctaacgcggtgaaactccgtctctactaaaactacagaaaattagccgggtgtggtggcgggcacctgtagtcacagctactcaggaggctgaggcaggagaatggtgtgaacccgggaaggtggagcttgcagtgagccgagatcacgccactgcactccaacctgggcgacagagcgagacatcatctcataaaaataaaaaaaagagatagcatcttagctgggcatggtgactcatgcctgtaatcccagcactttgggaggctcaggtaggtggatcacctgaggtcaggagtttgaggccagcctggccaacatggtgaaaccctgtctctcctaaacatacaaaaattagctgggtatggtggtgcaagcctgtagttacagctactcgggacgccaaggcagaagaattgcttgaacctgtgagacggaggttgcagtgagctgagattgcgccactgcactccagcctgggcaacagagcgagactccgtctcaaaaaagaaaggcagagtcttactttgttgcccaggttggagtgtagtggcatgatcgtagctcactgcagccttgacctcctggactcaagcaatccacctgcctgggcctcccaacatgctaggattacccctttcatagtacttttgatggttttgttttgttttttttttgagacggagtgtcactctgtcacccaggctggagtgcagtggcgcaatctcggctcactgcaaacgccgcctcctggtttcacgcccttctcctgcctcagcctcctgagtagctgggactacaggcacccgccaccaygcccggctaattttttgtatttttagtagagatggggtttcactgtattagccaggaaggtcttgatctcctgacctcgtgatccgcctgccttggcctcccaaagtgctgggattacaggcgtgagccaccgtgcccagtggggtttttttttttaattttttttttttaaattttttgagacagagtctcactgtcacccaggctggagtgcagtggcacaatctcggctcactgcaacctctgcttcccgggttcaagcagttctctgcctcagcctcccgagtggctgggattacagactcccaccaccacacccagctaattttttgtatttttagtagagacggggtttcaccatcttggccaggctggtcttgaactcctgaccttgtgatccactggcctcggcctctgaaagtgctgggattacaggccttgatggggttttaaatggaaacattggcaattgtaaagtcaaacatttgcatacctatcttcagttcagcagttctactcttgcacatgtgccccagaatacagatataaaaatattcatgtcagctttatttatcatataaaaatgtagagaacaagccaagtatggtggctcacgcctgtaatcccagcattttgggacgtcaagatgggaggatcgcttgacccctggagtttgagatcagcctgggcaacatagtgagaccttctctctacacaaaaataaaaacagccacatgtggtggcacatgcctgtggtcccagctactcaggtgactgagatggaaggatcacttaagcccaagaggttgaggctgcagtgaagtgtgattgcaccactacactccagcctaggcaacaatgtggcaaatcaagatccccgtttcagccgggcgcggyggctcacgcctgtaatcccagcactttgggaggccgaggtgggcagatcacctgaggtcgggagttcgataccagcctgaccaacatggagaaaccccrtctctactaaaaatacgaaaattagccgggcatgatggcacatggcctgtaatcccaattactcgggaggctgaggcaggagaattgcttgaacccaggaggcggaggttgcggtgagccgagatcgcgccactgcactccagcctgggtaacaagagcgaaactctgcctcaaaaaaacaaaaamaaaaaagatccccgtttcagaaaagcaaagaaaatgtggaaacaacctgaaagtccatcagcagctcaatggataagactgtggtgtattcatagtgaaatcttttactgcagtgaaataaatgtaccaacctaagtatatgttataaaatgaaaagtaagctacccttcaccttctttctctacatacccagttccattttgaataatgtctgctatattattatagcgtgatttaatacttgcatacatatatattatcagtttttttaaactgtggtaaagtacacataacataaaattgaccattttaaccaatttgaagtgtaggtacagtggcatgaagaacattaacattgttacgcagccatcaccaccatccatcctcagaacttcgtctcactttccagactgaacgcatatacccattaaacaataactctccattccccagcccctggcaaccaccattctactttttgtctctgaatttttctactcctagatacgtcatggtaatggaatcatatagtatctgttcatttgtgactgggttatttccataacataatgactttgcaaggttcatccatattatggcgtacgtcagaattttctccttcttatgggtggataatattccattgtatgcgtccacattcttttacccaatatttttttktktktgtgacagagtcttgctctggcccaggctgcagtgcagtgtcacaatcccagctcactgcaacctctgcctcccaggttcaagcaattctcatgcctcagccttccgagtagctggcactactggtgtgctaatttttgtttttttagtagagatgggatttcgccckgttgcccaaactggcctgaaactcttgaactcaggtattccacccacctcggcctcccaaagtgctgggattacaggcatgagccactgctgcacctggcctcttttacccaatgttttcttaaagcttactgtaggtctagagatttttaaaattatagacaaataaatgttcaactttacgttaataatttgaaagcctagaggaaatggagaaagtgtccataaaaatattaaccctattgactccaggagaagtagaaaacctgaaaaagacctaagacccagctgatttagcagccacacttgtgtgattatgtgtttgtgtttgcttttattaacgcgtgttttgtggttaaatattagtttgaaataattttttaggctcaaaattttaaacaaggctgttttctttttgtttttgttttttgagatggggtctcactctgttattcaggttggagtacagtggtacagtcttcactcactgcaacctctgcctcccaggctcaagtgatcctcccacctcagcctcccgagtagctgggaccacaggtgcttgccaccgcatccagctgattttttgtatttttggtagacagggtttcaccaagttgcccaggctggtctcgaacttctaagctcaggcattcctcctgcctcgctyggcctcccaaagtgctaggattacaggtgtgagccaccacacctggcctaagaagtctgtttcttatagctaaagtggatgtctttgctaggctgtatcagatctcatccaaataaaaaaaaawtttttttgaaatggggtctccctatgttgcccaggctagtctcaaacttcaaactttgaactctgaactcrtaggcctaagcagtactctttccccagcctcttgagtagctgggattacaggtgtgtgccactgtgcccggcctcgtcacatattttttaaaaatctgtataacttacattcaagagttcctatccagaattcagtctggttttagacctcattttaatatttattgcacctttagtgcatgtctctccattattacatattgttatttcagtgcttattagtcccttgaattcagactaccatatcttacttattcttacctattatagcatgtgctttgcatgaagcgggtagttcatgaaaatttattgaatctaccaatatttcacggattttgtcaagtattgctgagggttgtttgcaggatagagaaaaattgatgcttggagtttttcctttggaggatttggtatggtttgttacagatttttgtgattcgcagatcctgggtgaaaatgtatactatttgatttagtagatttctagataatcatatgtaacaatgtttaacagaaatgagtagtaaattaagtaactggtggattgataccttatgaatgttaacatactactcagatttttaatttagatatggctctttcagtgtatattgaagttattttactcaggacttggcttctaaagtcagtacataaaatgaaattaggcttgaaaatactggaaatttttagtaatgacaaaattttttatttttttttggtaaatagcctagtacagaaatatatatatgcatgatttgtgctatatttggtagcatataattccrtaggstgaatcatattaagagagtaaatcagctgaatgttttgatgcttggaacatgaagccgatttagggagagtcaaacttcctggtttctctctctctcatcatctttatgaagataatatttcttctggttcttcatcagtgagtatttctctatggcctcaaatgtctttctgataattacagtttcactttcctggttaaccatgcctaaaatattaaatggaaaattgtagaaataaacagttcataagttttaaattgtgcaccattctgagtagtataatgaaatctcatgccatcttgcctgggacaggaatcctctctttgtcctttgtatccatgctgttgacgcttcccacccattagtgcccctgttatattgaccgccagggtattgcagtgtttgtgttcaagtaatccttagtttacttaataacggtcccaaagcgcaagaatagtgatgcttttaatttggatatgccaaagaaaagccgttaagtgcttcctttaagtgaaaaggttaaagttcttaataagacaatgaatcatatgctgaagttgctaagatctgtgataagaatgaatctcctatctgtgaaatgatgaagaaggaaaaagaaattcgtgctagttttgctgttgcacctcatactgcaaaagttatggccacggtgcttgattaactgcttggttaagatgaaaagggcattaaatttttggtggaatatatgaacagatatgtgtttccgttgacagcagtcaggttctgtwctgtctggtttcaggaatccactaggggtcttagaacatatacccccatgttaaggagggactactgtaattgcctttacccctgaatatttgtttagggttcttgttaattgttttctctctcacactctggcttagtacttacaggtaaaaaaatttttttgagacaagagtctctctctgttgcccaggctagagtgcagtggcacaatctcagctcactggagcctctgtctcccaggttcaggtgattctcctgcctcagcctctygagtagctgagattacaggcatttgccaccatgcctggctaatttttactatagatggggtttcaccatgttagtgaagctagtcttgaactcctgacctcaaatgatcctcctgcctaggcctccaaaagtgctggtattacaggaatgcrccaccacgccctgccaagtacttacaagtaaattctttttttctttttgagatggagttttgcttttgttgcccagactggagtgcaatggcgtgatctcggctcattgcaacctccgtctgctgggttcaagtgattctcctggctcarcttcccgagtagctgggattacaagcatgtgctaccacgcccggctaattttgtatttttagtaagagacagggtttctccatgttgatcaggctggtctcgaactcctgacctcaggtgatccgcccgcctcggcctctcaaagtgttgggattacaggcgtgagccaccatgcctagccagtaaattcttgtaagttcgaatatgrtatgacctctagtaatgtacatctsttgatgtctctaatttctgtattagtatattctttgtacttcattctgtagagcatatggtattcacataatacttttggttattgggtatggcacatacagtgctagggttctcattgtttctcagtcccaacaagaacatctcatcagaggagtttaaggtacattttaagttcattcattagtatctccccagataaacttaattgtaagtctgaatccctaagcaagaaattaaggtactcctttaaaaaatacattatttagtaaacaaagcatctctgacttctatacatacagcaccatttgttcagtrttttcagttcttaaaaaagaaataaaattataacatttagatccaaaaggggccttagaaacttttttgagtacattcattttacatagacttaggctagttgcgtcttagctcagcctaacgtatgtgaccacctgacctgatgtgatgccctttcactctcaaaatgtaacagtttgaatgataatgtactcatcctcacatagtggtggaggagtatggcactcagattttctacgtagttcagtgttctttctgctaccttgatactttttcagataattttttcttgttaaccctcaacaaagcaactaagtgattttaaggaagttgggagatttatctttttaaagagaagatgtagattctttgaaaaaagatgttgttttcttctatttaaatattcaagtgacactgccattatttgtactgagtgtccttacagttaaatatttatttaatcataggatattgaagccagagggtatgttatggacgatctaatctaaactagttattttatatgggtttttktgtgtgtgtggagacaggaccttgccctgtcattcaccctggagtatagtagcacaactatggctcactgcagccttgaccccccgggctcaaccgatccttacatcttgacctcccaaaatgttgggattatgggtgtgagccaccacacctggcctatgcttttattttttatataaaggtattataattgtaacatagaaagtttagaaaataacatttattttaaaatattcatatgatttttttttttttttttttttttggagacagagtctcactctgtcgtccaggctggagtgcaatggcgcaatcttggttcactgcaacccctgcctcccaggttcaagcgattctcctgcctcagcctcccgagtatctgggattgcaggtacccgccaccacggccagctaatttttgtatttttagtttcaccatgttggtcatgctgggctcaaactcctgacctcaggtgatctatccgcctcggcctcccaaagtgctgggattataggcatgagccaccgcgcctggcccgcctatacatttaaatagtgtatttacataatttacataatggtatatgtacatttttctttcctgtgttttcacgaactctcatgcaagcatcttcatgttatttacagacatgtacttatcatccatataatatggatgtacctttacatatacatttaaatagtgttttacataatggtatatgtacatttttctttcctgtgttttcactaactctcatgcaagcatcttcatgttatttatagacatgtacttattatccacgtaatatggatgcacctttacctaactattcccctgttactattctttaggttgcttctagtttttctacaactataaataacatttttgtccatgtggctttttcttctttttgtttttcctttctacagcctgttttgcaaatgaagacagacctaagctaatgaaaatgaatctttttcaggggttacatctcagatctttggactctcgtgctgatgccctttccattataccataatgcttgttttctgtaaagactacatggattgaaaacacwgtatcagctgtcttagcccattgttggaacaaggcaaggtagacataaaatgtaaataattcaagttaaaaattatctaacccgtctcctaccaagttaacagttttattttgtaggtacttagacttaaatcagtaaccttccagtttcctattgttaattcctttccccttctgcataataattaaagctgaatgcttagcttgtagattgttgaggaattgatgttgtgagaacactgactatatctagattaacttctgcaacagcccctagaatacctcattgtacctagcccctacctaatgctgtgcatttacagagaagtcttaggggattgttagccaaactgaatagrggactactctatttttccccttttcttgtcttccttctctttttttttcctaatttatttattcaagaagtagttactgaacgccaactaagtgttaagcactattctaggtgctgagaattcagcagtaaataaaactgacaaaaatcctttcccttatgagcctatattctcgtgggggagataggcaaaaaataaattgtatagtatattggaaaattatgtgttatttgggagaataaagcaaagaagrgtggtaagagtgttgttggcttgatgttgcaattctttttttttttttttttttgagtcggagtcttgctctttcacccaggctgaagtgcagtggcgcaatcttggctcactgtaacctccgcctctgggttcaagcgattcagcctcagcctcctcagcagctgggattacagacgcatgccaccacacccggctaatttttgtatttttagtagagagggggtttcaccatgttggtcaagctggtcttgaactcctgacctcaggtgatccacccatcttggcctcccaaagtgctgggattataggcgtgagctaccgcacctggcctgatgttgcagttttaagtaaggtagtcaggaacatattcactgagaaaggaacatttgagcaagatttaaaggtggtgattgaacgagccatgagaaaaacgggggaagaaagttccagaacagtgagcttaacagaccgtgaagcaaggactcacccaggtgtgttggaggccttgtaaagacagcaaggtggcctctgtggctacaatggaatcagtggtgatgaagaaattaggtcaggaagataacacagtgccagattgtttaggatttctaggccattgtaaggactttgaactttactcttgttaaagaggggaccattatgggagggatttaagaagtagaataatatgatcaatttatatttttaaaggatcaccctctcttctgagttgagattagactgaagccaggcaaaggtagaagcagggagactaggtaggaggctactgcaataattcaagcaaaagatgatagtgacttagaccacaggcagtgatggaggtagtaagtagtggttggagtctgtatatgttttttaaacttgttatttttgaataatttcagatgttaaaaaagtttcaagagtattacaraaaccttctgtgtactttccactcagattcccattattaacattttaacatatttgctttatctctcttactgctctctctacaggcacacacacactttttttttctgaactgtttgagcatatgttgcagacatgctgccctatttagtactttggtgttcatttcttaaaaacaaggatattccttaaacagttgcattagtcagcttggctgccataacaaaataccacagactgggtggcttaaacaaagaaatygattttctcacagttctagaggttgcagagttcaagatcaaggtccagtttggtctctggtgagggctcagggctccttcctggctttagtctgtcacacagactagagtacagtggggcgattgtggctcattgcaccctcagcctcgcaggctcaagtgatcctcccacgtcagcctctgagtaacaggactacagttatgcaattacgcctggctaacttaaaatttttttttggagagatagcgtcttattrtgttgctcaggctggtaccaacctcatagaattgtggtgaggatgtaagttaatatctgtatcctctttaaacagtccctggcatatagaaagtattaaataagttaaaaattataggcggggcgcagtggctcatgcctgtaatcccagcactttgggaggtccaaggcgggtggatcacctgaggtcaggagttttagaccagcctgaccaacatgatgaaaccccgtytctactaaaaatacaaaaattagccaggcgtgctgatgcgcacccgtagtcccagttactcaggaagctgaagcaagagaattgcttgaacctgggaggcggaggttgcagtgagccgagatcgcgccactgcactctagcctggacaacagagctagactgtctcaaaaaaaaaaacaaaaraaaaacgaaacaaacaaaagaagaaggcagtacactaggcgcggtggctcacgcctgtaatcccagcactttgggaggcccaaggcaggtggatcacctgaggtcaggagttttagaccagcctgaccaacatgatgaaaccccgtctctactgaaaatacaaaaattagccaggcgtggtgatgcgcacccatagtcccagttactcaggaagctgaagcaagagaattgcttgaacctgggaggcggaggttgcagtgagccaagatcgcgccactgcactctagcctggacgacagagctagactgtctcaaaaaaaaaaaaaaaaaaaaaaaaaaaacgaaacaaacaaaagaagaaggcagtaggctaggcgcggtggctcacgcctgtaatcccagcactttgggaggctaaggtgggtggattgcttgaggtcaggagttcgagaccagcgtggccaacgtggtaaaccctgtctactaaaaatacaaaaattagccggkcatggtggcaagcgcctgtaatcccagctgctggagaggctgaggcacaagaatcacttgaacctgtgaggcgaaggttgcagtgagccgaaatcacaccaccgcactctggcctgggcgatagagtgagactaagtctccaaaaaaaagaataaggcagtaaacaagagaaattccagtcttctggatgcttataatccagtgagsatacagacaagtacactacaatgtgataaatgctatagtaggtaaaagtatagggtgcttaaagaccactgcctttaagcattttcccagattacctcaaccactttttttcattcctccagaatttccaaagtgctctgactagagtggagagtttgcattgaggagaaatagtaataaaatagtttggggtggtttgcgggaagaagtagagatttaacatgggggtrgtcagaaactgacatgagttaaatttaaaattttggacgttttcctatggatgagtagaaaaccactgaaaacggtttaggatgagttatcctagaaaaggaaaattctgactaaaagagaaaacacaaggtagcagggtttttggcaattgtgagtaattcattaaagatggaactttgaatttgagggtgaagaaatgagactggaagagaaggcaggatgcagattataaaggaagctaaagtgtttcagctttttccattgagcagtgcgaaatcattgacagatttgatatgataaataattggacaattttgcatatttgaaaatgaatttggctcccacttccctaccttgctcccctgttaaaatagaaacggggattsatttatgtcccattcctgaatgcatgtaaaatttatacaaaaatactttctatgaaaatgatttgtaatctgtagacttaatacctgggagatgtcttgagatataaaatcgcatcctttgggctgtgggttttttgttttctccaaataaatctgatcttttcttaaaaaaaaaggaaggaaggaagataaaaaaaagaaaagaaaaataaatttggcaacaatatagggaggaaatttaaggggagcaagtctaggggcagatgactaggaacctgttgcaggggtggttcaggtcaacggtgatgaaacccagaaaacagcaatagtaggaagggaaagacaagaggggataaagttgagaaatattattggggacaaaattggctagagtttggagatttattaataggtgtagggggataaggaggagaaggagtcagaattgctaaaattctgactaaagagtagtaacagatagaaaaagaggaagatgattaataaaataataaggccaggcgctgtggctcacgcctgtaattccagcactttgggaggccgaggcaggcggatcacctgaggtcgggagtttgagaccaggctggccaacatgaagaaaccccatctctactaaaaatacaaaaaaattagctgggtgcggtggcgcatgcctgtaatcccagctactcaggaggctgaggcaggagaatcgcttgaacctgggaggcagaggttgcggtragctgagatcgtgccattgcactccagcctgggcaacaagagtgaaactctgtctcaataaataaataaattacaataaaataaaatattaaaatcagccaggtgcagtggctcatgttcgtaatctcagcactttgggaggccaaggctggtggattccttgaggacaggagctcaagaccagcctgaccaacatagagaaaccccgtctctacttaaactacaaaattagccaggcatggtgacgcatgcctgtaatcccagctactcgggaggctgaggcaggagaatcgcttgaacccaggaggcagaggttgcggtgagctgagatcatgccattgcgctccagcctgggcaacaagagcgaaactccatctcaaaaagaaaaaaaaaaaattagccagacayggtggcatgtgactgtagtcccagctatttgggaggctgaggtgggaggatcacttgaacccaggaggcagaggtttcagtgagccaagattgtgactgcattccagcctgggtgacagaagaaaaaaaaaattaaaatcaagctcagggtgcctcggagactttgaagtggatgtgtacattgactggtaaagggaaatccaggcttgatatctacagatatgggagtcattgatacataggttgaagtagttaaagcaactagaaggaggtgattatgctgatagcattccatttgctgtgtattaagccctatcttaattgttttacatacattgttttatttagttcttctaacaatcctgtaaggttgtcattttacaaaggaaagcaacatagagaagagttaagtaatgtaaaagactccaaagctaacaagtgacagagccagaaatggaaaagattgacttacagcctgaaatcttaaaacactatgctatgagtagagaagagtgctcaggagagaatcctggagaacatcaacatttaaatgaggatgatcacggccrgactggctacctatacatgattctagaggaggacccggagaggtaggatgaaaaccaggagagtggttaagagagaagccaaaggagaaagtactgtgacagattattctgcgcgccaaagctataaagaaataacattaaamaaaaatctccattgagtttagtaaattggaatttgttagtaaccttgaaaattggtgtttgagtgaactgttcgcaacataaatgagataacaatttataaaaagctcttagcatggtagattgcataagtgcaataaaagagtggctcctataattatggagttaatgggagttaaaagtgtagacagtgagtatacaaaactctttcagactcttcaccctaaaaggtcttaactaacattaggcaaggaaggaaaggctaggggtaacctaaggtggtcacaagaaaactttaagataggagagacgtgcatatacatatgttgagagacagcctgaaggaatacaatataaatatataaatataaataagaggtcgggtgcggtggcttatgcctgtaattccagcactttgggaggccaaggcaggtggatcacctgaggtcaggatttcaagaccagcctgccagcataacatagtgaaactccatctctactaaaaatacaaaaaaattagctgggcttggtggcaggtgcctgtaatcccagctacttcgggaggctaaggcaggagaatagcttgaacccrtgaggcggaggttgcagtgagccgagattgtgccattgcactctagcctgggygacgagtgaaactgtctcaaaaataataataataataattaataagtaaatacaaataagaatcaaattaaaatacaagaagcsaggataagccaggtgcagtagttcatgcctgtaatcccagcaatttgggaggctgaggygggcagattgcttgagcccaggagtacaggaccagcctgggcaacatggcaaacccttgtctctactaaaaatacaaaaawaaattagccaggcatggtggcatgcctgaagtcccagctactcgagaggcttgaggtgggaggatcacctgagcccaaggaggctgcagtgaactgtgatcgcaccactgcaccccagcctaggtgacaggagtgagaccctgtctccaaataaacaaaaaacacaaaaaaagaagcaagcatagttaatggagcataaggttctcaaggtgtgaatagagtctaggaaacagtacgtagtggaaggattactctttaataggagtgatgctttttactaggtaaattgatctaggtgagtttaaatrtggatacattttttgtgacaagataatttccatttaatgatttttgccttctctgtgaaacagcatrtaagcttatctcctgagagtgagaagaagagatgtggtaaagattcgggcctgacaagtggttaaaatttgaaatagttctttgagagaggatgctgactaagcacatgtggagggactgtatgtagcattgcgggcccaggtgaagaaggagacttttaattcgtatgatttaattttttgtatgtgattttagaacccagcagcagaaataaaggtgcagtaaatgcagttagttagattgatccaaatttgggatttcwttgagcacatgagatagaaggctgaattagggagaaggacaagagtatgagggttttaataaaatattggtttaaataatggacagagactctggaattgatgaagaattgagtactgagaagagaatgtagagttagagaaaataaaaagctgagatcttgatgaaattgaagaacaagtataataggagtgggaggttgtgatcagagaaggagattttaaaatgtacaaaggagtggttcttggaggtcaccgaatgtgaggtcaaggaactgagagacaagaaaacatggtagatcatccatatagacattgaaattacccagcataataatgaaatttaaggtgactttgctcagggttccagatagtacattgatggggctttgtcatgaaccattgaaaaacttaaccgactgggtgtggtggctcacacctgtaatcccagcactttggggaggccaaagcaggcagatcacctgaagtcaggagtttgagatcagcctggccaacataataaaaccctatctctaccaaaaatacaaaaaaattagctgggcgtggtagtgcacacctgtagtcccatctacttgggaggctgagacaggagaattgcttgagcccaggaggcggaggttgcagtgagctgagattgcgccacttcactgtagcctgggcgacagagtgagactccatctccaaaaaaaaaaaaaaaaaaacaaaaagaagaagaagaaaagcttwacctagatgcatacataggatcatattattttgcaggacattcgtctagtgatgaaagcagcagcagagcctccctccagtagatgggaagactaagacgtatctgagtagtatctggattggttgatggggagagggtctatctgtaataaatgttaagcaatttgcttgaggtcacattctgatttgattacaaagcccatgctctttctactaaccttggtatttctgcaacaagttgagcatgttcaactcattttttttttgtcttctcagatgtttgagactataattttgttttattttagcttctccagagttactgggtctttttttttagtgccaaacatctacaaagtgagggagaaatgtccttgaggagtaccttgaacagaaacttaacgtgaagtagtcaaggtttttagtatgtttggtaaactgatccattagttcatttgtcagtttatccatccagcctcccttccatccattagttcatttgtcggtttatmcatccatccttcctcccttccatccatgtaattacattcatctttttatatccatgtaagaaaaaaaaaataaccagttacagtttgagaacactgtatttggaataagttgaactaagtgcaaattgactcatttggttttatttattgtcttttgtcatctctagctgcatatccccaccgtttgaatctcttttaccttgccaatgatgtcatacagaactgtaaaaggaaaaatgcaatcatattccgtgaatcatttgctgatgtacttcctgaagcagctgctctagtgaagtaagtaaatctttattgctctatgggatctaaacttagacaacttagaattttagtttcttaacccattaagaactgtaataattgaacatgcttgaagattaaggataatttgcctaaatggttgattattactttcttgttaacacacgtttttctttctttcttttcttttcttttctttttctctctctctctttctttctttcttyctttcctttcctttccttcctttcttttctttctttctttctttctttgagacagagtctcgctctgttgcccaggctggagtgcagtggcgcgatctcggctcgctgcarcctccgcctcccgggttcaagcaattctcttgcctcagcctcccaaatagctgggactacaggtgcgtgctaccatgtccggctaattttttgtatttttagtagagatggggtttcaccatgttagccaagatggtcttaatctcctgacctcatgatccacctgcttcagcctcccaaagtgctgggattacaggcgtgagccactgtgcctggccatgtttttcttttaaaagctctctcttctgttttcaaaagctggtctcctgtttatccttacttgaccatgtatgtctcctggtgataatctctgaatgtgcttccttctaactgctgtgtctgttttgtttgtttgttttaacacatttcatttcttctttctgagtcttactgaaatttttttccctccatgaaatctgtaaagagaaacggaaattatttcccaccrtcatactcccaactccatgttgatttaatttcatttttagcggtagttggatccagcacttsccacagtgtattcctatgaaatgatcagaggaagaagggttctgtgctcaaaaaagtttagaaaatgatccatactacttttcctttcctgaagattcaaagttcacattaccatatcaataattttatttctttttggagctttacaaaactaatttcaaaacatttcctggctgagcacggtggctcacgcctgtaatcccagcacttcgggaggccaaggcgggtggtggatcatgaggtcaggagatcaagaccatcaagagatggtaaaaccctgtctctactaaaaaatacaaaaaaattagccrggcgtggtggcaggcacctgtagtcccagctactcaggaggctgaggcaggagaatggcttgaacccaggaggcagagcttgcagtaagccgagatcacgccactgcactccagcctgggcgacagagtgaaactccgtctcaaaacaaaacaaaacaaaaccacagcatttcctaaactctgaccatgggcccttctttttgaatgcctattgaacatccccacattcggggagaattctggtgtatatacagtacaaacttatatctgatcttatttttgccctgtattaatactgtgttctttgtgttgcatccatatttgtaaattgttttctataagaggcacacacagttacaggataaacaatatatagagcaatatataaacacttatatggaacaaccataatagctaaatgcttcctcagattatatatttattatcattgacccatttgttagtattaacccagtcagaactgaatgatcctgtcaaattatggaatatattgaaaataagaaataaaagaactgactgatccctcttccttaggattgttaacttaaaatgtctaccttgctattagaaaagattaaaatatggtactacttgaatgtactaagtaaataagtgcataaaataataacacctaccatttgttggatatttataattgactaaatattatacaaagtgctttatcatttaattttgagaacaactttataccgtgggcactattgttaccttaattttttctttttttgagatggagtttcgctcttgttgcccaggctggagtgcagtggcacaatctcggcttaccgcaacctccgcctcctgggttcaagcaattaggcaattctcctgcctcagcctcccgagtagccaggattacaggcatgcgccaccacgcccagctaattttgtatttttagtagagacgggtttctccatgttggtcaggctggtctcgaactcctgacctcaggtgatccgcctgcctccgcctcccaaagtgctgggattacaggagtgagccaacgcacctggccttgttaccctaattttaaggaagaagaaactgtggcttggagagattaggtaaattgcctaaactctcagagctgcctggaggcagagagccagattcccacttcaggctatctaaatccaaagcccatgttgtttgccacttaaccactaatccatgctgcctctttatgtataaaacccagtataattgtgaataagaacaacaatacaccagagtttctgctataaatatcactgtagtatctataacttagcctagtgtttccttgacttgaatttcatgacctatttcatggattaatatacagttgccaaccttttttttttaaaccatgtaaagatatgtttaaaaacaactactttgtgtgttactaccattgtttcatggaaaaaagtgagaaggacataatctcggaataaagtacngttcttaagttaaaaccttaagcccccaagaatgttttaactcagtgaaacatgtcttcagaaacctgtagtaaacatsatacgtaatgatgaaacaaagcattccaagacagaagtccttcattatcattactattgatcattatgctggaggttccatttatttagaaatgaatgaatgaatagataggtcaggtgcagtggctcatgcctataatcccagcactttgggaggccgaggcaggcagatcacttgaggtgagcagttcaagaccagcctggccaacatggtgaaaccccatctgtagtaaaagtacaaaaagtagctggatgtggtggtgcacacctgtaatcccagctactcgggaggctgaggcacaagaatcgcttgaacctgggaggtggaggttgcagtgagttgagatcatgcctctgccctctagcctgggcaacacagcaagaccccgtctcaagaaaaagaaaaaaggaatgaattaataaataaaatgcatttagaagagacagaattgtcattacttgcaggtaatataattatctacatcaggggggcaacccttttctgtaaagggtcgatagttaagtagtttaggctttttgagccatagtgtctctgtcacagctccttaacaatgccattctagcatgaaagcaccaaacagtacagaaacaaatgggtatggctatcttccaataagaataggcagcaggccagatttggtctgaggttcataatttgccagcccttagcctacatagaaagtcatgatgatcaactaataagataactcagctaaatagccagattcaagttgaacatacaaaatcagtagctttcctatgtatgccagcagcaacttattttaaactgtaattaggaagaaagatttatcttgcaagacaaaaaataaaagaaaaaccccacccaagaataaatattagaagtatgtgaggcttttataaaatttcaaaaatttaaaggatattaaagaagatctggataaatgaagatatatagggttttttgaaggaaaagatttggtattgttaaaaatacatttatttcctaatatgttatttatactctgtaatcccagtcaaaatctcagtaggatttcctgtggaaggataaatatccaaggtaattttttttaagaaaagtaaggttaaaattccctaccggttatcaaatatatcttaaaacaataatggaagcaggaatagaagattgtattagtgaaacagaatatactcttgcttataaataaataaattataaagtatatggtaaatcagaggatattaaaataagagcttaatgccaggtgtgatggttctcacacctgtaatccttgcacttttaggaggctgaagtgggaggatcacttgaggccaggagtttgagaccagcctgggcaatatagcgagaccctgtctctacaaaaaaaattaaaaattagccaggtgtggtggcatgtgcctgtagtcctagctaccaggaggccaaggcaggaggatctcttgagtccaggaattcaagactgaagtgaattataatcataccatggcactccacactccagcctgggtgacagagcaagacgctatctcttaaataaacaaatacagaacttaagtattccttaaacagccccatcctaaccaccacttccccttttaaaactcacacctgtaatcccagcactttgggaggccaaggagggtggatcacagggtcaggagatcgagaccatccttcctgactaacacagtgaaaccccgtctctactaaaaacacacatacacacacacacacacaaaattagccaggtgtggtggcgggcgcctgtagttccagctagtcaggaggctgaggcaggagaatggcatgaacccgggaagcagagcttgcagtgagccgagatcatgccactacagcctgggtgacagagcaagactctgtctcaaaataataataataataataataataataaataaaattaaaataaaaaaataaaactcttattcacaatactactatacactgattccttttctgaatttttttctcttaaggctattttgattcctttaattcaaggggggcaaatgtctagaagttcctggcaggtaatatagatgagtgaagtaggttgagtgtgagaaaaaattcacttaatagggacagcagttactcagtcctaggctgatggccatgaagaaatatgagcccaacattaacatatgctgccaaacttttctcgcttttaaaccaggacagaaatgtggatttttatatgaagtcacaccatttttatatgtgtgacattgtcagatttaaaaaataatattgctgacaaaacacatttgatgatcatattgaaccatgggcaacttattagrgacattaattttattccttgaatgcctttaaggtgtttattgatttcacttgattaaaaattggtatggggtggactcacggccacatgttaaaagaggtgcccaaataagggaaagtaggactttcagataagttgggaaactattttctccagtacttatccagttatttcagttctttttattaaatttcagtttatcttttccatcacaggttggaaattccatgggctggaaacctggagattgtattttagatatactagttattattgtaagaaaatatgtatgtgagagggaggggtaaaaatgaaagttaaaccaacctggtatttgccatttgtgtcctagaggtcctagctaagggacagaaatgccagtttatctgaatatacatcaccatgagacyggaatagttgaaacactaatttgaagcacaggaaaagtgtctatgaatgtcagagttgagttacacttgggaaactgtggactactctgcaaccagcaacgacttcaataagttatatatagattatagaagaatccctttaagaactgagggtttgcttgtattgtgtcaggatggtgtaagagtaggtatatctttaatgtgggtagtgctttccaaaatcctgtccctatcccaggttttcgtaaaaggcaattatttgtgcttatacattttcatctttaattgaactgaaaaatgaatttatgctagttgttatataagagcttaatgtgattttattgactcttaagggtgtatagagaattatatgcatgatcttttttgggaaaaggtgtcatgacagattttgaggaaataatgagcttggtaccagttaaatacccataatctgaaaatttgaaatgcaaaatgctccaaaatctggagctttttgagcaccaacatgatgcacacagaaaatgctcattggagcatcttggatttcaaattagagatactcagccagtaaggataatgcaaatattccgaaatctgaaaacaaatttttttttttttttttgagacagagtttcgctcttattgcccaggctggagtgcagtagcgcgatctcagctcactgcaacctccgcctcctgggttcaagcagttctcctgcctcagcctcctgagaggctgggattacaggcatgcgccaccacgcctggctaattttgtactttcagtagagacggggtttctccatgttggtcagtctgatctcaaactcctgacctcaggtgatccacccgcctcggcctcccagagtgctgggattacaggtgtgagccacagcacccggccagttgagaatttctacttaaatgttatatgtccatattcagttcagaatgcctgaaacactaacatgccttactttgtgtgaagtcctactcctacagtttcaatttatgtgaaaatatgttcaatataaattgaaaattgctatataaatggtaactaactttgcagataagcagattggattttattatttctattttttttttctttttatttgagatggagtctcactccgtcgcccaggctggagtgcagcggcacgatctcggctcactgcaacctccgcttcctgggttcaagcgattctcctgcctcagccttgagaagctgggattacaggcgagcgccaccatgcccagctaatttttgtatttttagtagagacagggtttcaccatgttggtcaggctggtcttgaactcctgacctcatgatccgcctgccttgacctcctgaagtgctgggattacaggcatgagctaccgcacscggcccagattttattatttctttctacaaaatgagaaaaactgaagtccagagcagttaagataccacccaaaggaaaatgacaatttagtaaaagtcctgggactagaacccagatttttctgactctcagtcctctattatttctgttctgccaaatagccctcctaatctaacttacaattttttattttataacagcaccttagtaatctttaatttttctttcttatttcttagtcatttaccagggactgattcttctgttaaagtttcttcctccttttctctctgcctttcaattttctgttattgttgctctgtttgatatatttatattaatattatagcctgctaactagtttcccggtttgtgttacctttttcattcacttcagactacatacacacagatgtctagagatacaatggtttaagaccatagtctctggaaccagtgtgcatagatttgaattctggctctgtcacctcataactctataactttagrtaaataaaattagtttctcgtctgtataatgaatccagtaatagtacatacttcataaagtgtggaaactaaagagttaataatatatataaagggcttagaacagtaactgacatttaataaacaataaatattagctgctgctatgatgaggaagatgactgtgcctactactgccattattattattaacaaattaatattagcaaggcatactctgaaaacctttaaaatatatttttatattgctttatgatttaagaaatttctggccgggtgaggtggctcacgcctgtaatcccaggactttgggaggccgaggcaggtggatcacctgaggtcaggagtttgagaccagcctgaccaacatggagaaaccctgtctctactaaaaatacaaaattagccaggcgtggtggcgcatacctataatcccagctactcgggaggctgaggcaggagaattgcttgaacctgggaagcagaggttgcaatgtgccgagattgcatcattgcactccagcctgggcaacaagaacaaaactccgtctcaaaaaaaaaaaagaaaaataaatttccttccatctttattatcttctttgattctcaaatcaaatatatgatataattaggggcaaagattattatcctcattttacagatgaggatactgatgataaaataaatcatrtaaatctacttggagataggaaactgaacattaaaaagtaagagagggctgggtgtggtggctcatgcctataatcccagcactttgggaggccaaggcagcagtatcacctaagcccaggagtgtgagaccaccctgggcaacatagggagacctcatctctactaaattaactgggtgtggtggcatatgcctgtggtccaagctacttggaaggctgaagcaggaggatcgcttgagcctgagtggtgaaggctacagtgagctgtggtggtgtcactgcactctgccttgagcgacagagtgagaccctgtctcaaacaaacaaacaaacaaaaaaagggatgccacttaaagccttctacagtcaaatctcagtcttcccatccttaccaccagctctcctgaatcccagtaatgagacattgctctagccaaacgctcatactgtgtatcttaatataagtgcttatgaatttttcttcatggagtagctcttcctccttgggaagcagcagagcttagaggttaaaaatgcaaggtttggagtcaaacttgcaaggttgcctgggtttaaatcctggatctcttacttggtagagtagtttatttaactttctcgtgcttcagttttcccatctgtaaaatgtgaataatagtacagtttgtctcttagggatgctgtgaggattaaataggctaatatatgtaaagcattataaaggaacatgaaaatgctctaaaaatcggtgagctaagtatccatctcaagaagttttaaaagaagagcaaaataagcccaagaaaggaaggatataataaaataagagcagaaactaattaaatttaaaacaaatacacagtgaggtactttcaatgtcaaattcattgtaagagagaatagaatagtgtttgccagggactggggtagggggcagggaatggggagttattgttcaatgggtatagagtttcagttttgcaggatgggaagagttctggagatatggatggtggtgatggttgcacaatacgaatgtacttaatgccatttaattgtacacttgaaaatggttaagataggccgggtgctatggctcgcgcctgtaatcccagcactttgggaggccaaggcgagtggatcatgaggtcaggagttcaagatcagcctggccaacatagtgaaaccctgtctctactaaaaatacaaaaattagccgggcatggtggcatgcgcctgtagttccagcttcttgggaggctgaggcaggagaatcacttgaacccgggaagtggaggttacagtgacctgagatcacgccactgcactccagcttgggtgatacagtgagactgagtctcaataaataaataaataaaaagttttaaaaaagaaaaacaaagaaaaggccrggtgctgtggctcacgcctgtaatcccagcaccttgggagaccgaggcgggtggatcacttgaggtccggagatcgagaccatcctggccaacatggtcaaaccccatctctactaaaaatacaaaaagtagctgagcgtggtagcgcgtgcctgtagtcctagctacttgggaagctaaggcaggagaattgcttgaacccaggaggcagagattgcagtgagccgagattgccccactgcactccagcctgggcaacagagcgagactctatctcaaaaaaaaaaaaaaagaaaagaaaagaaaatgttaaggtaactgggtgtggcgtggtggctcacacttgtaatcccaatacattgggaggccaaggtgggtggattgcttgaacccaggagtttgagaccaacctaagcaacatggcaagaccccatccctacaataaatacaaaaattagctggatatggtggcgcgtgcctgtgtttccagctactcaggaggctgaggcgggaggatctcttgagcccaggaggtcaaggctgcagtgagccataatcatgctattgcactctagcctgggtgacatagcgagtctctgtcccaaatatgaactctttagtaaaggattctggggtataacactttctgtatagaaaaaataaagttaaatgatttcctacactgtacacagaaatatattccaagtgaattactttggtgtgtaaaacaaaactttaaaatatttgaagaaaatataaatatttttatgattatagggaataaaggctcttaagacacaaaaaactaataaaaatttttgagtttgattacataaaaattaaacttctgcattacaaaagataacataaaactaaagtggtacattacggaagatatttgtcgtagactaagttatatgaatgggaattatgttaggagatacagagtggcaaatttttgaatttttagaatgaaaatctatcctcgccgggcgtggtggctcccagcactttgggaggccgaggtgggtggatcacctgaagtcaggagttcgagaccagcctgaccaacatggtgaaaccctgtctctactaaaaatacaaaaaattagctgggtgtggtggcgggcgcctgtaatcccagctactcgggaggctgaggcaggagaatcgcttgaacctgggaggcggaggttgcagtgagccgagattgcacgccactgcactccagcctgggtgatagagtgagactctgtctcaaaaaaaaaaaaaaaaaaaaaaaaatctatcctcattcactgtttttcagcttcaagggtttttgactaagtattgactgcctctctcttgaggtgatccttcctccctccctttccctgtctcgagctattctcatgcgtcagcctcccaagtagctggcactaggggtgtgtgctacctggcctgagtcaacccattacttagtcttttattcagacaattagcaaatgttactaaggacctgtaagacagcacattattctgatgacttcccagtaatgaggtattgataaaggaaagagacccctctgagtgaggtacaagattgtggtgtttagttttatgtaactgtgacatctggacacctcctcttgtactttatcaactttcccctttaaaataatttgctagtaccttcctgttataagagtaagggggggtgtcattagcaaagaaagcatctgttgaacatcctagcaattctataaggtcgctgttgaacatcctagcagttctacaaggtcagccaattttttttttaacttaaaaatcaaagaagaaaaggttatgtaactaagcatgttacatggtttgtggtgattgtaaattctgtgaaaattgacattgtggtcagtagtggctttttttttttttttaatggagttttgctcttgttgcccaggttggagtgcagtggtgcgatctcagctcaccacaacctttgcttcccgggttcaagcgattctcctgcctcaatctcccaagtagctgggattacaggcatgcgccaccacgcctgactaattttgtatttttagtagagacggggtttctccatgttggtcaggctggtctcgaactcccaacctcagttgatcccaaagtgttaggattacaggtgtgagccaccacacccagccagtagtggctttttaacctctcaggctggagtacagtggcacgatcacggctcactgcagccttgacctctgggtttcaagcagtcctcctacctcagctccccagatagctgagactacaggcacgcacaaccatacctggctaatttctgtattttttgtaaaggcaaggtttcaccatgttgcccaggctggtctcgaactcctagcctcaagcgatcctcccacctcgacctaccaaactacgaggcctttctcaaaaaaagaaaatgataatatcctgttgtcattcattcagctactatttagtaacagcaaagaaacaacaacaaataagttataatcactgttttgaagaagttctgtagtctagttgaagaaacagttgtttgtatataattatgatttgacttctggcagaatagtcaaccatctattccaaggagtcattttgttataaaataactacatccttgacaaaacttaagcagaaccaaaaacagtggatgtattagaatggcaaagctaacattaaccagcatgccgataacattaatactatgtgatyttggcatttaaactaggctctggagaagggcaaatgtgctcttgtgtaattagctccccctggcttctgagatatagttgttctatatgaacacattttctgtttaggccacaaggaatcccataggttaaaaacaaacgtgctcacagtgaaagatctctgaacacacagaaaaacagaccaccacaattgacaatccatcgatttagttccttcccaaatgagtttcagagattggaattatcagacagaatgtgtagagtaatgtatatgaaatgttagaggaagattaaatggaataacaaaatgaacaacaggtaagatatttggacagatggaaaaaaataatctataggaactcttgaaagagaatacgcaagaatgtagttctgaagacatcagaatgcaacaggagaaataaggagtggggaaaatgaaaaatgaaggccagccgtggtggctcacacctataatcccatcatgtgaggccaaagtgggagaatcacttgagcccaggagttcaagaccagcctgggcaacagtgggacctcatttctataaaaaaaatacaaattaggcaggtgtggtggtgtgtacttacagtcccagctactcaggaggctgaggcgggaggatcatttgagcctgggagattctgtacaaaaggagagaacttttgagttctttagaagataacactgtctggctgggcgtggtggctcacgcctgtcatcccagcactttgggaggctggggcaggcggatcacctgaggttgggagttcgagaccagcctgaccaacatggagaaaccccgtctctactaaaaatacaaaattagccggacctggtggcgcatgcctgtaatccagctactcgggagactgaggcgggaaaatcgcttgaaccgagaggtggaggttgcggtgagctgagatcgcgccgttgcactccagcttggccaacaagagcgaaactccatctcaaaaaaaaaaagataacacgggctgagaacaccctaaaagtgatgaaaaatatgaatctaagataaaggaagcaataacatatactaaatagcataaataaaaattttatacctagttattgtaatgaaattataaaacaagcagttttaaaagcatccagagtttacatctactagggtaactataattcaaaacaaacaaacaactagaaaatgacaaggcttagagaggatgtggaaaaattggaacccatttacatttcttgtagtaatgtaaaatggtgcagttgctgtggaaaacagtttggtggttcctcaaaaattaaacatagaattaccacatgatccagcagttctacctctagatatataccccaaaagaaatggaaacagagacttaaacagatatttgtataggcatgttcatagcagcattattcacagtagtcaaaaggaagaacagtctacatgtttgtcagtggatgaatggataaacagtgtgatgtatacaaacatggaatattattcagtcttaaaaaggaaggattttttttttttttttttttttttgagacggggttttgtccttgttgccctggctggagttcaacagcacaatctcggctcgctgcaacttccgcttcccgggttcaagcaattctcctgcctcagccttctgagtagctgggattacaggcgcgcgccaccatacccagctaatttttgtatttttagtagagacaggggttcaccatgttggtcaggctggtcttgaactcctgaccttaggtgacccacccatgtcagcctcccaaagtgctgggattacaggcgtgagccactgcgcccggccaaaaaggaaggaaattctaatacatgccgcarcatgggtgaactttgatgacattatgctaagtgaaacacgcctgtcacaaaaagacaagtattatatgatgccacttacatcagtcaccttcagtagtcaaattcagagacaggaagtagaatcatggttgctggagaaaggggagaattgggagttattgtttagtggatatagtataccaatttgggaaaataaagttttggagtttggttgcacaacagtgtgaatgtacttaacttttgaactgtacactaaaaaaatggttaaggtggtaaattttacgtgtattttaccacaattttccttaaaaaaggaatgacattacactttcttctgggtgatggaacaagaccctaaatcttaaaaaaaaaaaaaaraaraaagaaaagtctgataaatgctacaaaatggttgaaccrtgaaaacatgctgaaataagccagacacaaaaggacaaatattgtatgattacatttatcaaaatacctagaattgttaggtccatagagagagattaaaggttatcaggagctgggaaaaagagataagggggagttattggtacagagtactgtagtctgaatatttatgtccccccgaaattcatatgttgaaacctagtccttaatgtggtagtattaagaggtggagcctttgggaggtgatgaggtctaagggaggtagtgaaaaattttggaaatagtagtgagaattgcacaacattgtgaatgtagttactgccactgaattgtacatttaatggctgaaatggcacactttatgttacatatatttaatcacaataagaaaatgataaaaaaaaaaaagccaaaaaaaaaaaagatcagtataaaaggactacaattaaagagtaataattggagctgsgcatggtggctcacacgtgtaatcctgacaagttgggaggctgaggtgggaggattgcctgagccaaggagtctgcaaccagcctgggcaacatggtgagattccgtctctaaaaaaacaygaaatttagccaggtgtggtggcatgtgtttatagtcccagctactcaggaggctgaggtgggaggatcacctaagcctgggagattaaggctgcagtgagccgagattgcaccactgtacgccagcctgggggaccagagtgagaccctgtctcaaggtgagggggttgggggaraagtataattggaatgattgtaacacaaagaaatgatatatgtttgaggtgatggctaccctattatatactctgatgtcattattacacactatatcaacatatctcatgtacccccaaaagatacatacctactatgtacccataaaaatttttttaaatttttaaaaaggactacaattaaactgatgacagacttctcagcagcggcagtggaagccagaggcagttgtgaaaaatatttttatagcattgatagaaagtagctgtcagtgtagatttgcatacaaagcaaaactactttcaagaaccaggaaaacataaagacagaaacaaaaacagaaatttaccatcaacagacagaccctctctctctctgtctgtatatataatatataatatatatatactatatatacacacacacacacacagacataatttttttttttttttttttttttgagacggagtctcgctctgtcacccaggctggagtgcagtggcgcaatctcagctcactgcaagctcctccttccaggttcatgccattctcctgcctcagcctcccgagtagctgggactacaggcgcccgccacaacgcccagctaattttttgtatttttagtagagatggggtttcacagtgttagccaggatggtctcaatctgcagacctcgtgatccgcccgcctcggcctcccaaagtgctgggattaccatagttttttttttaaccaagaagcactgaaccatcaccaaacttctaaataagttttacactgggaagttagcaatatatataatatgtataatatatgtaatataatatacataatatgttatatatatgttatatatacataatgttatatatagttatattatgtgtatatgtacatatgtatgtatatatagtgtgtatacacacacacacacacagaggcatataatttgttttttaaccaagaagaagcactgaaccatcaatagacttaataagtgagttttactctgagaagttagcaataaggatggtgagtcatgctagcagtaaaatacatgaaatatctggccaggcatggtggctcatgcctgtaatcccagcactttgggaggctgaggcgagcagatcacttgaggccaggagttcaagaccagcctggccaacgtggcaaaacctgtctctaccaaaaaatacaaaaattagctgggcatggtggtgtatgccttgtaatcccagctgctggggaggctgaggcaagaaaattgcttgagcctgggaggcggaggttgcaatgagttgagatcgtgcaactgccctccagcctgggcggcagagcaagactgtctatgtatatatatatgtaaacagtttttaagaattttaagaacagttaaagctgttcttagatatttaagaacagccttaacagaaaatatgagaaactcttatgaataaagtttaggaacgttaagtataaatttataaatactaatggagtattgtgtagtcattaaaagtaatgtttagggctgggccctgtggcttacacctgtaatcccaacactttgggaggccgaggcgggtggatcatttgaggtcaggagttcaagaccagcctggacaacgtggtgaaaccctgtctctaccaaaaatacaaaaattagccaggtggtagtggtgtgcatctgtaatcctagctactcgggaggctgaggcagaagaatcacttgagcctgggaggtggaggttgcagtgagccaggatcacgccactgcactccagtctgggtgacagagtgagaccctatctccaaaaayagaaataaaaaagaaagaaaggaatagttataaagagttgattggaacatggggaaatgtttgttaagtgaaaataacagaatagaattttttttgtgtgaagagagggcatactttgtttcattgtgcattgcaggtaatgtrgttgtttttagaaactgaaggtttgtagcaaccctgtgcctattggtgctatttttccaacatatgctcattcatgtctctgtgtcacattttggtaatatttgcaacatttcaaatttttattgtatctgttatggtgatctgtgatcagcgatgttactattataattgtttttacatattcctaacttcgtccatgtaagaccgtgaacttaattgataaatgtcgtgtgttttctgattgcactaacccaccattccccatctctttctatctccygggacctccttattccctgagacaccacaatatcgaaattagaacaattaatagccctacagtggcctctcagtgttcaagtgaaaggaagagtcacacatcttttgctttaaataaaaaactagaaaagattaagcttagtgagtaaggcatgttgaaagccaagataggctgaaagctaggcctcttgcaccagttagccaggttgtgaatgcaaagttcttgtaggaaattaaaaatgctactgtagtgaacacatgaatgataagaaagcaaaatagctttattgctaatatggagaaagttagtggcctggatagaagatcaagccagatacaacataaagccaaagcctaatccagagcaaggccctaactctcctcaattctatgaaggttgagagaggtgaggaagctgtggaaataggttcatgagatttaaggaaagaagtcatctctataacacaaaagtgtaagatgaagcagcaagtgctgatgtagaagcagcagcaagttgtccagagcttcagctaggatcactcatgaaggtggctccagtaatcagcagattttcaaggtagatgaaacagccttctgttggaagatgccatgtaggactctcatagctagaaggaagtcagtccttgcttcaaagcacaggctgactctcttgttaggagctaatacagctgtctggcaactttgagttgaagccactgttcatatacaattctgaaaatcctagggctgttaaaaattatgctaaatctattctgtctgtgctctgtagatggaacagcaaagcccaggtgacagcacatctgtttacagtgtggtttgctgaatatttcaagcccaatgttgagacctgctcttgttcagggaaaaaaaaaaaaaaamacagattctttacaaaatattactgttcattgacaatgcacccagtcacccaagagctctgatgtataaggagattgatgttattttcttgcttgctaacacaacatttattctgcccatggttaaaggagtaatttgacctttcaattcttgttgtttaagaaatacaaaccggccgggcatggtggctcatgcctgtaatcccagcactttgggaggccgaggcaggcagatcacgaggtcgggagatcgagaccatcctggctaacaccgtgaaaccccgtctctactaaaaatacaaaaaattagctgggcgtggtggcaggcgtctgtagtcccagctactccggaggctgaggcaggagaatggggtgaaccctggaggtggagcttgcagtgagccaagatcgccactgcactccagcctgggcaacagagcaagactccgtctcaattaaaaaaaaagaaatacagggcwgggcatggtggctcamacctgtaatcccagcactttgggaggccaaggctagtggatggatcacttgaggtcaggagttcaagamcagcctggccaacatggtgaaaccccgtctctactaaaaataaaaattagccaggcatggtggcacacgcctgtaataccagccactcaggaagccgaggcaggacaattgcttgaacccaggaggcagaggtcgcagtgagctgagatcgcgccattgcactccagcctgggcaacgagcaaaactccgtctcaaataaaaagaaaaaatacaggctgggcacggtggcacacgcctgttatcccagcactttggaagtccgagatgggaagatctctagagctcaggagtttgagatcagcctgggcaacattgcgagacgtagtctctattattaaaaaaagaaagaaagacattttgtaaggctatagttgccgctaataatgattccttttatggatctgggcaraggaaattgaaaaccttctggaaaggattcaccattctagatggcatgaagaacatttgtgattcatagggagaggtcaaaatatcaacattaaggccaggcatggtggcttttaacacctgtaatcccaacactttggaggccaaggcaggcagatcacgaggtcaagagatcgagaccatcctggccaacatggtgaaaccttgtctctactaaaaatacaaatattagctgggtgtggtggtgcatgcctgcagtcccagctaccatgatcagtcatcatcaaggcaagaccctccaccagcaaaaagaatatgatttgctggagactcagatgattgttaagagttttttagctataaagtatttttttaactaacatatggatattgtttttaatacataatgctattgcacacttaattgactatagtatagtgtaaatgtaactttttaaaaatttattggtttgtttttagagacagagtcttactctgtcactcaagctggagtgcagtggtgttgtcagggctcactgcagactcgaacccctggtctcaaccgattcccccacctcagccctccaagtggctgggactacaggtgtgccccaccacatctggcaagtttttgtattttttgcagagatggggtttcgccacgttgcccaggctggtctcaaactcctgggctcaggtgatccgccagcttcagccttccaaagtgctagaactgcaggcgtgagccaccgtgcccagcctaaactttacaattttctagaggtttattaaccagaaagaacagactctgttgtcacttcttatattttttatgctgagattctttctgtcattatttaaaaaaaaaaaaaaaaaaaagttgagccaggaaccgtggctcacgcctgtaaccccagcactttgggaggccgaggcaggcagatcatgaggtcaggagtttgagaccagcctggccaatacggtgaaaccccatctcaactaaaaaaatatatatacaaaaattagccgggcatggtgtcactggcctgtagtcccagccacttgggaagctgaggcagaagaatcgcttgaacttgggaggcggaggttgcagtgagcggaggtggtgccactgcactccggcctgggcgacagagcaagactcatctcaagaaaagaaaagaaaaaaagtcatgcgttgcttaacatcaagaatatgttctgaggccaggtgcggtggctcacacctgtaatcccagcactttgggaggccaaggcgggcagatcacttgaggtcgggagttcaagaccagcctaaccaacatggtgaaaccccgtccctactaaaaaaaaatacaaaattagctgggcgtggtggcaggcgcctataatcccagctaccccggaggcggaggcaggaaaatcgtttgaacccaggaggcggaagttgcagtgagccgagatcgcaccattgcactccagcctgggtgacagagcaagactctgtcttcaaaaaaaaaagagtatgttctgaaaaatgtgtcattagggaattttatcctttgaacatcctagagtgtacttaaataaacgtagatggcatagcctactaaaaaccgaagctatgttgtgtagcctattgctctttggctgtaaacctgcactgcatgtcactgtattgaatactataggcagctgtaacaatggtaagtacatayctaaacttttttttttttaaacggagtctcactctgtctccaggctggagtgcaatggcgcaatctcagctcactgcaaccttcgactccttggttcaagcaattctcctgcctcagcgtcccgagtagctgggattacaggcatgtgccaccgcacccagctaatttttgtatttttagtagagayggggtttcaccatgttggccaggatggtctcgatctcttgaccttgtgatccgcctccctcggcctcccaaagtgctgcgattacaggcatgagccaccacacccggccgtatctaaacattatagaacacagaaaattgtgaaaagtataaagaaaaatccactcactttcaccaaatggagatttacaagataacaatttcagcattactatcttacagtctttttcttctataaatgttagtattgtatttgaaaccagtcacacacatagtcaggcataccttggagatattgagatttcagttccaaaccaccacaataaagcaaatattgcaataaagcatgtcacacgcaggtggatcgcttgagcccaggaggctgaggctgcagtgagccaagatcacgccaccatagttcagcctcgacaactgagtgagaccctgtctcaaaaaaaaagaaaattgtaaggtttaatacaattttctctgtttcttacataagccattcttaggcaagaaaaaaattctttgtgaacacatgatgttatggattcataggctctcatccttgaaagaggccttaagtttgacatagcttttttttttttttgtcttcaatctccatatggtttggtggattcacttaaggagaggttacattcctgttttgtcttttgatagatctatgaaattattagaatggtttctgttctttggcagatctgctagaataaaatttcttttctctacggcttcatacttttgtccttgttttgcttcctgagatcacaccagtttgattcctctccctgacaatggttacgcccttcctgcattgttttttatttcttctgcatttcacgtaagacataattaaaatctttacttaaattattaactttattggtaattatttctcattcacttctactttaacactttttttttttgagacaaggtcttgctytgtggcccaggctgggttgcagtgttgtgatcaccagtcagtacagtayagatcctcttgcctcagactcccatgtagcgggtactacaaatgtgtgccaccacatgtggctaattttttcatttttagtagagataaggtctctctctgtttctcaggctggtcttaaacttccaagctcaagtgattttcccacctcggcctcccagaattggccagactggtctcaaactcctgacctcaggcaatccatccactacggcctcccamaattggccagactggtctcgaactcctgacctcaggcaatccatccacctcggcctcccaaagcgctgggattasaggcgtgagccactgtgcccagccaacattgtttaaagttaggtagccaacttgaacctgaagctcatctgtgaaccaaacagaataaaccaataccctttacttccctcattgttactatgtattctcatagtattatgtaatagttttttagaaaacatgttacagtatgtgattggttcatgattttttctaaacctttaaaaaatgaaaaaatacagcattgctaaaccttgtcttctcattcagtactagtgtaattgtgttttagaatgccagttgtgtctgcacattcccagccctctcaagttcatatccatcaaagctgtcagtatgtcatctgtagcttcatctatgtcatttacaaaagtgttgaattggtaattattttaagtttaagttaaaataatcttaaagtttaagatttctttagtcctggatattatagaaaaaaggttttgaaataaacatcagaagaaatttggaaaataattttattgataactttattttcagatttctagtttggagtagaagtcaaggtttttatagtctgtattactttttctttgttttcagggatccatctgtctctaagtctgtagaacgaatctttaaaatctgggaagatagaaatgtatacccagaagaaatgattgtggcattgagagaagctttgagtaagtgtctttttctctcctaaaagaaaatttttgagtcagtctttacaattacataattttatagatctggtcatgttgtataatagtgaaaaattaagttttgaatctagccctatttgtttaaagttaaatatttatgaaaaatctagatctgtttgaattaaaatgtaagtagaattggttttagggatggggtcggattttgttttttagtgactacaaaagtcaagcatgttaagtggtaatagccatctggttattttcctgcatttgcgttgagtgtttcaaatggttcattgtttgtgttaataaatactgccctgtgcccttactgttggagaatttttgcacagggtgtcagttcttactaagctgtttggtagtaagcatatatcagcagtctttagactgtcttttgatttagatttacagtaagtkgtgtactgttttgttaaaaggaattatgtattatatgcatgtaattaagttattgaacagaagtttgtgataatctgctaccatgaccgtcattttactagaaatttgctttaaaaatggcatcttctaagaagctgttaaattcttcattttaatttgttaattggtatttttaagcctcctcccctattcttttcagaattggtaatttcgctgatgataaaaatcgtgtttatttgacagcttcttagatcgggtaggaatttctattttttcataaaaatgaaagaaaaggaaagaaagaaacaacacacagtctcggattgccttttttcatgctgcaactttggcactgaagtggacagacagaacagcttcccataatgccagattgcaaaaactgaaatgttttccaggtaccactttcaaaactcagaagcagctgaaagaaaatctgaacaaacaaccgaataagcagtggaagaaatcacaaagtaaggaacaaaatctcaactaatataaaattacctcctctttttggagcagaagaaaatgtagaccatttgacatcgtacctggcataaaccatgggcaagcctgttttccaggtctgggaggctcccagtgacctatgctaaacaagccatcatggagatacttctaaaaaaaaaaaaaaaagcaaacaaaaactacactttaaaacaaaggaaatgcagaaaagggtttaattgagtgaagattcaagagtagttgggggattgcaagaagaaaaaaatacttgatagtgtccmggataattttcaggttcaaggatatatgatgttagaggcagctggcattaaacaacagatctgaagaggagactaggcattaagaagcatttctgtgggaaccatgaaatctccagatttgggggatatactctaccaaattagacatggacctcagatcctggccagaagctcattctgtaatgggagctcctgttatatttatcgtatttacccagcatgagatcaagggaatggaatactgcatgtgataggctgctgtgggcaaactgaggaatattgagagagacttgaaggtgtggagggaacaaagtaaaagacagtgagaattgggaggtgaaacgagatacttgggatggttttgctccagcgagcatatgatatccatcatgattaagggagtcctcagacatcttcttggtcataagttgcatgcttaggaacaacaggagtcgtcatttcagccaaagttccaccacagtattaatatacctagaagtttccttgcctatttttgctatgaattgagtcagcagaaaaagaaattcaaaggataaatttataggaatagagttatttgtcaccaattttcttcagccagtgctcaggattaattggatgtcctgttcctgaacactcttaatttgaggtatttagatcctgttacacccagactaggaaaaaaaggtacttgatgtatctcggtgtctccaaatcaataattctaggactttatgacctgaagggtctgttggaggtaagtaggttaggtctgtctaaatagcgtatttttacattgaccacatttaggaatgtttaaatttcctagtccattatttattttaggaattatgacttaaatgtgcatgtttgccatatgttcagagtatatctttaackatagagctaaaatttttcctgttagtcaactttttgtgtctgtattcttaatgaccttttgtttaattccaacagcatctacaaatccaaaagctgctctcaagtctaagatagttgctgaatttcgagtaagttacagaatttgtttaatatagcaaagtattattcaccccttttgtattatagtttcctgtatagtccaataagatttatctgtattcarttacacatgtcatgttttaaacatgcatgaactgttctaaaggaacccagattgggattagattgcttggcgttttatctgttcccctaatggtagaaataaccttcttccagtatatctrttatcagctgagttscatattcaatttatgccagcaagagagtttattttcctgtgaaactctttctaaattagaatttgcttagaataacagaaggctatgtttatgtaattaaaatttagagaggctatataaatggacctttgtctgttttagtcttaattctgtatccataaattagctttgtgtaatgaaggaaaaggatcttttaaagtctgtaactaggctgggcgcggtggctcackcctgtaatcccagcactttgggaggccgaggtgggcggatcacgaggtcaggagatcgagaccatcctggctaatacggtgaaaccccgtctctactaaaaattaaaaaaaaaaaaaacaaaaattagctgggcgtggtggcgggcgcctgtagtcccagctactcaggaggctgaggcaggagaatggcatgaacccgggaggcggagcttgcagtgagccgagatcgtgccactgcactccaacctgggcgacagagcgagactccatttcaaaaaataaataaataaatgaagtctataactaaacatggttttgacatgataattgatcattaatatctgtcaccatgagaaaaagtgaaaagtttttttcctcccagggttttgttaagctttagggtgtttgttttgttttgttttgttttgttttacaaaatgaggagagagagaatgagaataattgaatgatcttgtaaatgaaatatgactctggtctgtgtttagtctcaggccctaattgargagctgttgctatacaagcgctcagaagatcagatagaactgaaggaaaagcagttgtcaactatgagggtggatgtgtgcagcacagaaactctcaaatgcttaaaaggtaatgcttacatccttttagagtaagtcagattttctttccatatgtgtcatttttccrgtaatcatactggtttacctcataaggagatccttgggtagaaagcagttgtggcacctctggtttcccaggtagttatttcatgcatataaatttcataagtaaattctgttgttctcatttctagtactttcttggtgtactaggttatatatagacagttgtatttcacatgtatggttaattggtatgggtatgctctttaatgaagtcactctaatgcctcataaaatctagttagaccatctagtttccttgcattgtaaattgtaaatcatactaataatttattataatgtaagcctcatgaaggcagaaattatattgatttgttcattgctataccctggcacctagaacaatgcttggcacataatagatatttgatgaatatttttgaaataataagtaaatgactactagctattaattttggcaccaattttattcctgtgccgtactttaaatttaacagaccagacacagtgcctgtaatctcagcactttgggaagccagggcaggaggactgcttgagaccaagagtttgagactagcctgggcaacatagtgagaccctgtctctacaaaaaaattaaaacattaatgagcttggtggcacacacctgtagtcctagctgcttgggaggctgaggcaagcagattgtttgaccccaggaggctgtagtgaactctcatcatgtcactgcactccagcctgggtgacagaagagaccgtctctaaagaaaaattttttaaaaacaaacaatttaacatatattacctaattcaatcctcataacagaaaacatactaaaaatctctattttatcacatgagagatctgaggtcttgtaaggagattagtagcttacccaagttacacaactgataagaggcaaagccaaactttatactcatatccaaagccatattctgccagtcactgggaaagaagtagatatactgaattatcacgaatctttttcagataggaaagaagaacttttattgtgatgcatacagaggtcactttatttttacttttctgaacgttacttttctcgtttaagagataacatcttactaccttctgtaatgcaaaagttatggtataagcgaatacagttgagcttcattctgttattcctaagtaagtagcagtgtggaatccaatttgtgaagaaaataattaatcaacaaactcttttagttgaactttcttttctttaccttaattacaagtgccttcactctggcaggttcacatgagtctgttctgtaaagaattttaataatctgttktgtgattttgtgatttggagaaacttgtttaagataaaattgtgaggccgggcacggtggctcacaactgtaatcccagcactttgggaggcccaggcaggcggatcacgaggtcaggagctcgagaccatcctggctaacacagtgaaaccccatctccgctaaaaatacaaaaaattagctgggcgtggtggcaggcgcctgtagtcccagccactcgggaggctgaggcaggagagtggcgtgaaccygggaagcggagcttgcagtcagctgagatcgcrccactgcactctagcctgggcgacagagtgagactccgtctcaaaaaaaaaaaaaaaraaagaaactaagagtattagagtactgcacagtaaggcagcaagagtatgttcacaaagagaggttttcttcaaaagtcaaaagactamatttttttattttttattttatcctgaaatgaatatttcccatgtcattttagataaaacaggtgggaagaagttctccaaagaatttgaagaggcaagctccaagctggaagaatttgtgaatggattagataagcaggtgaaaaayggaccctcattaacagaagcactggaaaatgctggaattttctatgaagcacaatacaaagaagtaaaagtggtggctaatgtaagtaataattaaagctgtcttatactgaatgcttgttactatatttcagagattgttaacatgcattatctaactctgttaggatatgcatttttatctccttatcgcagatgaaattacttttgggataggtgctgtggtacacacctgtaatcccagcactttgggaggctgaggcaggaggattgcttgagcccaggactttgagaccagcctgggcaccatggtgaaaccatgtgtctagcaaaaaagtacagaaattatctgagtgtgatctcaggcttcaatgagctgtgatcacgccactgcaccccagcctggccaacaagagtgagacccgtctcaaaaaaaatagaagaagaaattatgaggattagtaaacttgtacaaggtaatacagctagtaagtggtagaataagacctgggtctttttttttttttttttggaacggagtttgtcgctcttgttgcccaggctagagtgcagtggtgcaatctcagcacacagcaacctccgcctcccgggttcaagcgattctcctgccttagccccgctgagtagctgggattacaggcatgcaccaccatgcccagctaattttgtatttttagtagagacgaggtttctccatgttggtcaggctggtctcaaactccaacctcgggtgatccgcctgccttggtcccgcaaagtgctgggattacaggcaggagccaccgtgcccggcccaatttttgtatttttagtagagatggggtttctccatattggtcaggctggtcttgaactcctgcccaccttggcctcccaaagtgctgggattgcaggtgtgagccaccgtccctggccttactttttttcttaaccagaaaactggatggaaacatcctgttaccaaatttcatgtaaattgactgaattaaggaactttttttttttttttttgagacggagtttccctcttattgcctaggctggagtgtaatggcgtgatctcggctcacttcaacctccgcctcctgggttcaagtgattctcctgcctcagcctcctgagtagctgggattacaggcatgtgccaccacacctagctaatttcatatttttagtagagatggggtttctccatgttggtcaggctggtctcaaactccctacctcaggtgatccgcccacctcggcctcccaaagtgctgggattacaggcatgagccaccacacccagccagggaacttctttttattcccccaagaaagggagagaggtgataaatgggcatgtgtctaatgacctctgaaagaaactaactgttccataatgaattttttttaagttttaatcactgtgtatcgccgtaaaagcatatggtactgtaggtcccaccagtcctacttcgtagaagcaatcccttttaatgaattttgctatttttttctggcatttgctcccatatttgtaaatgatttgcccatattattctttcttgatttatcctattttagaaatagctgttaacttcctgatatgacagatgtggatttagcttatactcacccgcctttctccttctcccagttttgttgtgtaactgttttaaatctgttatctataaattaaaggactgtatttactattttttgaccattaacactagactccctacttcgtaaaatttggttagtagcatccctatttgctcccattagttttcatctatcccttcaattttccagcttcaatcaactatatttactttttgttgttgttgtcttttttttgagatggagtctcgctttgtcacccaggctggagtgcagtggcgcactcttggcctcactgcaacctccacctcctaggttcaagtgattctcctgcctcagcctcccgagtagctgggattacaggtgcatgccatcatgcctggctaatttttggttttttagtagagacagggtttcaccatgttggacaggctcgtcttgaactcctggcctcaagtgatccacccacctcagcctctcaaagtgatgggaccataggcatcagccaccacacccagccaactatatttacttctgtattgtcaaagttggtaatatttacattctgttctataatcatacttaattactctttgctactctaaaggttgaaaaacaatttttcaaaaagcttacattataactctgtaaacattgttcattgcaaggttttgtggtaactatagttgtactagaagttttgttttttcctagagttttgttttctcttttattgtttgcccttgcatagcctttctaaattctccatcacaccagctattctgaattcccttttccccctgggtcctccctacctgaattttcattttccgtccccagtttaggttattccctaagtcttaggctaaaatagctcttaactgttgtcctgagttgagtcctctattttccagattccatgtctttttttcttggtttctatcattgtactggagcagtctcaagtaatttcccaaaaaaaaagtgtttgtgagagggaaattttgtctgaccttatatttagaaatgtctyaggctgggcacagtggctcatgcctgtaattccaacactttgggaggctgaggtaggaggatcacttgaggccaggagttcaagattagcctgggcaacattgtgagacccttctatacattaaaagaagaaagaaaaggaaaaatacattaaaatgtcttagatcattgattttctccccctgcccaaccccgaattggctaatggataagcaggttgattttcagcttttaggaaatgtatacatttaatacagtaaatttccttctaagttgcatcccatgagtttttatatttaagtatatcttttgcaaagagcatatagttggatcttgttttagttttattgttatgttttgatctagtctgaaaatctttgactttgcagtgtttagtctacttattgatatgcttgggtttaagtctaccatctttctatttgtcctatgtgtccttttctttgttactccttttttgctttttttaattaatcaaataatttttagatttctattttgtctcctgtttttgcttgcatgtactctctcttcctctcttcctttctccatccctcttcctccctcctttcctctccctccttccttctttctccctccttccatctcccagatttcacctttttataaggataccagtcatattagattagggcccatcctgatgacctcacttaacttgattacctctgtagaaatcctgtcttcaaataattctggggtactaggagtgaggacttcaacatatgagtcagggggtgcagagatagataattcacccataacaaatggcttcgtgttttttataaattttcaaaaattctcagctattgatctcaattattgktactgtttcatctccctcctctcctcttggaactcacattagtatgtatattggatctcattgttgtgttccaaatgcctttttttatagtcctttctgaattttccatcttttatttctcttctctgcttccttctagatattctactaactagtcttgtaattcattaatactttattctgttgaatcttatctatgattaaaccaaacccatctgttcttagttggtttacttttcagttctagaattgccactgaatttttttaaagaaagagttcaattttctggtaaaatttattcatctttttaaatctcaccattatgaaagatcttaagtccagtatgaagacctttttttcctgaattatttgaaaataagttgcttgtaccccattatccaaaatgttttagtgtgtatttcctactggacatactctyctacataaccatcaggtgtatgtatgtatttatttatttagccgggtgcggtggctcacgcctgtaatcccagcactttaggaggccgaggtgggtggatcacgaggtcaggagatcaagaccatcctggctaacacggtgaaaccccgtctctactaaaaattaaaaaaaattaggtgggcgtggtggcgggagcctgtagtcccactactccgcaggctgaggcaggagaatgacgtgaacccaggaggcggagcttgcagtgagccgagatcgcgccactgcactccagcctgggcgacagagcaagactccgtctcaaaaaaaaaaaaaaaaaaaaaagttatttatttagagacgagtctcactgtgtcacccaggctagagtgcagtggcgcaatctcggctcactgcaacccccgcctcctgggttcaagcgattcttctgcctcagcctcccgaataggtggaactacaggcgcccaccaccactttttgtatttttagtagagatggggtttcgccatattggccagactggtctcaaactcctgacctcaggtgatccacctgcctcggcctcttaaggtgctgggattacaggcgtgagccaccgtgcccctccaggtgtagttatataatcaggaaattaattgatactttgacacacttataatctaatcctcagaaccgattcatattggccagtttttataggaaaagatcctatccagaatcacaagttgcattcggttgtcatctctctttattctcctttgatctggaacagtttcttagctttctccttgattttcgtgacctaaatatgtttgaagattacaagtcaaatattttgtataatgtttcccagtttgagtttatttgatatttctttgtgatcaggttgaggttatgcatctttagaaggaatatcacagaagtgattctgtgttctycatgtttcgtcttgtcagatggcacacaagtttggtttatctcactacctgtaatgttccccttgatattctgattaatgtggcatcttccaggcttgtccattataaagttttcccttggtgattgttatgggttaaattatgcaccccaggccrggcgcagtggctcaagcctrtaatcccagcactttgggaggccgaggcaggtggatcacgagggcaggagatcgagaccatcctggctaacatcgtgaaaccccgtctccaytaaaaaatacaaaaaatyagccgggcgcagtggcaggcacctgtagtcccagctacttgggaggctgaggcaggagaatggcgtgaacctgggaggcggagcttgcagggagccgagatcgcgccactgcactccagcctgggagacagagcaagactccgtctcaaaaaaaaaaaaaaaaaaatcrtccaccccaaaaagatgtgttgaagccctaaccttcagtacatgtgaatgtgaccttatttggaaatagggtctttgctgatataatcaagttaaaatgagttcactggggtgggccttaatcatccratataactggtgtccatataagaagagggaaactggctgggtgcaatggctcacacctgtaatcccagcactttgggaggctgaggcaggcagatcccttgaggtcaggagttcaagaccagcctggccaatatggtgaaaccccgtctatactaaaaataggaaaaattagccaggcatggtggcgggtgcctgtaatcccagctacttgggaggctgaggcaggagaatcgcctgaacccaggaggcagaggttgcagtgagccgagatcacaccattgcactccagcctgggcaagagagcaagactctgtctcaaaaaaaaaaaaaaaaaagagagagagagaaactgagaaactggacaaaagcacagggagaacatcatgtgacagcataggcagatattgaagccatgcagctacaagccaaaaacatcaaggattgatgggcaccaccagaaaccaggaaatggcaaggaagaattctgcccagtgtcagagagagcacagcctgctgacatcttaattttggaccactagccttcagagacaataaatttctgttgttttaagccactcattttgtagtacttaattaaccactgccctaagaaactaatataccaattaatgaatgttttgtgaggaagtattttgaaactatgtaaatatcttgttccttaccagactttcgatgtattcatttatttatatgaatggacttgaatcctatttactcactgttttaattcattactactaatatttactttgatgctcagtttgacaaagttttggtcaatgtgagctcctttctgtgttcttttgacatatcccctttttttttttttttttttttttttgagacgaactttccactcttgttgctcaggctggagtgcagtggcacgatctcggctcactgcaacctccgcctcccaggtttaagcaattctcctacctcagcctcccaagtagctgggattacaggcattcgccaccacgcctgcctaattttatatttttaacagtgatggggtttcaccatgttggccaggctggtctcaaactcctgacctcaggtgatccgcctgcctctgcctcccaaagtgctgagattacaggcgtgagccactggcaccacttttttacactactaattacttttctaacagtgtaaaaccttgctcccttgtcttcaatatatttactttttttttttttttggagacggagcctcgtgctgttgcccaggctggagcgcggtggcacaatcttggytcactgcaacctctgtctcccgggttcaagcgattctcctgcctcagcctcctgagtagctggkactacaggcgcacaccaccacgcccagctaatttttgtatttttagtagagacgaggtttcaccatattggtcaagctggtcttgaactcctgacctcatgatctgtgctccttggcctcccaaagtgctgggattacaggcgtgagccaccgcgcctggcctcagtgtttttacttaatcagttgtggccagtctcccagcacttccatctctctccaaccacctttatgggttttctttttatcctgcttagactccaacatcctttgcaatgcctccctcccatgcagacatttttctcatttttgggtccattctctctaagccactgagttttttccctcagctccagctaatgggttgtggactaaattgctcacagaggaagggaaagaaatttttcactattttcatgaacatattaatcatagctgtttggtttttgtcatatagttccaatattggcttcacctgttacgggtatgttagtggtgtttggtgtttttgttttgttttgtttagtgcccagaggtagctgctaatgtagtgtctgcattttctttttagccatttggaccyatctcttagcatgcctgctaattttttatcgaatgctgaacattaaaagattatggagtctctggatgatttttcttcctttagagacagttcacccttgttttgctaggcagatattgaggctggtcatattaattaaatctgaaacctaactgactcgaggctgaattgcagtttaagcaagscttgttccacctctggttcactccagcttctggaatgtagatttttcccacagagagcctggaatgatcactaagcccccttctccatggcatgatttgaactctctagtccttgtttcctcatcactatgagaccactgctttttccaaggttttctgcttggcttcttccctctcaagcagcttcagaattcagcaaatatcttgaaggaaaaattgttgagccagttctctctttcatcagaatcttggcctttcagtcctctaatttttgcctgttaagaccagcaagactgttaaaagctctgctttttttctttttatttaatagtggccctctcttgtcctttttgccttaattctcagcttcttgcctagctccccagaatcagcagaatcctaagagaaaataatgtcagcttagctctccatgctttccctctgatagtatttgccacttagtttttggtggccttagcactctccagtatattcaaacaagtgtgtctgtgtatctggcttttctacttgttcttgatgggagcattagtctactataagctactgagttatatcaaaagcaaaaagctagattctaatgtattcatatctttttaaaaataatgcttcttggctgggcacagtggctcacacgtgtaatcccagcactttgggaggctggggcaggcggatcacctgaggtcaggagttcgagatcaacctagccaacatggcgaaattttgtctcaacaaaaaatacaaaaattagccaggagtggtggtatgtgcctgtagtcccagctacttggagggctgaggtgggaggatcgcttgaacctgggaggtggaggttgcagtgagctctgatcgtgccactacactcaagcctgggtgatagaacgagaccctgtctgaaataaaataaaataaaggttcttgaatttacaaaacaaaataataacacaatctaatggtcatcaactctcaaaaaaatgaaaaattcaaaagatatctttaagacattagcaattaagactatcaggacatcaataggatttaagccaagtggtcaatattaacatcaacagtggtaagtcgtattgattgtatgtgcccttgatatggtgtgatcgcagtagcagtttacctctgtggccttccacccaaaaactcattaccccagtctagccattagaaaaatatcagtcaaatctcaattgacagtctacaaaatacctgaccagtactcttgaaaactgtcaagatcgtcaaaaccagtgaaagtccaggccgggcgcgatggcttacgcctgtaatcccagcactttgggaagccgagacaggctgatcatgaggtcagcagttcaagaccagcctggacaacatggtgaaaccccgtctctactaaaaatacaaaaattagccaggtgtgggggcgcacgcctgtaatcccagctactcaggaggctgaggcaggagaatcacttgaacccaggaggcagaggttgcagtgagccaagaccayaccactgcactccagcctgggygacacagcgagactccatctcaaaaaaaaaaagaaagaaagtccagcaaagtgtcacaaacaagaggagtctaaggagaaagaagacatgactactaaatgttctgtggtatcttggatgggatcctaggttagaaaaggacattaggtaaaaaaaaaaaaaaacctgaggaaatctaaagtatggacttttgttaataattatgaatattgattcattaatgtgacaaatgtatcatactgatataagatgttagtaataggaaaaattggatatagggtatatgggaactatctttgcaatgattttctaacacctaaaacttcttttacaacaaactatttttgttttgagatagggtctcgctttgtcacccaagctggagtgcagtggtgtgatcactgctcactgcagccctgacctgggctcaagcagtcctcccacctcagccccctaagtagctggcactacaggcagctgggactacaggcgcatgctactatgcccagctaatttttttttatttttttgtagagacagtatctccctatgttgcccaggctggtcttgaactcctggcttcaagtgatcctccttgcctcagcctcccaaagtgctgagattayagacatgaaccaccaggcccagcccctgttttttaaaacaatagcatctgacctcccaggctttgctttatttttggatttgattttttttttcttgtctgtctcatttcttgctgtatctccagtacctagaagatacatttaggctctcaataaatattggttggttggatagataaacaggagcaagggaatataaattacagataactgctaggtttctaactcaggcaactrtgtggatggtaatattcacttagggagtataaaaagcagaaactagaaactactgcatgcttgacagatgatatattatcttgttttgtgccagcaatgtacgtgrttaataatagaaaatctaatcagagtcaaaatgggtcgccagggatgatggtgtatgcctgcaatcctagcattttgggaggctgaggtgggaggatcacttgagccgaggagttcaagactagcctggataacatagcaggacctcatctctcatttaagagaataaaattttatttaaaaaaaaaaaaagcagccgagcacggtgactcaagcctgtaatcccagcactttgggaggccgaggtgcatggattacctgacatcaggagttcaagaccagcctggccaacatggtgaaaccccgtctctactaaaaattcaaaaattagccgggtgtggtggtgcacgcctataattycagctacttgggaggccgaggcaggagaatcacttgaayccaggaggcagaggttgcagtgagctatgatcatgccactgcactgcagcctgggcaacaagagcgaaattccttctcaaaaaaaaaaagaagaggctgggtttggtggctcatgcctataatcccagcactttgggaggctgaggcgtgtggatcacttgaggccaggagttcgagaccagcgtggccaacatggtgaaaccccatctctattaaaaatacaaaaattagccaggcatggtgatgtgttcctgtggatccagctacttggaaggctgaggtagaaggatcacttcaacccaggaggcagaggttgcagtgaaccaagattgtgccactacactctagcctgggtgacaaagtgagactctgcctcaaaaagaaaaaatgttaactttctggtctttttccaaggagtaaactccttttttctcttttaggcatataaaacctttgctaaccgagtaaacaatttaaagaagaagttggatcaattgaagtcaacccttccagatcctgaagaatcaccagttccttccccaagcatggacgctccctccccgactggttctgagtctccttttcagggaatgggaggtgaggaatcccagtcaccaaccrtggagagtgagaaatctgccacacctgaacctgtgacagataatcgtgatgtggaagacatggaactctcagatgtggaagatgatgggtcaaaaatcattggtrtgtctttatgtgattaatagacaacttattccttatctgttttgccttctcagcaatgaatacatcacaggcaggtattgaaagatagttcatttcttaaaagatagaacaccaaggtagcattataatctctagagcagttgttgaggatttgatatgccaaatgtgttaagaatcattgctcagtatctgcactgttaaaatgctagctactaggccatgggcggtggctcatgcctgtaatcccagcactttgggaggccaaggcaggtggatcacctgaggtcaggagttcgagaccaccctagccaacatggtgtaaccctgtctctactaaaaatacaaaacttatccgggtatggtggcaggtacctgtaattccagctacccgggaggctgaggcaagagaatcgcttgaacctgagagaggggttgcagtgagctgagattatgccactgcactccagtctgggagacagagcgagactccgtcttggggggacggtcgggggaaagtagctactagctacctgtggctaagcatttgaaatgaagcttgtccaacttgagatgtgctataagtataaaatacacattgaggccaggtgcagtggctcatgcctgtaatctcagcacttygtgaggctgaggcgggcagattgcttgagcccaggactttgagaccagcctgggcaacatagtgaaaccctgtctctacaaaaaatataaaaattagtcagcgtggtggcatgcgtctgtagccccagctgctggaaaggctgaggcaggagaatcacttgagcctgggaggcggaggttgcagtgagccaagaccatgtcactgcactccagcctagatgacagagggagaccctctctccaaaaaaaaaaaaccagacacattggagtccrgaaactaggcygagcatggtggcagaaactctcccaaagagttaaaatatctcattaataattttttatttataacactgaaatgaaaatatttgggatatattaggatgaataaaatagaatttttaaattacatgtgtctgtttctttttatttgtttgtttttgagagaaaaagagagtttccctctgtcgcccaggctggagtgcagttgcgcaatcttggctcactgcatcctccatctcctgcgttcaaacaattctcctgcctcagcctcccgagtagctaggattgattgtaggtgcataccaccacacccggctattttttgtatgtttattagagacggagtttcaccatgttgggcaggctggtctcgaactcctgacctcaagtgatccgcctgcctcggcctctcaaagtgctgggaggtgggcttgagccaccatgcccggccctgattctttttttgttaatttggctgctagaaaatttaaacttacatatgtggcatatgtggcttaaattgtattcatgttaaatagcactgttttgggatgaggggtcacttatactggaattccttattctctgtcacttttgaccatcaagaattccaaagtcagtttgttaatcacactttcagaaataacctgatttggtgaattgtttctcttatatccccagccttcataaatcttattagatagtttgactcctgttgaattcaatgcactattgatacagcccttaargcattaaaaataattattcaaggtgattgagagttaaaacattgtagtttcaaattagctagtgcctgattgcaccccccaatagggcaatttcaggaagccagaggaaaatacaatgaacactatagaggttctgtttctaagaacagaagttcttagaaagttctcaggttaatggaaaagaaaaacacaggacaatttatgaaaaatatcatttccaaaagacagaacacaaatgtgtaccaaataataacatgcttcttgaattgtacagatttaatacacaaatactaagaaaatgcaaaggaatcattgaaaagtaagatacaagataaattctggaaattgcttgcttttttttttttttttgagacgggagtctcgctttgttgcccaggctggaatgcagtggcacaatctcggctcattgcaacctctgcctcctgggttcaagcgattctcgtgtctcagcctctgtagtagctgggattatagacgcctgccaccacacctagctaattttttgtattttttgtggaggcaggatttcaccatgttgaccaggctggtctcgaaatcctgacctcacatgagccattgtccccagctggaaattgcttttaagcagatattaaaggtgggaattatcataaattatgaagagtatgactttttcaaaaaagcatgaagtgagtcgttgttttctctaaagtagtgccttttcccccaagtccggaaatattaggacatgttatttcatataggaagcaaagtctggaaagtagtaggatgtaatatctcttttctttgttgaaacagtcgaggacaggaaggaaaaacctgcagagaagtcagctgtatccacttctgtacctacaaagccaacagaaaatatctcaaaggcctcttcatgtaccccagtgcctgtgaccatgacagcaactccacctcttccaaagcctgtgaatacttctctttccccttccccagcattggctttgccaaacctggctaatgtggatctggcaaagatcagttccatccttagcagtttaacatcagtcatgaaaaatactggtaagtaagcccagtaaggaggataaaaagttaatttccatctttttaaattgaatcattaatctgtttttgggggggttgttgttgttgttgttgttgtkgtttagacagagtttcgctctgtctcccaggcaggagtgcagtggtgcaatcttggctcactgcaacctctgcctcccgggttcaagtgttctgctgcttcagcctcccaagtagctgggattacaggcacctgctaccacgcccggctaatttttgtatttttagtagagatggggtttcaccatgttggccaggctggtcttgaacttctgacctcaggtgatacacccacctcggcctcccaaagtgctgggattataggcgtgagtcaccgtgcccagtctgttgttgattttttttaattaatgatttttttttttttttctgagacggagtttcagtcatgttacctaggctggagtgcaatggtgcaaacttcactcactgcagcctccatctcccaggttcaagcaattctgccttagcctcccaaatagctgggactacaggcatgtgccaccatgcccagctaattttgtatttttggtagagacggggtttcaccatgttggtcaggctggtctcaaactcctgacctcaggtgatccacccatcttggcctcccaaagtgctgggattacaggcgtgagccagcgcacccagctaaattaattgttaaattaaaaaataatccaataatcggtcattatagaaaaattagaaaataagcaaagagaatgaaataaatatctaggccaggcgtggtggctcatgcctgtaatcccagcactttgggaggctgagatggtagattgcctgaggccaggagttcgagaccagccttggcaatatagtgagaccctatctctaaataaaaaattttaaatgaaaaaaattttttaataaatatctataatcctgttaccccaaaggaaaccacttgtgtttacccttaaaagtatatgtgtatatgaatgttttggagaattaaatatgtataacaatttttaaaaaagtaagtgtattgcatatactgtttcaaaactagctatttaaaagttaattacatatcttgaatgtttttatgaatcattaaatatttctctacatcatttttaatagctgcatagcatgtggtaacttatctaatcctttattattaggcacttagtatgtttccagttttttactgttatgaagaatactatagggccaggtgtggtggctcacgccaccactttgggaggtggaggcaggttgatcacttgaggccaggagttggagacaaacctggacaacatggcgaaaccccatctctacttaaaaaaacaaaaattatggccgagcgtggtggctcacacctgtaatcccagcactttgggaggccgaggcgggtggatcacgaggtcaagagatcgagaccatcctggccaacatggtaaaaccccgtctctactaaaaatacaaaaaaatagccaggcatggtggcgggcgcctgtagtcccagctgctcgggaggctaaggcaggagaatggcctgaacccaggaggcggagcttgcagtgagccaggatcgcgccactgcacagcctgggcgacagagcaatactccgtctcaaaaaaaaacaaaaaacaaaaattaggccaggtttggtggctcacgcctgtatttccagcactttgggaggccaaggcaggcggatcacctgaagtcaggagttcaagaccagcctggccaacttggtgaaaccctgtctactaaaaatacaaaaattagctgggcatggtggcatgcrtctgtagtcccagctacttgggaggctgaggcaggacaatcacttgaacctgggaggcgggggttgcagtgagccaagatcacgccactgcacttcagcctgggcaacagagcaagactccgtctcaaaaaaagaaaaaattcgccagctgtggtggcacgtacctgtaatcccagctactcataaggctgaggcataagtatcatttgaacccagaaggcagaggttgcagtgatccaggatcaagccactgcactccagcctggttgacagagcgagactcttgtctcaaaaaaaaacaaaaaacaaaaaaaaaacctgtaaattataaaaattttatgaataaccctttgcaagggttaagtatataaaacctttttaatggaattttatttttatttatttatttatttattttgagacagtctcactctgtcccccaggctgctggagtgcagtggcgcgatctcagctcactgcaagctccgcctcccaggtcacgccattctcctgcctcagcctcctgagtagctgggactacaggtgcctgccaccacgcccagctaattttttgtatttttggtagagacgggcttttaccatgttagccaggatggtctcgatctcctgacctcgtgatctgctcgcgttggcctcccaaagtgctgggattacaggcgtgagccaccgcatccggccatttatttatttattttgagacaaggtcccactccatcacccaggctggagtgcaggggtgcagtcatggctcactgtaacctcaaacttctgggttcaagtgatcctcccacctgagcctttgagtggctgagatcacacgtgtgcaccaccacatctggctaagttttgtgggttttttggtagagacagtgtcttactatgttgcccaggctgatcttgaactcctgggctcaagtgttcctcmcatcttggcctcctaaaatgttgggattacaatcatgagccactgcacccagcccgaaattttttaaataaattttgccaggcaaggtgggataccgtgtagtcccagctactcgggaggcaaatgcaggaggatcacttgaagccaggaattccaggacgtgtagttcactgtgatcacgcctgtgaatgtccactgcactccagcctgagcaacccagtgagaccatatctcaaaaactaaataaaaataaagtattttaatatataactaaattgatatccaaaaaagtgctattttatatgactaatatatgaaagcttctgttgttccttaccttctccagttacttgccttgtgcagtctacaaatccagccttaaaaagttgtttaatttccatttcttctatgaaagatgttaaaaatttttttcctttgcttctcacttaagtttctttgtgaaatatctgttcatatttatcttttttaaaataacaaatgtttttctctttatatattttatttcctgtgttaaagatcaacccagtgtttttaaatgtaaaaatataaaggaaatttcttaaataatctcattttaaaagctatttcaaaagcatataacttaccagtcacatgaaattatgcagtggctgagttatacaactgcagtggctctcagcatccagtcagccagcagtatttattgagcgcctacagggctctgaactgtaggtgccatttggtggagaaaaaagattgtccaggtgtggtggtacatgcctgtaattcccagcactttgaaaagccaaggtgggaggatcactggaggtcaagagttgaagaccaccctgggcaatgtagcaagaccctgtctctattttttaaaaataaataagaaatattggggctctcaaaactatgaaaatcacttaatacttgtttttttcaagacagagtctcactgtgtctcaactcttgtctcactgcaacctccacctcctgggttcaaatgattctcctgcctcagcctcccgagtagctgggattacaggcgcctgccaccatacccggctaattttttatttttggtagggacagggtttccccatgttggtcaggctggtctcgaactcctgacctcaggtgatccgcctgcctcggcctcccaaagtgctgggattacaggtgtgagccacctcgcccggccaatacttgtttgttttaatggtgttccaagtaaaaggagataatcttttcagggtttttttttttttttttgtacatgtcatgttatgatggaccatttgtggatcaaccacagaagaattcctgttaaatatatcaaactcattgaagtgaggggaagtatcggaaattgaagtcattttgaattgcattttcttgagttcatctttctgccaccaggggtcagtcctgcatcaagaccttctccaggaacgcccaccagccccagcaacctcaccagtggcctgaaaacacctgcacctgccacgacaacatctcacaaccctctggcaaatatcctctccaaggtggagatcaccccagagagcattctgtctgcactttccaaaacccagacacagtcagcccctgcactgcaaggtaactgacatatgccagagggactcgaattgtgaatgtttgtctctggcttaaattaatcctggattccatttctgatgaatccagagccataaaatgtataacacagttaattcattattctttttatttatttatttatttatttatttaaaatttttgagatggagtctcactctgttgcctagttggtgtgcagtggagtgctctcggctcactacaacctctgcctcctggttcaagtgattcttctgcctcagcctccctagcagctgggattacaggcccacaccaccatgtctggctaatttttgtatttttagtagagatggggtttctccatgttggccaggctggtctcaaactcctggcctcccaaagtgctgggattataggcatgagccaccatgcctggtggtcattatccttttttttattttagacagaatttcactcttgtcgcccaggctggagtgcagtggcccaatctcagctcactgcaacctcagcctcccaagtagctaggattacaggtgcccaccaccacatccagctaatttttgtatttttagtagagacggagttttgctatgttggccaggctggtctcgaactcctgacctcaggcagtccacccacctcagcctcccaaagtgctaggattacaggcgtgagccactgcgcccctcctattttttttatatttatcatctatgagctgacatctgaagaattataaaatgtgaaagctgaaagagactaagtattatctagtctaatcccttacttttcaggtaaggaaactaaggctcagtaaggtgaaaagatctgcttatggtcacatacctatctgtctattcagtatgagccaagactgaaggccagatttcttgactggagttcagtattctttcacctacaccatgacaccctaggggctgcattagtcccagcttttaatacaggtttatatatgttgagttttattaatttcagtgttaaccaaagctgaagacagtaggaagggtccatttattatcaaaaaatatggccaggtgcagtygctcacgcctgtaatcccggcactttgggaggctgaggcgggcagatcacctaaggtcagcagttcaagaccagcctggccaaccaggtgaaataacatctctactaaaaatatgaaaattagccaggtgtggtgacacacacctgtagtgtgctgagatcgcagtaagccggaatcacgctactgcactccagcctggacgacagagcaagactcagtccaaaaaaaaaaaaaaaaaaaaaaatttttttatgacgcttcaagaacatagtgaaaccctgtctctacaacggaattaaaaattagcgccgggcgcggtggctcacgcctgtaatcccagcactttgggaggctgaggcaggcggatcatgagttcaggagatcgataccatcctggctaacacagtgaaaccccgactctactaaaaatacaaaaaattagccgggcgtggtggcgggcacctgtagtcttggctacttggaaggctgaggcaggagaatggtgtgaacccaggaggtggaggttgcagtgagccaagattgccccactacactccagcctgggcaaaagagcaagactctgtctcaaaaaaaaaaaaaaaaaaaaaattagctgggcatagtggtgcatgcctgtagttccagctactcagggggctaaggcaggaggatcacttgagcccaggagttcaaggctgcagtacgctgtggtcaccccactgtactccaacctaagtgatgagaccctgcctcaaaaaaaaaaaaaaaaaaatttctgagacatgaatatatctttttttgtcctaatgttttatagaggcttcattatttattattttatttattattttattagagtcttagatgtagtatttttgttttcacctacctataatctctctcatttgaccctttctgttcagctttactaattatgttttgtgcatgacactgcctgtttctaaccttttttcataaatctttcctactctctactctcttatgctccagataccaatgaaatcctttttaagtaccgtagtataattatgaaatgaattacaaataccagggcaatatattcagtgtagtgatttactctatatcagtagtctcaaccaaaggcctccagggaggacacttggcaatatttggagacctttttagttgtctcaactggggtaatggtaggggtgctactgcctctagtgagtagaggccaggaggatgctcctaaatatcctacaatgtgtgagacagccccaacaataaagaattatctagcccaaagtgtcagtagtgctgaggttgagaaaccctgctctctatcaaaggagtggtgtaaaacagtttcctaaactgttatgtaagtggatcattcaagcatattatagtgaactttgtctggaggtgcagaagaattttgttacacagaactaaatagtattaagtaataatccacagcccctatctattggcatcagcaataaagaattgatgatgactgcagcacatgttgtactactaatatcagggacaatttgagagtttgacatgtttatgctttctccctttttatttttatttgtttgtttgtttttgagacggggacttgctctgttgcccaggctggagtgcagtggtgtgatctcggctcactgcaacctctgcctctcgggttcaagtgattctcttgcctcagcctctcgagtagctggtattacaggctcacaccaccatgcccggctaatttttgtatttttagtagacacggggtttcgccatgttggccaggctggtctcgaactcctgacctcacgtgatccacctgcctcgacctcccaaagtgctgggattacaggtgtgaaccaccgtgcctggccgatgtgaaatttctgatgaggcaaaatttgaacagaactaggttccttatggaatgtggaattctctttgacttttaaaaggattgtatctagcaagttaaatagatgtatttcctcgaagactgttaatgaaatcccagaactttgttctgattgtgtcatccacagccctaggtattgacagatttataacacaaaagagagacttcaggcccggtgtggtgggtcacacctgtaattccagcactttggggacgggtggatcacctgaggtcaggagttcaagaccagcctggccaacrgggtaaacctgtctttccaaaaaaaaatacaaaaaaattagctgggcgtggtggctcacagctgtaaccccaactacttgggaggctgaggtaggagaatcgcttgaacccrgaaggcagaggttgcagtgagccagcctgggcgaygagcaaaactctgtctcaaaaaaagagaaacttcagtgggcaaaggagcagagtatgacttgttatgattaaagagcaaacttttggctgggcgcagtggctcatgcctgtaatcctaacactttgggaggccacgatgggaggatcacttgaggccaggagtttgagaccagcctggtcaatatagcaaaacccctatctctattgtttttaagaatttttaaaaataattaaaaaaaaaaaaagattggagaacagtaatatttagtggtgagagacaattttacctattaccagaaatctgagtagtatatctatcttaaaaagatgttcttttgaagaagttatcccaaaatatctgaaaaatatgctgaaatatcttctaaaaatcatattacattattatatatcacattctagtgtttgaggacttctgggttttgtgagaacagtgattactaagaattaaatcaggctgggcatggtggctcacgcctgtaatctcagcactttgggaggctgaagtgggacaatcacttgagcccaagattttgagatcagcctgcgcaacatggtgagaccttgtctctactaaaaataaaaaagttagctgggcatagtgatgtacacctgtggtcccagctactcaggaagctaaggcagataaatcttttgagcccaagaggttgaggttacagtgagctatgatcgcaccactgcactccagcctgggtgacagagcaagagcctgtctcttgaaaaaaaaaaaggaaactattagtagggatgaattatgtggctagggaactttttttggaatgaaacatsgatttttttttttcttcagaaggatcataactaaagtaaacattatttcagttgtttggatattactgaatattggataacaataaagaccatccaacattatttagaaataaatggctttaaaatgttacaaggatggaggggacttgaaattctttaggccaaatctgttagaatatgggttaaaattgaaattttgaagaaatgttaattgaaatatcacatgaagtattttctttaatcatataattactaaggaacaatgttagtgtattcagtgactaaaagctataaatttgggtgaaatgtatattaaaaatttttttaattaatttatttttaaatacagagactcactttgccacccaggctggtgtgcagtggcagagtcatagttagtttactgtaaccttgaactgggcacaagtgattctccagcctcagcctcctgagtagctaggactacaggcatgcaccatcatgcccagctgatttttaaattttttttagagacagagtctcactgtgtttcccaggctggtctcaaactcctggcctcaagccatcctcctgcctctgctgcccaaaatgctaggattacaggcatgagccaccgtgcccagccaaaagtcttcatttgtgaccagaaattgggtaaatttttaaaaatatkattgaatttatagaaccttctgttatctttttgtcaaatatttttctaaaaaattttctacaggagcagtttgctttgttgaacttcagcctttgccccaaagaattctttctcagtgcttctgagaaagttttgactgtcagtgaacacagttaaattccatcattgtcaatctggactaaataatccttggattttccacactataaaatggggattgtgtgttttcttgtgaaaggaccagtgtccctggtggtctgtctttgtaagtctttgtggtgtatgtttgttatagctacattttacaaccaaaacggatggttgaaagcattgtttttcaaaaagtaacaacagtctaccaagagatgcttcttgaaaaaggtgtttgctgttcagataagtttctgaaatttgcatttgcctgtctcccgcttgaaaataacaatgtatattaacttattagagataataagtttgaaggttgaaggttggtttgaaggttggacaggaarggtagaacagatctgtttgcatttagagaaacacttccacagatcaaacattaagaaatactggcttaaagtgttgttttaagaataactttgcctcctttcttttcctgctttgcctaacttaaactatgaatgattctgacattaaaatctcccccttcctgttgccttttattgtgccatgttgggctgatttctggactgtactggaaacatttcagtgatttgctctttattgataaaataggccctgtattttctgtgacatttagccattgcttgtttggtctggattccttttggccttacactttgtctatctggttcccaccaaaatgaatgagagtatctgattagcctacattgtttgcattgtatgatagggagttgttctttttaacccctctaatctttgtttctacaggcctgtcatctttacttcagagtgttactgggaacccagttccagccagtgaagctgcctcacagagcacttcagcctcccctgccaacaccacagtctctaccataaagggaagaaatctgccctccagtgcccaaccttttattcccaaaagcttcaactattctcctaactcatcaacttctgaagtctcttcaacttcagccagcaaggcctcaattgggcaaagcccagggctcccaagcactacttttaaactaccttccaactctttggggtttacagctacccacaatactagccctgctgccccacctactgaagttaccatctgccaatcttcagaggtctccaagccaaagctggagtcagagtccacctccccaagcctggaaatgaagattcacaacttcttaaaaggtaatcctggtttcagtggcttaaacttaaacatcccaatcctgagcagtttggggtccagcgccccatcagagagccatccctcagacttccagcgtggccctactagcacctcaatcgacaacattgatggaacccctgtacgggatgaacggagtgggacacccacccaggatgagatgatggacaagcccacatccagcagtgtagatactatgtccctgctttctaagatcattagccctggttcctcaacacccagcagtacaagatcaccaccccctgggagagatgaaagctacccccgagagctctccaattctgtatctacatatcgaccctttggtctgggcagtgaatctccctataagcagccttctgatggaatggagagaccatcttccctgatggactcttcacaggaaaagttctacccagatacttctttccaagaagatgaggattaccgagattttgagtattcagggcctccaccctctgccatgatgaacctagagaagaaaccagccaaatctatcctgaaatcaagcaagctgtctgataccaccgagtaccagccaattctgtccagttatagccacagagcccaagaatttggggtaaagtctgccttccctccatctgtaagggccctcctggactctagtgagaactgtgaccgtctctcatcttcccctgggctatttggtgccttcagcgtaagagggaatgaacctgggtctgaccggtcaccatcaccgagtaagaatgattcatttttcacccctgactccaaccacaatagcttgtctcaatctaccactgggcatctcagtttgccacagaagcagtacccagactctcctcacccagtcccacatcgttcccttttctctccgcagaacacccttgccgctcccacgggtcacccacccacgtcaggcgtggagaaagtcctggcctccaccatttccaccacgtcgacgattgaatttaagaatatgcttaaaaacgcctcacgtaagccctcagatgataagcattttggccaggctcccagcaagggcactccaagtgatggtgtcagtctctcaaacctcacccaacccagcttgaccgccactgatcagcagcaacaagaagagcactaccgcatagaaacccgcgtctcctcctcctgcttagacttgcctgatagcacagaagaaaagggggcccctatagaaaccttgggttatcacagtgcatccaataggaggatgtcaggggagccgatccagaccgtagagtccatccgagttcctgggaagggaaatagaggacatgggcgtgaggcttcaagggtgggttggtttgatctgagcacatcaggtagctcttttgacaatggcccttcaagtgcctctgagttggcatcccttgggggtgggggcagcggaggcctcactggctttaaaacagcaccatacaaggaacgggcacctcaatttcaggagagtgtcggcagctttcgttccaacagtttcaactcaacatttgagcatcatcttcccccatcccccttggaacatgggacacccttccagagagagccagtggggccatcatctgccccacctgtccctcctaaggatcatggtggtatcttctctcgagatgcacccactcatctaccctctgtggatctttcgaaccccttcacaaaggaggcagccctggcccatgctgccccaccccctcctcctggagagcacagtggaattcctttccctaccccacctcctcctccccctcctggggaacatagcagcagtggtgggagtggtgtccccttttctactccaccccctcctccaccccctgttgaccactctggagttgtacccttcccagccccaccactggcagagcacggagtggcaggggctgtggcagtatttcccaaggaccatagttccctccttcaagggaccctggctgagcattttggggtactcccaggacccagggaccacgggggccccacccaacgggacctcaacggccctggccttagccgtgtacgagagagcctcaccctaccctcccattctytggaacacctgggcccaccccatggaggaggaggtgggggaggcagcaacagcagcagtggcccccccttgggtccctcacacagagacaccatcagccggagtggtataatcttacggagtccccggccagactttcggcctagggaaccttttctcagcagagacccatttcacrgtttaaagagacccaggccaccttttgctaggggccctccgttctttgcaccaaaacgcccattcttccctcccaggtactgatggaaaccragggaaaggcattttgaacagtctagagaacattggaagtaggagtttggtttattgttgttgtttttatttgttttctctttctcgattttttttttattataacaaagggcctctcttccaaagtaagaaatcacatacgcttacgttttactattcaattcaatcctccctcccattgcacttatctaccttccccaagttgtttgtattaaaaaaaaaaaaaaaaaaaaaaagtaaagaaacacaaccaaagccatttcatttggctggggggttggggagtggggaggaaaacaatctttattttaccccatctattgaagagtattattacatttgaaataaaacttccatcagtacagataaccacatgtgcaatgttgggatgttattttgggcttggcttatcgagtagtcaatggaaggattcccgtcccctctctcggcagcttagtaactgctgtagccagctcggctcccttccctgtgtatctgtgtcctgctaacagccaagagatgttgcaagggaggaaatgtgagagaccttgaacctgtcaggtttatttgttttgtttttaaaggcatgttgaagtttagttctttacccttctcctaaaatctttttttaatcagcctcaaggttaaaataaggagtgactacagtatgtaaaataaggaaaggaagcattaatggtgtgatgtgacctgcctgtttttttgtaaacaagagaataggaaatgttttcaaggtagtttcacatgtcttgcaccaagctcatgcctcttgcttttcctttttgactttatctccctcagtttttcttctgctgtggccagaaagacagtcactrcagttgactattgatacaaaggtgcaacagaaatattatccctgcatttttaaatataagaagtagacattaattttaccatggtgcctccctaatgtaagtgatatttattggtggttttcaacaaaggttaactattaaagaaagaaatatttgtctttatcttccttttccccttgcctcagtcgtgttattcacccctattcttgatattttaaaggaggagattcagtagcattttcctttatattatacacatgtgtctatcccatttcaaggctcaagtcttacccccacctctcgctcccaataggaaataaagaccatttctgcccttagttgttttacatgcaagataagtgctttccttctccctggactgaaagacttgtttgtatttctacatctagtacttgggaaatagacaatcactgtactttgagtgtttatatctttatatctagggacactgaaaagtaaatgttgctttactacaatttttttttaatttagtgtcttaccccaaggcatactcaactgataatctccagctagatgagtaaaacagtatgtgtttagttttccagagaattctrgcaagtttcatattttcttccaagttagtatagaactaactataggaagtatggggttgctttttcctccagtagaatattaaagatgggggagggtgggcaatgtagtgacagaaaatgattctctcagaatgaacttttcagagaaagagcagcataaaccaggtgcacatcatgatttgggagtttttgcgtaatttattctgttatttatttgggctcgccatgtgttctggggttaggatgctgcaggtcattcatcttcttaatgcctgtctggtcttaagccaactgttctttctttcctcgaccctctctgccctgtagctctccccacaaaaatgcatgataccatgaccttacgtgtgggatggggtatgtagtgtagcaaagaaaagaaagtatagttatattgagtcctaagacatttgttagggaaaagcataagagaaaatggggtgggaggtggggaaatgatatttgactttcaaaattgaaataggttttttttttgcagaaattaaatgggatgtttttcattctagaataaaagaatgtgaattctctttgctgctcttgtttaagctaaaagtagtgtttacttgataaggctctctgaccatttaatttttatcagaaaatgtggggatgtcaggaaagtggcttcctgaacgttggggcgggataattgtcctcaaaagtatgatggttaatacatgaaaggaagactttgttggacagtttcgaagatgggcttttaaggagttgggtttttgtggggtacttttttgttttttaagccacaaaatcctcaatatgtttgttttaggatggaagtgaggatttgtatgagactgtcagctattaattttaaggaaatcttaaaatttacatttacatcagtaaatgaagatgacagtgtgtatatatgtgataaatagtgaaacagaaaagacagttctggtattcataacgtgaaagaaaggggttttattctttctgtgtctgtgatttaaaactccgtgaccatgctctgacttttgtatttcaacctgagyttaaacaaataaacaagatattttttaaagaaagcataacatagtgtgtcttagcaaggacatgattcatatggaagcagaatgtgagaagttgtaaggtccttggtactcactgtaaaatcacagacagagaattggtaggggttgtgaatacactagtaccacttaaagttcagtgatacagttcagaaatagggtccttaagtattttgaaagagtttactcttcagtcagcttagatgagagctctctccctgctcccctctaccctctcaaaagttgagagtaaatagaatttggtttgattccagggaggggaaaataagcagagaataggasttttatactttccaataccagkaataaaatgtttgtgatayatatgggtccagcaaacctatcgagataatgtgaatacgataaacttcctaatggcagsatattcactctcaatcctgaagttaccggttcctgcagaattgagcttcagctgttactgttttgaagccgctgtaaattactgctttccccagttcccccactattttttttaagtgggcgggggcgcctgttaagatctaaaatagatatgttggattgatattctcacgtgttcggtgtggaaaacaaaacaagtacatgctttagaagcaacaacaatgaaatccttttgaaatgtgtgttaatatcgtttaataaaataactagtttgaaaggtttgacatttttctttgagacgggcttggaccaggggcccctggcttcctagtgagtgcaaataggagggaacttctcaggagctgaaaccgctgctttgtggagcaggcctgtggttggaaaacctaagttttctctagcaaagacccarcctgactgtccagggccgaaggtgaaaccaactagagaatgcagaaggaaaagcctggatatatctcagaagatatggttgtattggcttttggtccaagggtatgggggtgggagtagtggtgtgtgcgcccacacatttctcaggcacacacagagataccacagaccacccacttcgtaaccacttgcactttactctcttccagacgttccttttttttttaatccctttgtccccattattttgttttccagtttaataaagtatggtttcctttgttgtgtggttgacttttcccctcctgttgatcttttccagatgtcccctttgacttctgcacttaatgtcactgaaggcartctgagcctcttaagatctttatggccttgtgggttttctgtttgatcctttgtgtaattgaattttggaaagggataatgggtcgggtgagttctagatgttcagggagtggttggtgaagtgggatatactgtattaataattttttgtgcatgtcttcaaaaggttgtgcaactgtgagccaagaagcatttttaaagcaagcatrgaattgggggtttggggtggtagcagggatccttctggccaattatttgcccacatctgcccttactgcatattggcaatctgttgtgcagaagccacacttaacccttctgtcttaccccatcccttgttcataacccagtgaggctgggttggaatgctggctgtaaggggtaaagagggatagtcactgcatctgggccaggcctgggtcactggcagggtagaaggctctaaatagcagccttgcttatgtgaaggtacgtacatgtgtcaccagacacttaaatagcagtggcctgggaacacacccagcaggtagggtgtaccactgtactggaatctggctcaccctttttttccttgtctcttgggaccttgacttgcccacctgatttctatatctacccctaaagaagcaacagctttgagacttccycataaggttttctgggcatgttattcataatttcctctgcctaatttttttttttaatgtaagccaatcttgtgtagcagggatgagttattccttcatgtatgtagacgtagcaatgcaaacacaatcagaatgggttttggggtattggggcgtttctcatacttgtttatgagtaactgtatggacaagtccggtcagctgctgttcacaattgctaagtaataactcactgaggctgcataggcaaggctacgagagggtcatcagtaagagagatattggcccttaagtaaacatcctgttctgtcttccccatgtagaaggaaatagaagcactctaaagcaaagaagcaagtgcagtgtaaaactatcagttacttttaattaattgctggggaaagaaaggagaagcctttgcttagttacaagtttgaggggaagaggataagaaggccaacatctatgtaaaagttgatcattgcagttacagtcaaccctcctcggtatccatgaaggataccaggttccaggacccccatggataccaaaatccacagatgctcaagtcccctacatacaatggcatagtatttgcatataacctacacacatcatccagtaaattttaaatcatctctagattactaatacctaatacaatgtgagtgctatgtacatagttgtatacagtatgttttgaaatttgtgttacttttaatttttttattaccttttcctgaatacttttgtggttggtcgaatccatagatgcagaacccccagacagagccaactgtacatttccttttttaaatgttacgtttttctatcctttgttcacacctagggaagaatcaaaaattgagaatacagatatgggtggaggggctagtgaattcttcagtgccaactgaggaaacacaaatacagactaggcgtggtggctcacgcttgtaatcccagcacttagggaggctaaggcgggcagatcgcttgagatcaggagttcaagaccaacctggacaatatgacaaagccctgtctactaaaaatacaaaaattagggccaggcgtggtggctcacgcctgtaatcccagcactttgagaggccaaggcaggcggatcacgaggtcaggagtttgagaccagcctggccaatatggtgaaaccccatctctactaaaaatacaaaaattagctgggcgtggtggcacgcgcctgtaatcccagctactcaggaggctgaggcaggagaatcgcctaaacctgggaggcggaggttgcagtgagscaagatcgcaccactgcattccagcctgggtgacagagcaagactctgtctcggagtggggggagggggggacattagctgggcatggtggcacgcacctgtaatcccagctacttgggaggctgaggcaggagaatcgcttgaacccgggaagcagaggttgcagtgagccaagattgtgccattgcactccagcctgggtgacagagtgagacgccgtctcaaaaggaaaacacaaatgcaggttgcaggtttttgtgtttgacttgagagttggctaaaccagtctaccctggacatgttcagggtcatggtaaattggatattccagcratcttccttcctcatccccattgtgtccccytattttcgagaattactcatatcctttgccacatwatttgtgggagaggagagaaaaggacttgaaacttgctacatttttcttggggtgtttcagttggaatgggtagaaaggagaccgacagcatccctttcctctgtttctccctcctccctggctaacagtcctttgcacctacatgagacaacactgaagatagtcaatcattgccaggggcaatagtgattaggaaatgatttgaaatctttattatttagaagtgagcctcagttgtatgcaggttgagcatcccaaatccaaagtccaaaatctgagcacgaaaatgacactcaaaggaaatgctcattggaggatttcggattttcagattagggatgctcaagcagtaagtataatgcaaatattccaaaatctgaaaagattcaaaatcagacacttttggtcccaaatatttcaaataaggatactcaacctgtatttccttctacagatgttatctaggaccttcttttagagtactttgtccttccctttgttttttactttagcgtggaacctaaatggacacatccctaccctagactagctcctgtgtttggcggatctcctctttttgccctgacctgacatatcagttgtgtaagagctggggtgggagtgtctgcttgtttttcttctacagccccaagagatgttctgggaagggaaatcttagtagagattttaggtgagcccaagggtttgttttcaaagtcaaagttcaatttatccatgcccctgacagaaagcttttacctctttactcattcagcaaatgtggctgaacattctctcccattgtggcttttcttttttttttttaatagagacagggtcatgctttgttgcccaggttggtcataaactcctgggctcaagcagtcctcctgccttggcctcccaaaatgctgggattacagacatgaggcactgttcccggacacattgtggcattttattttattgattttatttttattttatttattttattttttgagacggagtawcattcttttttgcccaggctggagtgcaatggcgaaatctaggctcactgcaacctctgcctcccaggtacaaatgattctcctgcctcagtctcccaagtagctgggattataggcatgtgccaccatgcctggctaatttttttttttattattatttagtagagacagggttttaccatgttggtcacgctggtctagaactcctgacctcaggtgatccacccacctcggcctcccaaactgctgggattacaggcgtgagccactgtgcccggcctgattttattttattttattttattttattaattttgagatggagtttcrctcttgtcacccagactggagtgcaatggcgcgatctcggctcactgcaacctycacctcctggttcaagcaattctgcctcagcctcccaagtagctgggattacaggtgcccaccaccacgcccagcgaatttttgtatttttagtagagacggtgtttcgccatgttggccaggctagcctcaaactcctggcctcaagtgatccacccgccttggcctcccaaagtgctgggattacaggcatgagccaccatgcccagcccttttattttatttttagagacgggggcctcactctgttgtacatgctggagtgcagtgtcataatcatagctcactgtaacccaactcctgggctgaagcaactctcacctcagcctcctgagtagctgggactacaggcatgcaccaccatgcccagctaattttttttatttttgtagagatgggatctcactatgttatccaggctggtcttgaattcctgggttcaaacggtcctctgccttggcttcccaaagtgctgggattataggtgtggggcaccatgcccagcctatgatggcattttaaagcaaagttaaagattggccccatcccagatcttccacttacattactagggaattattttttaaaaaataaacctaacttccctaccacttgtgcctttagccacttggctacttctctgggccccaaaggtttttgttagcaatgacataatcctttcttttctttctttttttttttttttttttttgagacggagtcttgttctgtctgcccaggttggagtgcagtggcatgatcttaattccttgcaacctccacctcccaggttcaagcgattctcccgcctcagcctcccgaatagctgggactacaagcgtgcaccaccatgcccaactaattttttgtgtttttagtagagatgggtttcaccatgttggccaggctggtcttgaactcctgacctcaagtgatctgctcacctcaccctcccaaagtgctgggattacgggtatgagccaccacacccggcctcataatcctttctttatatattttaccttattcctttttttttaacctctaatatcttttttttttcctttgagacggattcttgtttggttgcccaggctggagtgcagtgacacgatctcggctcactgcaatctctgcctctggggttcaagtgattctcccacctcagcctcccaagtagctaggactacaggcatgcgccaccacgccaggcttttttttttttttttttttttttttttttgagacagagtctctctctgtcacccaggctggagtgcggtggcgcaatctcggctcactgcaagctccgcctcccgggttcacgccattctcctgcctcagcctcccaagtagctgggattacaggcatgtgccaccacacctggctaattgtgtatttttggtagagacggggtgtctccatgttggtcaggctggtctcgaactcccgacctcaggtgatctgcccgcctcagccttccaaagtgctgggattacaggcgtgagccaccgcgcctggctaatttttgtatttttagtaaagacgggctttcactatgttggccacgctgatctcaaactcctgacctcagatccacctgcctcagcctcccaaatgctgagattacaggcgtgagccactgcatccagccttctcttttttttttttttttttttttgagacggagtcttgctgtgttgcccaggctggagtgcagtggtgcgatctcggctcactgcaagctccgcctcccgggttcacgccattctcctgcctcagctcccgagtaggtgggactacaggcgcacgctgccacgcccggctaattttttgtatttttagtagagacggggtttcaccatgttagccagggtggtctcgatctcctgacctcgtgatccacccgcctcggcctcccaaagtgctgggattacaggcatgagccactgtgcccggcctctgccttctcttttttttttttttttttttttttttttgagacagggtatcattctgttgcccaggttgcagtacagtggtgcaatcacgcctcactgcactggatctcctgggctcaagcaatcttcccaccttagcctcccaaggcacataccaccatgcccagctaattttttattttttgtagagatgggggtctcactatgttgtccaggctgttgtcgaactcctggactcaagcaatccgcctgcctcagcctccagtgttgggattacaggcgtgagccaccacacccagccaaatatactttctacatctttagtgcttctaagaagtaagatagatttggaggtatgtgctgatcctgaggacaagtggaaaatatttacatgtagtttaaagttacatgtagtttaaagctataaaaacaataccttctgaactaggactctagtcaccttggaatttctattccaaaagtggagttaagctgagaatttcctaaaattttactaagggcctaggacacccttcactgtggatyccctttttcctgcacttctgtggaaatctagctttattttstgcacacttttttccttaaccttaatctggtagagaaaagtcggaagacgcctcttttcttggctttctattggacccacctcttttaccctatatcaaaggcctatttggccacaagtatcagaatcttataacctgacacattatgaccaatctggtccctgagaggcagtatggcatagcataaacaacaagggctttgcattcagatagactgggggctttacttctttgagaatcattttcctgttttaaagggagtatacttgacatagttgttttaggaattaggtgaaatagtgaaggcatagcacygggtgttcagtagtagtctagggtggaggggcaacagcccaagttttaagaatagatgtttcaagccaggcatggtggctcacgcctgtaaacgcagcactttgggaggccaaggcaggtggatcacctgaggtcaggagttcaagaccagcctggccaacattgtgaaaccccatctctwctaaaaatacaaaaaawtagccaggtgtggtggcgggcrcctgtaatcccagctactcgggaggctgaggcaggagaatcgattgaatctgggagtcggaggttgcagtgagccaagatcgtgccattgcactccagcctgagcaacaagagtgaaactccatctcaaaaaacaaaaaacaggccgggcacagtggctcacgcctgtaatctcagcacttygggaggccaaggtggtcggatcacgaggtcaggagttcgagaccagcctgacatggtgaaaccctgtctctactaaaaatacaaaaattagccgagcgtggtggcgcgcacctgtaatcccagctactcaggaggctgaggcagaagaatcacttgaacccgggaggcagaggttgcagtgagccaagatagcgccactgcactccagcctcggcgacagagcaagactctgactcaaaaaaaattagctgggtgtggtggcgtacacctgtaatcccagctactggggaagctgaggcaggaggatcacttgaacccaggaggcggaggttgcagtgagccaagatcatgccactgcactccagccgggcaacagagcaagacttcacctcaaaaaaaaaaaaaaaaaaaaaaaaaagaatagatgtttcctaggctgactaatggattaaaattccccaatactgaggcatatgctagtcacaagtccgaagttgtagaagaaccagtaactcatgaattggccttagcttgctcttgcacttgcttacttgcttgcttgcttcttacagagggcggatggaataactcaacattccttccttcctccactgcaacacaagttacataggtgatgatgtggtagttgattgatcggcatcccctcagcacccagctcactgcattgcacacagtaagcagttagtaaatgagagcatcaaatcaataccgtgattggtacatacttgattcaataattattgggcacctaccattttgttgcctgcaatacacctttccccttttggtgcagaggcatgagaagaattctgcctgttgccaccctttctgaatgccatttaaaaattcttaactaccttctccaaaccacacacacacaagttatcttcctctcccacactcttgtctctttctctttgtatttcagggtgtctaccagaagatggacccaagatccatggaggctcctgtgactcagatcaactgccctgcccgggaaacctggtctctccrgaaaccttgattaaactgctttttctgacacctcttcctctacaacccttgattctatcaccattgaaacttcagaaccaactctaaccatccccacctccaggtgaggggactaatgagaattactgacagcctgatggctacccccaagtcagtttcccttcatactttactacaaatctgaccatgttcccatatttactgagtaaatttgatgaaatttacctagtcctgtgtcctagatgtatcagggagagggaagagaaaggataaaggaagttgagagctgggataggaattagaggcaaagggcttatgtagggagcagagagctaaaattctagtcaggcacctctttctgaggtgatgggggagtatactgggagcaaactcttctagagaaagcatggtgtggtaaaagaaaaccaagcttggattcagaaatcaccatcagcacttgctgtttgaccttaaattcctcatctgtcagattaaaaggtctcggccgggcatggtggctcacgcctgtaatcccagcactttgggaggctgaggcaggcggatcacctgatgctgggagttcgggaccagcctgaccaacatggagaaaccctgtctctactaaaaatacaaaattagctgggcctggggtggcacatgcctgtaatcccagctactcgggaggctgaggcaggagaagcgcttgaacctggggaggcggaggttgcggtaagccgagatcacgccactgcactccagcctgggcaacaagagtgaaactccatctcaaaaaaaaaaaaaaaagattaaaaggtctataaagtccctattaagcaccatgagtataaagggactcaaactgacctctgcagattcttgattccagcttttttgtttttgttttgttttgagatgaagtctcgctcttgtcccccaggctggagtgcatggcgtgatctcggctcactgcaacctccacctcccgggttcaagcgattctcctgtctcagcctcccaagtagctgggattacaggcgcccaccaccatgcccagctaatttttgtatttttagtagagacggggtttcaccatgttggccaggctggtctagaactcctgacctcaggtgatccacccgcctcggcctcccaagtagctgggattacaggcgcccaccaccacgcccagctaatttttgtatttttagtagagacggggtttcaccatgttggccaggctggtctagaactcctgacctcaggtgatccacctgcctcggcctcccaaagtgctgggattacagcgtgagccactgcgcgcggccatctttgctccagctttaaagtggttactccagaggctgaggtggtcagttgagcccaggaggtcgagactgcagtgagccatgattgtacccctgcactccagcctgggcaacggtgagaccttgtctcaaaattaaaaaataaaactgttacagtcatttatcataatagcttcttgttgcttttgcccattaccaaaaaaccatgggccacactagacgatttacataaaatttaactcaacaattgggagcaacactattctcattttatagttgagaaaattgaggcttagagaaattaaataggtcaggcaaggcggctcatgcctgtaattccagaactctgggaggccggagcgcggtggcggtttggtgggggggaggggagggattgcttgaggccaggagttcgagactaccctggccaacatagtgagacccgcccccccctcccgccccccccggtctctattaaataaatatgagaagtttaataattttcccaaaattacatagttaatggcagatccagaatttacactaggtctgtctggttccccagtctatgctcttaagttttgctacttgctgtaaggaccacgtaaaataaaatgtatagttaaagggaaattactaccatttcctgtctggttttctcccactctcgccctcaaaagttcacctgcccttgtcctcaaagccacaggacgcctaattgctatttttgggtttcagctgaaacgccacgggtctgggggatagcgagggtgtgttacattttcggtcttccggtcagccggaaccactcacaccgctgctggtgctgtgtagggtgtacctcttcggagttcctggaggtggtgccagactagagtggcagctgtagtaaccaatagacacggactttgttggaccagaagccaatgaagaattacgtggaggagaagcggcgataatctgtttgaggatgtaggcactggtgtgaaggaacatggccctgtatcagaggtggcggtgtctccggctccaaggtttacaggcttgcaggctacacacggtgcgtgaggcacccccaaagctccgatccgcatcagacttagcccagccgaagcccccaaatttttatgttaacccagcctcacgccactcctcctctccctggtcctccgagtccccagaaaaggactcgtatctaaactcgttatctaattctcgagttagcggtctgggggactctgagctcgaaggacccccagcctagggtcttgtatcacccaatccccttaaaaagtaggaattcggacgaagtccacttaaccatcccaaagtgccatcatctgcaattctaagaaagaatgatgggacgtgtgttacctgctaatatatctttccctccaggcagttgtgtcgacccctccacgctggttggcagagcggcttggcctttttgaggagctgtgggctgctcaggtaaagagattagcaagcatggcacagaaggaaccccggactattaagatatcacttcctggaggccagaaaattgatgctgtggcatggaacacaaccccctaccaactagcccggcagatcaggtaacaggcccatcctgtaactaccaggattatccttctgcccctttactttctcttcacttgagcaggggaagaaaacttggtctgcttgtttctgttccgtccccattaagatagcctttcctgaagattttgtttttgttttttgttgttgttcttttatacagacggggtctctccatgttgcccaggctagtcttgaactcctgggctcaagcgatccttccatctcagcctcccgaagtgctgggattacaggcatgagccaccaaacccggcctgagatttgttttatctgtattagtttctgcatcagagtctctgtcctttcattggggaaagaaatgaaagcttctgttgctctggtaactcatttcacctttgcaagtttacagttgctgagagatgagcaactttctccccactgtggattgtaaccctgtctgttttaaatcattaatttactttttaataattgatacataataattgaacatatgaatgggtatatgtgatattttgatatatgcatacaatatgtaatgatcaaatcagggtgttcaggatatctgttaccccaaacatttatcatttctttgtgttgggactatttcaaatcttctagctattttgaaatatacaataaattattattaactgtattcacccaactctgctatggaacattagagcatattccttctgtctaactctatttttgtacccattagccaacctcttcatctcccctcccccatcctttccagcctctggtaactatcactctattctctaccactgtgagatcaactttttaaactctcatataggaatcagaacatgtgatattttcctttttgtgccttgtaaccctgtctttttcttcatccccaccttccactgctgaagttcaacactggcagatactgcagtggctgctcaagtgaatggagaaccttatgatctggagcggcccttggagacagattctgacctcagatttctgacattcgattccccagaggggaaagcagtaagtttctttcttatcaggaatacagtgactactaaaccaagagatattgaagcaggaaattctaacattttattcttttgccgcagtttctccatttgcagttgggagggagacctaccacagactgtcttgactatttctggttaggaaacttatggtgaaagtttttaacttagcttcgatctattaagcaaacatttgtgctagtgagagggagagagatgatatgttgaaaaaacgaaaggataaatatgtaaattcagccccctcaactcttgagcacgtacattataagtcatctgtagtgtatattcaattctaacatggcttatacagctgagcaaacaacctggtcacctccccaccttgtcttcttcatgtcagctcaggtagcacagaccttgcctattaggatccagaaaaatagagttctcctgccatctatgtgtaaatagtgaccaaatccaagaggaatatatcgcactagattcgtgggacagaaaaaaataggactaaaagaccaaacagagacctaagtaaccactgtgttaagaagatagcttattctggccaggcacagtagctcacgcctgtaatcccagcactttgggaggccgaggcaggtggatcatctgaggtcaagagttcaagaccagcctggccaacatagtagaaaccccgtctctactaaaaatacaaaaattagctgggcgtggtggtgagcacttgtcatcccagctaattgagaggctgaggcaggagaattgcttgaaccctggaggcggaggttgcagtgagctgagatcgcgtcattgcactctagcctgggcgacagagcgagactccgtctcaaaaagaaaaattattctgaagccctaaaagcttacaggagcagcagaagactgactggcctccagcttctatgctttggaactgggaagaaccaaggattgaggggtggggctggagcttctatgcactgaaagaagaaaaaatactggccttctttcttttctattcagtcttttttttttttttttttttttgagatggagtctcactctgtcacccaggctggagtgcagtggcgcgatcttggttcactgcaacttccacctcccgggttcaagtgattctcctgcctcagcctcctgagtagctgggattacagacacacgccaccatgcctggctagttttgtatgttttagcagagacagggtttcaccatgttggccagactggcctcgaactcctgacctcagatgatccgcctgccttgacctcctgaagtgttggggttacaggcatgagctgctgtgcccagcctttttttttaagcttgttactttttagtggtcacccccaaaatctaggatccccattttgtggtagttattcctagaagaaccataccggctttcctaccagcttttgtgaggaagagctcagagatctaggggttaagggagaagtttatgaacttgtgaaccccttttttgtgaacccaggtgttctggcactccagcacccatgtcctgggggcagcagctgaacaattcctaggtgctgttctctgcagaggtccaagtacagaatatggcttttaccatgatttcttcctgggaaaggagaggtgagtaatgaaaggaaggaggagaatgattctgggatggtttctgaggctcttttcaggggccttgggcatgctccatttggatgaggaagctggaggagaagggtttctctaggtctcaactatgacattagtatctccttctgtgctagtccatgtccctcttctaactttgcttgaaatttaccttcttggctggtgcacatgtagtcccagctacttgggaggctgaggtggaaggatcacttgagcctgggaggttgaggctgtggtgagccatgatcttaaccactgcacccaacttgtgtgacacagcaagacactttctcaaaaaaaaacaaaaagaaaaagaagaaacaacttactttgttacttgttagctttcataaattcaagttttacttaatcgccctcattactattgttctaactttgtctatccagatttcctgcattcaacttttaacttcatgcatagagctttttctc

SEQ ID NO: 98106 - DNA, 14264 bp, Homo sapiens
aattggcatttccgctctgggtagtacatctttaacataatgttagggaagtatccgttcttggctgcctttctttaattgcgtttccagtactctctcggtgattctactcttgaacataggatgaaatttggaatcacacttctcttccacttccatccccaccctctaatgcccatattaaaaatggcggccgccgccttccgcagtaatggttgttcagcgaacaagatccgggcggaaacagtagataggcgggtgcagcggggcagaacataggttgccttagagaggttccccggtgtcccgacggcggctcaagtcagagttgctgggttttgctcagattggtgtgggaagagcctgcctgtggggagcggccactccatactgctgaggcctcaggactgctgctcagcttgcccgttacctgaagaggcggcggagccgggcccctgaccggtcaccatgtgggccttctcggaattgcccatgccgctgctgatcaatttgatcgtctcgctgctgggatttgtggccacagtcaccctcatcccggccttccggggccacttcattgctgcgcgcctctgtggtcaggacctcaacaaaaccagccgacagcagatgtgagcagcggcacacgggtccgggcagggggcaagggctaaggaaggagtggctagggcaggggcgggaaccggggtgcttgaccacacgtgaagactcagaactaacccaggcagcctggaactcggagaggtgatgagcagaacttactcgcattggggaaaggatgggtagggacccttgggtatatctgggactctggcagtggtgctttcctccctccgcccccctcaccacttaccagaataaaaaaccgggaatgagaagaccactttgggttactgtaacacctgcactagtgagtgaccacgccccctttcctcttccccctcgcccccttgctgctgggccacagcccagaatcccagggagtgatcagcggtgctgttttccttatcatcctcttctgcttcatccctttccccttcctgaactgctttgtgaaggagcagtgtaaggcattcccccaccatgaagtaagtgggttcgtgggggtgattgcctgtggctgggacctgggaggtacctgagagaactggggttatttgggcttgtggggaggggctaagaaattatcagaaaagacaggaattcttaaaaggtggaatgggagcaggcttgagtcatggacctgcccgagcctcccccagtttgtggccctgataggtgccctccttgccatctgctgcatgatcttcctgggctttgcggatgatgtactgaatctgcgctggcgccataagctgctgctacctacagctgcctcactacctctcctcatggtctatttcaccaactttggcaacacgaccattgtggtgcccaagcccttccgcccgatacttggcctgcatctggacttgggtaggtagtcctaccactgctgcccctatggcacctacttcagggaacccttcctggtgctccacattctcctccaagtgttccttttttgtctctgtgtcttcccagatcctttctggtagcccttcatcctatcgtccgtcctcaccacttttctaaaaattcttaaatcctcctcccctaggtggcactacttcttttcctaccatctctccccgcaggaatcctgtactatgtctacatggggctgctggcagtgttctgtaccaatgccatcaatatcctagcaggaattaacggcctagaggctggccagtcactagtcatttctgcttccatcattgtcttcaacctggtagagttggaaggtaggtgggattgggggtggggagagagaagtctgagtgttaaaggtgtggcctgatatatgactttgggaaattcaggggaaaaaagcaatatgcgtagtaattatagaagataagggaagctacttactttgcaaataacaatgcagatttattaaaagtgagaaagaaaaatagtagccctgtcatttatagctggattggcactaatagctaggccatgatcttctcccattgaatataaacagtttcacagaaccccaacgttacacaggttcattctgtgaccgtgatggagcaagactaaaactagacccctccctctgtaatcatgtttgagcacaggcaaaaccacaagaacactgagcaacccacaaaatggccaagatcccctctctcggctaacatgagcgactgctgctgctctccaataacaactcagttcctaccacttcttttttttttttttttttttttttttgagacagggtctccctctgtcatgcaggctggagagcagtggcgcgatcttagctcactgcatcctctgactcaaacgatcctcctgccccagcctcccaagtagctggggctacaggcatgtgccaccacacctggcaaatttttgtattttttgtagagacagggtttcaccatgttgcctaggctggtcttgaactcctgggctcaagtgatctgccaggcctcccaaagtgctgggattacactcttgagccactgtgcccagccagttcctaccatttcttaaataaacattaaaatgcttgatcatagaattactcttgctttcttttcttttctttttttttttttttttgagacggagttttgttcttgcccaggctggagtacaatggtgcgatctcggctcaccgcaacctccgcctcccaggttcaagcgattctcctgcctcagcctccctagtagctgggattacaggcatgtgccaccacgcccagctaattttgtatttctagtagagacggggtttctccatgttggtcaggctggtctcgaactcctgacctcaggtgatctgcctgcttcagcctcccaaagtgctgggattacaggcgtgagtcaccgcacccggccatgaattactcctgctttctaacagcacccagtccagagcaaaactactttctttcaccctctcccaaaatacccaaaacaaacgctactacaagcccctcctaacaccctcttactgagacattccgtggttcccaatggtgtgtggtttctgaagtctccctttttacaacaagtcattaaacctagctttgaactatagatgtgtttctgatggtctttggctgatgaacatcaacaagtgtttattaaagctaagtactttttaaacactatcttatttaaatcttgtaatggttttatgtggcagatgttataatcagccctgttttacagatgagaaaacaggcttagagaagttaaatgtgtcatgatcaagatcaaggtcacaaagctaagaagtaaagttggtatccaaacttacatcagaatgggctaaaccaaatttaagatagtaactagtttggaaggctgcacgaaagaggtggaatattgggaattgccttgggtgacataaaaggagtattgagttcttaaaagtgacttgggtgaggtggatgataacagctgtaaacagaacttagacaaaaataggaccaaggtttgcagaggaagtgggtattaacttttccttctttcttccttgcttccaaaggtgattgtcgggatgatcatgtcttttccctctacttcatgatacccttttttttcaccactttgggattgctctaccacaactggtaagtaggcctgtggataaggggacaactacctgaacacatggcaaagatggcccttatcataacccaccttgtggtggtgaagctaaacctgcgcatacctctatggagttttctgcgtcttcagttggtcgtattctgaaatttctctctacccagtagtagttagggatgagtgcgtggaggccccaggaatagatgaattcagggccttggatcctgcagagttgctgcacaactggagtctcctctgagtcagaactagggtcagggctagtccagtgcccatagggtgtgatgtgagagaagggattggtaatgcctcttgccactggctcggatcctcttcccccacacaggtacccatcacgggtgtttgtgggagataccttctgttactttgctggcatgacctttgccgtggtgggcatcttgggacacttcagcaagaccatgctactattcttcatgccccaggtgttcaacttcctctactcactgcctcagctcctgcatatcatcccctgccctcgccaccgcatacccaggtagccgctttttggcttgaaatggacatcatagccttttcacttgggatatctaatgccagcctatacatttgctgtgcaaagggagtgggcccaaagaagggctatttccatgtgagtagccctttataacttacaaagcacatttatttgcataatctgctacagtggttctgataacagtaagcagcagagccagaaatagatctcaggttgactccacattcaatgctcttcctattagccacagggaggagggttcaaatagtggcccagtcacatgaagctatcttccccccgcagactcaatatcaagacaggcaaactggagatgagctattccaagttcaagaccaagagcctctctttcttgggcacctttattttaaaggtaacagggtaacaaggaggtaaggccctaggctgccatcctgaccttgaggaatggggaacctagtcctacatcagatccaaggggaacttgaaagcattaaatagatccacattcctaaagcataggtattagctgaggttctcttcacctctggtccctccaggtggcagagagcctccagctggtgacagtacaccagagtgagactgaagatggtgaattcactgaatgtaacaacatgaccctcatcaacttgctacttaaagtccttgggcccatacatgagagaaacctcacattgctcctgctgctgctgcaggtgaggatgggaatcgagtttatacctccgtgtctccctttctgcgtgattcttactccagtccatttctccttgcagatcctgggcagtgccatcaccttctccattcgatatcagctcgttcgactcttctatgatgtctgagtcccttgatcattgtcctttacctcacagtctctaggattcctgactcaggctgacctctctctctggtcccagactgcctccttgcccaggcctctctcactcttcatactcctccagattttgttctcagcattttcctttctctgtgatcattggcatcctgggcgtttcttgccctctgctgactactgattggattttacctatggctttctgcaacttgctactctctccctctccatcccatctttgcagcctcatagggtgggatacagcagctttttttgcagttatccacactcacatttcagagtcctgactctcaaggaaccactggtttttgggatagaacttgggccagggctaggaacacaggctccacggtgacatgtcatttgattgtaaattaagtgttctgattagtaagaactaagcagggggccacatgctctcaatggagacaataaagtgttgtctttttcttattgtttatgtaggtatatttcctatatgggcatttttgggtagattgggaggggtggtgggggtacttcctccaacaggatgcctatctctctgccccatcagaccccgtctaacaagaagtgaacagaactgagaccaaacagaacatattgaataaatatttaaatcctgatactagaggtggcatggagggccacaaaattgaagttatcctgtttcctggcatgggaacaaactttcaaagagtcaccgggtgcagtggctcatgcctgtaatcccagcactttaggaggctgaggcaggaggattgcctgagcccaggaattcaagacagcctgggcaacaaaacgagactccgtctctacaaaaataaaataattagccaagtgtggtggagcacttgtagtaccagctacgagggaggtttagcagggaggaktccttgaacccaggagttcgaggctgcagtgagctgagatcacactactgcactccagcctgggtgacagagccagtgacacccggtctattaaaaaaagaaagaaagaaaaaaaagaaaacttttaaggggtctaatttcttcacttttccattctccctttgtcaggtaggagaagggagtagggagtgactggacctggaaaggagggctgcagtagctataatattgacccctttcctttaaaaatcctacgccrgcacagatttcccagacgctctctaggtggcctcagactccacccctttggtcttccgcttctggtttccgattgtagtgtttaaatctcgcgcgctttacaaggattggctacatcagcggatagttggcagtctgcgtgctacccctcctcctcgccttttctccccgggcaaaaggttttcaaattcgaccaatcagcgggcgcgctccctcagccgagccgcgacacccaagggttaaccgcaaccaaccggaggcgggtattggmgaaaagagccaatcaggagggcgcagaggtgtgtcctgggggcttataaaggcggcctcgcggcgcgcgcgcgacagcagttacactgcggcgggcgtytsttctagtgtttgagccgtcgtgcttcaycggtctacctcgctagcatgtcgggccgcggcaagactggcggcaaggcccgcgccaaggccaagtcgcgctcgtcgcgcgccggcctccagttcccagtgggccgtgtacaccggctgctgcggaagggccactacsccgagcgcgttggcgccggcgcgccagtgtacctggcggcagtgctggagtacctcaccgctgagatcctggagctggcgggcaatgcggcccgcgacaacaagaagacgcgaatcatcccccgccacctgcagctggccatccgcaacgacgaggagctcaacaagctgctgggcggcgtgacgatcgcccagggaggcgtcctgcccaacatccaggccgtgctgctgcccaagaagaccagcgccaccgtggggccgaaggcgccctcgggcggcaagaaggccacccaggcytcccaggagtactaagagggcccgcgccgcggccggccgccaggcctccccatgccaccacaaaggccctttttaagggccaccaccgccctcatggaaagagctgagccgcttcagactgcggggcaagcgggccgcggctcccttcccctcccctcccctcgcccgccttcgccgcccggcctcgagtccccgcccgcccccgctccygtcccgcaccgcctgccgcgtcggcctcgggccctgccctgtccgccgtccgccctccggtagggttcgggccttccggatgcggcttgggcgctcttcggggacctccgtggcgcggargacccgagcctgccggggggwggccggcggcgccgcacctgcccgcctcggcgttcgtgactcagccgccccatcccgagtcgctaaggggctgcggggaggccgcagcaccttctggaagacttggccttccgctctgacgcagggccgaggtgggcagtccaggccgagaggccggcggccctgaaggtgagtgaggccctcggcagctgcagccggggtgtctggtacccccccggcgtggtgcttagcccaggactttcagacgcggccgctggccgggaggctttggtgggagagacgcgatcgcygatttcggtctggcgccccttctgcggccgggacccaggcctttcacatcagctctccctccatcttcattcataggtctgcgmtggggccgggacgaagcacttggtaacaggcacatcttcctcccgagtgactgcctcctaggaggacatttaggggagggcagaggcctgcagtttggcttcacggctggctatgtggacagcaagagtcgttttcgcggaagccgactggcagccaggcctgtcgggccccccgacgccgccccatttcccttccagcaaactcaactcggcaatccaagcacctagataccagcacaagtcggttaatccctgtctggactgagcctccgttggcttctgaactggaattctgcagctaacccttccacgactagaaccttaggcattggggagttttagatggactaattttattaaaggattgttttttttttaaatggagcatttgttttcattttgcaagagagttgtagaattagtgactttctatactttcctgataataggggtgggaggggccatgcaatataaacaggctctactgttaactgaaggggcaaaccataggaatttaagattgtggctctgtttcttggtgttcctgggagacaatttattctgtgtgaaatgaaaactattgaggcagaagcagaaaggacgtaccaggagaactctgggcaaaagtcccagcctctgaggtaaggatgaaagggctttgtgtttgttcctatcttcccgccaactccacacgcgcacacacaacaccttcagaactggtttattagtaggattggttacattcaaaggctgttgcttggacttctctaaagagatgaagcccccacatactgaggaggcaaggcagtcatcaaggccccaaggtgaggcaaatccctggaaggcttgaaccctgcagttcagtctcccggggtaatcactccccagatagcagtgagaatggggcactgaggcccgggatgtaggcactggacagcagcaacccaggcatctgtgccccacaaaccagttaatgggcatcgttaagctgccgtgcaacatccaggatgtttttggctcctttgctcagcaacaagttggccaggctgatgcccaagttctgggcagccaactggggccctcgtggaatgttacgagcagtgatgcctaccaactgtgggtcatcctcagggccatcttcatgctgtatgagggaaggaggtgggatttggtgagaacaagagattatatgcactcttgtttattaccccctcgccctccagctttggtacctgggcagggacatggatggtagcctgcatggtctcttgtatgctatctgagccgtctagactccagactcctccagtcaggtacagctggggaagaaaacagttgcctcagcacagtctgagaggggactacctagaaacctgggatgcacaggaagaaatgccacagtcctcctttccctggcttcccgcccatttccccccacttacttgcccatccttcatagctgtatgcacggctactggcacactgcagcctccttcctgtaacaagaagttcttgtgagctgcaagggctcttaacaccaccctgtgaccacagacctgaggacatcactgaaaaggcaactgtgggcccagacctggtcctatccatacacaacattcaacaagaatgagttagcactgtatacagagcattcatgtaagaaatcttccctgccacctttcccagctctccaagtccccagccctccacaggtggagcacaggccctaccaggtgcctcaggaaggccctttcagcgatgcagcgaagcagagtctcgggatcgtgcagcacacccaccagatccaagatgtcctggtccttggctcgcacttccacgcccaaggccccctgatggaaaaacatcctaggacatcaggcctgatctttccccaaccaatggcgcaaagcatgggaccacctctatctacttgctccccagcgccttttggaccggtagcatcccaaggtctgcccctccctgagaatgctattctggggaagcagatgcagaaggttgtgagacaagcttcttggttgagaacaaagggaaggcatatgtcaccatgtggcttccctggtcaagtgtacctggcccacagcatacatgcattcctcagggtgcaggatctgtggaggcggaacagggagtcaaaagggtggacacgggggtgtctaaaagcacctggcagtgagatgggagttccctatcatctagaaagcctgggtaggcctaagtgtgagtctggcctcttttttttttttttgtaaattttctccatgaaagcctagagtctggcctctgattcacaatcttcccagcctacggtgttagaggtggggtggtcaagaagtgaagacagatggtccttgacttacaatagggttacatcctgataaacccattgttaagttgaaaacaagctgaaaatgcatttaatacacctagcctaccttacatgtgctcagaacacttaagattagcctattatagttggacaaaatcatctgacaccaagcctgttttacaataaagtgaatatctcatgtaatgaatactgtactgaaagtaaaaaacagaatggctgtatgggtactaagtacagtttctactgaacgtatatcgctttcacacaatcataaagtctaaaaatcctaaattggggatgactgtaaggcagaaaggagatgcagatgagctggggagaggataggggcaggccctacctgccccacccggttgtgccagcccatgcgctgcaggccagctgttgccaggatgatggcactgaactcctgctgctcgtccagcttccgaagccgggtgttgaggtttccccgctgtggagagttgctaaggaccacagtgtcgggcaatctggggcctcgtgcggttccctctgcctgagtctgtctttccctctctagctggctgactttcagtcatcttccagctctcagcttaatgttaacagctaacagttacatcatacttactacatgccagacactgctctaaaagtactttccatatgtcagctcatttcatcttcacaacaaccctgtgaggaaggtagtattattatccccactttacagataaggaaaatgacatagggaggctaaataacttgccaaggttacaagacctctgagaaaccttccctgacaccccagacttctgtgtttagatgttccaactagaagtttccagaaaattcccaacttcacttattggagcacttagcacatactatttttaaatttagttttatgaaatgtactacatattcattgtaaaagtcaagacaatatagtagcatataaaaatggaagtactgaccgggtgcggggctcaagcctgtaatcccagccctttgggaggccgaggctggtggatcacctgaggtcaggagtttgagaccagcctgactaacatggtgaaacccagtctctactaaaaatacaaaaattagccaggtgtggtggcacctgtaatcccaactacttaggaggctgaggcaggaagattgcttgaactcaggaggcagaagttgcagtgagcctagattgcgccactgcactccaacctgggcaacagagcgagactccgtctcagaaaaaaaaaaaaaaaaaaaaggaagtactccctatccctccagaagtagtcactattcagttcagtataactgcattatccctaagtaagacgtaaactctacatatgcaggggaatgtttatcttgctcaccattatccccaatgccttgcactctgaacacttgtctggggctaagaaaacattagactgtaaatgagtggacggatgagtgcatggaaagacagacaggccactgaccccacgggctgcttgctggaagccccttccactctccggactcccagagccctctagaccttgtctttttccttggctgctgtctccgtcactcttccaaaaggatccgtcactcttctaaaaggatacaatactcctgaactccagatgcgggaactttctctgcagctgggctgctcttcgcagggagctggttcccaccacactgcccagagagaagttacaatgagattttaacactaggcagtcactgttcctttcctcctcctcccatccctgcatcttctgggcacatcccaccaagctgcctatccaggccccacttacctcttctctggcagggtttctagggtcttcccaacaaattttgggtgaaagacaacagcatcatgagggttttcccgcctgggggaggagggaagggcacagaatgagggaagagatttaagttcagatcacctctattctctctcgattgccaactcactggtatttcttgagttttctgccaccagtcaacactcctcagggcagaggagataaccctgaagcagagggtcaggccccaaagggaaaggcaaaggttcacatgatgcctacccctgcccaagccccttacttgcaagactcttacttgcagatggctccgatggtgaagccaggaggaagcacagtgggcaggtccttcaaggagtgaacaaccaggtccactctatagagatgggagaggggggcaaagagaaagggtatgagcagccagccttcaccccttctccacccacccctgcctctacttcagtggtggagcctagggcagttcaggaagcacaccttctcaagatctcaggagcatgaaaactgctctcctctcactctccctcctactctccctcctaccctccctcccccagccattcttgcagtccaggcagccagatggctcagaaccagacactctccttttctgaagcctgaaaaaacccacctatgagctgccttcagcctctctgagggtttaagcccagcagcctatctgacaccccgggtcccagcaagagacctagcatactagggtcccagcaagagactgggagggcaccacactctcctatctttacttactcattcttctccagggcatgttcaagctccttggtaaacaggcttttctctccaatctgccggacagaaagagcctgagtgaatcccttcagggaaggaaagaagagtggggacaagaactggggaggaagatgttgttaccttagagagtgcagtatcaagaatcttgtcccctgtggtggacatagcaactgaggagagagtcaatcaatcaggtgctcattattgatcagcatttactgagcctagcactgtgctacgattcatgatggggacagaggcacataatccctggttcctgccctctgagtatatacaatcgagcaggaagaccagaaacactcataaaaagacccaaagctcaagatgttaaatgccaggctaatccaggtagtcagagctggaggtattcagaggaaagcaccttcagaactgggagcagcccagaaggaatctcggggcagcgggacgggctttagctataggcaaagccagaaatgttgtgttctctcctctcggggtactgggcttcccattagcttccactcctttccagaaaactcactgatttcaaactgcaggccagggtacgaggctttcaatgttgccaccacactgtccgtctgtatgcgagcaagctgcgggtagagatttggattagtcctgcccttcccagccacggctcagactctttagactgtcacaggttaggcagatcctgaagggactggaatttccatctgggcatgagaaggggcttgggagccctctgcactccaacaattttcccagcctagggatgatcttgccatagaatgtaatctgccatttcccggggaacttaacgcccagccaccccatctccttcatactaggaactaaccctctgagtcccccaatttgtgatgctgtgagcatcataactgttctgacaaacctcctccaccccggctcctgcacccacctggctcttgcgggtacccacgcgaatcactctcatctttgggctgttttcttcctgcagaaaaagtccccaggtcacagtcccctctgtttctagtgttcctcaacaccttgtccaagaaccagaatcactggcttggaagaaaggaacttcagaacctggcctgtggccagctgagtctcagagtggggaaatactccaaggctggtccctttaaccttcctcagtaccttctgccctcctcagggatccagagaagcagagactagagggaggcgatagtaggacctgctgttgctgccgctgcagtaaccaggacactgagccctgaagcccaccttgaccaaggcagttgtcagtgggagtgctgtgcacagccaggtgggtaaagagataaggcccatcagcctggccacaggaagggtggggcctgcagctggcaggggcaggg

SEQ ID NO: 98107 - DNA, 36294 bp, Homo sapiens
  misc_feature (1)...(36294): n = A,T,C or G
gtcgccgtagttgatgtggaagttgaaatcatggctgtagcggttaaaggtgatgactttgcgttgagggtagggccccatccgagagaagagtacccgtttattgtgcttcaggctgtgaatcccaggctcctcctccacctccctcgtgaactccacctacacagcaggcagacagaggcacactgttgcacactagagaacccgagtaggttctggggtaaggatgggggtgggatgggggagacctcttagcagaaagacaaagggatgagccagagcagacagaaggggaaaccctacttgggagaggtaaagggagcttgtcacctgctcagtcaggctcactcaccaggatggggtagaccactgcatctcggacgacaaatggcttcactttaaaggctttgctgagcgcagctgcctggtacactgcccccatggcggctgcttcatctgcattgatgttcttccccagctcctccctgggaaagccccaagcctcagcacggtctaccctggagcatgcaaccgggacttccctcccctcagccctccagctgctcagcccaaagccctgccccaggcagaactcagccaagcgctctagcccccaaaattcaatttgcccaacgggccttcagcagcaccttcttgaattctggggacccggagtgggcccaacccaccaggatcacctgctcaatctcatcctgcagtgggtaagaatgacaggtgcaacagcatgcagttagcactgactcgtcccttgacgtcccatgggtttcctatgccctttcctacggggcattcccgccttcccctactcgctcaccagactcatttcggcactctggagggcctgctgtacaggcccaggcacccgctcaaacaagtctgcacacaactcctcaaattccacacgagtcacttttgccttgaagtccacatcatccatcaggccttcaatctgggagaggatggggactgtcagggggttcttgcccagctcccgctctcttggtgagtaggacagaaacaaaaagaataggtctttgggaggatggtagcgggaggagcatgggccatgccaggcacgagcagcccagttcagtggcagggtcccccaccctctacgtgggacaaaatatagcctcaaccagccacttgtgggcacctgtgccatgtggtcagcgttggcactgaggacggttttgagccgattagcctcacgcagcagcttggccatggcacgcgggttctcccgcacatcctttgctctctgacccttgcgctgctcattgaaaagcccagccaggcgttctcgaagccggagctccatctccaggccccccagggtacggtcaaatctgttgagaaaagggagcagggaaaaaagtgaagaacacatggagtccccgcatctgcacaggagcctctcatccccacatggcacctttccttcatctcaggggaccttgttcatctccagtgccccatgtgtggacacacactctgccctcaactctctacagcacagctgacacctcgcagtgacccttcttccactcattcattcgacagtgtttactgagcattacttatgtacttccctctgggaatacaaatgtggcggtggggagagagacagggtccctgctatggaaaagttgaataatcacacaaatgtgaaattatcactacgtcacatgttgtaaaggtgaggggacaatgcctgcagaacatgcatggggggagattcaggctactgagggagacccaagaacatgtctcctaaaaagtgatgcttgaactgaaacctgaaggatgagttcagtgcaagcatcacttgaactgaagagttcagagttcactagctggaggggaaagaacattctagacagaggcaacaacgttcataaagaccttgaagtgggagagtgcatggcaagttccggaggagggcaagcatcactggggctcaaaaagcgagagggctcagggctcagacaggctgcagaaggcagggttgagacaggcgcagggaaagttatggagccagcgacaggtttttaaagaaacaggtaatgattaggttggattttaagaagaaccctctggctgcaatatgaagaaagaactgaaaggagacgtcactaggaacagggagatgtttttaattctgcaaataagaggtgatggtaacttgggctgggtggtaatggtgaagacggaaaaagatgatttcaagaaataagacaacagggcacatgttctcaggatctcctgagggctatgtcacaggccataaaaaaaaatttaaaaagaggtaagacaacaagaatggtaaattatttaactggaaatgacaagagaacaaaaacatgattgaatctgacaccctacatattgcctgcggctccatggatttccttagaatacattttgaaagttccatgtcttccagttttcccaaactgtcctcccctgagcctcagcttccccttactctttgtgagtggtcccctacaatgactgatgcctcaatcaggagaccattcctgcagcatgcaggaaagcaaagcagtgtgtctcctccaagaagaaacccctgacttgagggtcttcacaagcagccctccctgccaagtatccacttaccctactccccggatctgcagctgtggctgcatcccagcttccttagtcttcaccatctggtaggtcacaatggtgcatacggtgctgcctgagcccatgtcatagaacatgatattctgtagagatatcaaggcaactgtcacaggaaccttctcaaactccagggggcctgcctgcccacccacctgcttccaatgggctgtctgactcttaacacaaaactaaacagctccaacaggggctgggaggaggctattggtgcattttgccaagggtcagcccagccatgcaaaccagatgcaaaagggaccaagtggcctccatccttagattcagtcaccctgcatgtctggtcaaggctcccctggctcacctgggcagtggtgttaatatctttccggcggaagacaccatagctgagggcagtggcggtgttgtcattgatgagctgcagcactttgaggccagccatacgagcagcctgcagcacagctcggcgctcggcctggttgaagaagactggcacggtgatcactgcatccttgatgggctgctctacagatgacaacagaaaagggtcccgccggctccataccttagatgagggcttctaatctggtcactaatgacattttggactaggtaattctgtgttgtggggctgtcctgtgcactgtaggatgttgagcagcatccccggcctctacccactagatagcaggtgcacccctcagatgtgacaaccaaaatctatcttcagatgttgctaaatgttccctgggaggcaaacttgcccctgttggagaatcactgccctagatcctggggagcctggccctaagggccccaccttgaccactcacctgcaaaatcttcagctagagaacgagaataattgagaaccatgcccaacacttcctcaggtgagaactgcagctgcctgaggggaaggaaggtagttggagccaaggaaagccaggcattaaggcaggacaatcaggaacacacaccaatgaggagcccagcagcgttgccgagaccaccttccccaacagagcactcacgagctgatctgaaagtgcacagtctgcctctgtgggtcgaaagtcagctcgtgctccgggaagcgggcctggtaaagagctacatgggggttatctgcctgcttccccaggaggtgctggaagtaacgtagcgtagcctttggattcttaatcgcctgaggggtgaagaaggagcagactagtattaggctcccaagtccaccattacctacctcttacatcacagagactgataaggaaacagactctgggggctgccatctcctctcctctgcccaccactctgggaagagggactgctagctcaccatgcttgctgcactgtctccaaagaatctttcattttctttcagggtcacgatcaccggtgttttcctccgagattccctgaggaaaagagattttgggcccaggtgcctgcagcagaaggactcagaagcctcgacactcacacacatttaaccactcagatgccgaagtctgctgtgggcactatgactaacacattcacacttggagcccagactccctcgttccccacccttaacacgggggccaccctcacttattcaagacaatttccatgggcactccaggtttgacaatggccaccttcatggactcactgcccaggtccacagacatcactgccagtgtatctgaagggaaaagaggtttgtcagttagctctcccttcgcccaccttcctgggactccctctaatcaaagcataccactttccatgggtaaacgaagatggcaaaagacaaaaaggcctggacctaacaactcaagagacttctggccaacagccccaagctcacttcccatcatgcatccttcagtcatcatttatccatttgctccctctactggggtacataccactcagtgccaacaggtctgccaagagcacagccaccaaggcccaacagactcgcctcctcggcctctgcctcctaactttgtctgccatagtgcccctgggggaggcgaagaaagaaaacacttaaaactggatacccggagtgaaggagacagaatcacatcccagaacggagaggctgtaagattcatatctacttcattcttacccagggcagatcagcctacttctccccttctccctcctgatgggtacaaaccattctctaatcatcccagcagcgcccacacaaaggcccaagtgaaagagcatgggtcctcggctttgccacatccctaaacagagaagctaacaggacaagagaaaggagacccgagccttttgtccaccacacaggcagtgagtggcgcaccgcagcactgtgcctgttgtcagacacctggggtgcggccagggatccccgcccagggctcaaccacctccccacacctggagctcccccgctgacggggaaagccagctgggcctggacgggaagagaaaggtaatgacgttgggggtagctaggatgaaggaaaggcctatctcctcctcggcatccctgcgggttgtcccgccccctcccctttcccagctcactccccggccccgctgtgcccacagacgcagtgccaggggcggtaaggttccccgcccggcgggtagccgttacccggtgttcacctaaaccccacctgacgaaggcggcggctcccactcccggaaacggatcccggcccgccccagcaagtggggacagaccgggggccgagctgcgtgccccccggtgcgaggccgagcgcccggcgtccgcgcggccctcccttgcgctcccgacccgcccccggagctcgcacgctgtctcccctaggaggggtggccggcccgcacctccatccacccccgctacctcttgcctccgctcctgcggccccagctctgggacagacgcggcacgaacgtacccacgaggccggcagcgccccccacccgcgcccttcacaactcctctcggtttgcaaactgnnnnnnnnnnnnnnnnnnnntttgcaaaatgttacattagccaccaacctctcggcggcgtctcgcgcaccagccggccccggacgcggcgcgcgctcattggagcctcggccgcccggccctgcgctgcgcgcccggccccgcccccgccgccccggcgcgcgtactcattggaccacgtcccaggccccgccccctccctttgccagccttgtaatgggggcggcggaggggaccagccaccggttgggcagaagcagccggcgtcggcctgggattggaccacgtcacggggccagcgcgctccactccttcctccccagcgccggccccggggcgaccgcgggaccttttccggcgctggatgctttgctgccggggttcgggagtgacctgcgcctagagcaggtcgggcgcactgcagtcccgcactcggggytcttcttccggtcacctgtagagcccggccgaggaatggaataacaggcgtcctgtccgcagccccgcggagggggcgctggcctgccggttagtattgaggtgccctaggctttggatagacgttggagaatggctgtscctcggactgagtccgtcgcaaccccctctgttttactgaggaaactgaagccacagaaaaagatgtttgctgatgggtcagagataaccgatgcattcgtcgcagaatctggccaggatttcttaggttaagccccactcatttgtataagaaagaatattccaaacttaagtactacacacaaaagacacttttatttgtgaggctatagttggttgagcttgtgtgcaccttctcctatttctgttctattaaatcttgtgaacatttctctactctttagctgtttctgtcatagaatgacagaagcacctcactgccttctcttttaacttacagctccatagaaatgtgcgcagtcgcccgggcgcrgtggctcacgcctgtaatcccagcattttgggaggccaaggcgggcgaatcactggaggtcaggagttcgagaccagcctggccaacatggtgaaaccccgtctctaccaaaactacaaaaattagccaggcgtggtggcgggtgcctgtaatcccagctactcacgaggctgaggcaggagaattgcttgaatccgggaggcagaggttgctgtgagcccagactgcgccactgcactccagcctgggcgacaacagcgagactccttctcgaaaaagaaatgtacgcagtccttggagactgcattttccttaagtgtggatggaaataagtcatctgttttctctcctactaagttgatgcctggccacccttcacagaaaggsccgcttgaagaccctggctgtcagggccagggttgtgtcaagcctgaacttgtttaaggagctcttagctcttcctttctctacatttttcgtgatgcttaggtggagagtggtccggtgtctatgcttagaaggaaaaattattggcagtcccagagagagtctattcttccttttttttttttttttttttttattgatcattcttgggtgtttctggcagagggggatttggcagggtcataggacaatagtggagggaaggtcagcagataaacaagtgaacaaaggtctctggctttcctaggcagaggaccctgyggccttccgcagtgtttgtgtccctgggtacttgagattagggagtggtgatgactcctaacgagcatgctgccttcaagcatctgtttaacaaagcacatcttgcaccgcccttaatccatttaaccctgagtggacacagcacatgtttcagagagcacagggttgggggtaaggtcatagatcaacagcatcccaaggcagaagaatttttcttagtacagaacaaaatgaagtctcccatgtctacttctttccacacagacacagcaacaatccgatctctatcttttccccacctttcccccttttctattccacaaaaccaccattgtcatcatggcccgttctcaatgagctgttgggtacacctcctagacggggtggtggccgggcagaggggctcctcacctcccagaaggggcggccgggcagaggcggccccccacctcccagacggggcggcggccgggcggaggcgcccccccacctccctcccggacggggcggctggccgtgcgggggctggccccccacctccctcccggacggggcggctggcggggtggctacggcggggcagaggcgctccccacatctcagatgatgggcggccgggcagagacgctcctcacttcttagacgggatggcggccgggaagaggcgctcctcacttcccagactgggcagccgggcagaggggctcctcacatcccagacgatgggcggccaggcagagacgctcctcacttcccagacggggtggcggccgggcagaggctgcaatctcggcactttgggaggccaaggcaggcggctgggaggtggaggttgtagctagccgagatcacgccactgcattccagcctgggcaacattgagcactgagtgaacgagactccgtctgcaatcccggcacctcgggaggccgaggctggcggatcactcgcggttaggagctggagaccagcccggccaacacagcgaaaccccgtctccaccaaaaaaacacaggcgtggcggcgcgcgcccgcaatcgcaggcactcggcaggctgaggcaggagaatcaggcagggaggttgcagtgagccgagatggcagcagtacagtctagcttcggctgggcatcagagggagaccgtggaaagagagggagagggagaccctggggaaagggggagggggagggggagggagagctattcttccttttaagartagttatgtattcaggcagtagacaaattggtagaaatagaaattcagttaaaattttaacagaatttaattacacaaataatacacaaatgtaatctttaaaaaattcattctacacaaaggcaaatttccttgatgccaacccaaacccccactctctcttgtggaggcacctgctattgtcagtgtggtgtataagtttccaggtctttccctcttttacacatatagatatcctagaaacatgtagcttttatcttttcataatatacattttttattttttgcaaccaacaccttgtttgccttttatcttttttaaaaccataaaatgttacacaattacattgtttgcaatttttttaaactaataataaagtgtggagcattttccatgtaactgtggttcayttcctcgtttactgctgtagaacattccatagcatggggttcgttctgccataatgatagacatatacgctgtcagttcaattccacagggaaagattttgtttctcagtaatagactccacttttggccaactatccagtagagtctttccatccattttttatttttttttgcgacagagtctgtgtcatccaggctggagtgcagtggtgcagtcttggctcactgcaacctccacctcccgggctcaagcgattctcctggctcagcctcccaagtagctgggactacaggcacacaccaccatgcctggctaatttttgtatttttagtagagtcagggtttcaccatgttggccaggctggtctcgaactcctgacctcaggtgatccgcctgcctcggcctctcaaagtgctgggattacagcgtgagccaccacgcccagcctttccatccatttcaaacagagagtatgcgttttaacatttattgggccactctgatatgcaagcactgggctaggtgctgctaatccagagatgggcatgagcttgtccttaccctcaaagaagtcataatgtgttgggaaactgggaaacaaatatgttcatcgtttcatgcgcttattaaaaatctatttggggggccgggcacagtggctcacgcttgtaatcctagcactttgggaggccgaggcaggcagattgtctgagcttaggagttcaagaccagcctgggcaacatggtgaaaccccgtctctactaaaatacaaaaaaattagcccaatgtggtggtgcatgcctgtaatcccagctactcaggaggctgaggcaggagaattgcttgaacccaggaggcagaggctgcagtgagccgagattgtaccactgtactccaggctgggcgacagagtgagaccctgtctcaaaaaaaaaaaaaaaaagaagaagaagaagaaagctctcgaagctcctaagagagctccaaccatgaatacccctggtgggagcatggttctgccacagctacagttctcagcctgggtatctgtccccctgggtagtgaagcaggtgcaagtgctctgaggagtcagctgttttgttctgggaccagagggtagaatagtatttcacaagaacaagctgaagaacaatgggaaatttttaatgtaaaacacctgatttagattgacctaggcaggtgaactcattggttyttctccagaataacttgttaacattggaggactatatcccttccccaacactgcagaaacctaagggaagaaagttgccgtcttgcagaacatgtgccaaactgacagaggtgtaaaatagacayatcggtgagggtatatatgcacataaaccatgcaaattacatgatgggctgagggcagtgttgatcagagagaatatcctacaccagaagaatttttaaaaattagttgtcggctgggggtggctcccgcctgtaatccctgcactttgggaggctgaggcaggyggatcatgaggtcaggaaatcaagaccatcctaacacggtgaaaccccatctccactaaaaatacaaaaattggtggtggcatgtgcctgtagtcccagctactcaggaggctgagccagaagaattgcttgaacccaggaggtggaggttgcagtgagccgagatcgcgccactgcactccagtctgggcgactgagccagactccatctcaaaaaaaaaaaaaaaaaaaaaattggcccggcgtrgtggcacgcacctgtaatcctaggtactggggagtctgaggcaggagaattgcttgaacctgagaggtggaggttgtagtgcgccaagattgtgccactgcactccagcctgggtgacacagtgagactctgtcacaacaacaacaaaaaaaagtaaacatatgttcacccagaggctgttggtaatagctttatttataacagccccgggctgaaaactatccaaatgctcatcaacaattggatagataaatgaatcagagattcatacagtggaattctatacagcaataagaatgagtggactattattacataggacaacttagatgaattctacaaacataatactgagtgaaagaagcccaagtacatactgtatgatttaacttatatcaagtttaaaagctggcaaaactaagctacagggatagaagtcaggatgctgctatcctttagatacagggtcttgctctgttgcccaagctggagggtttagaagaggacataaggcaagcttctaggggtgctagatatgttccccccactcctttttttttgagagagagtctcactctgtcacccaggcttgtgtgcagtggcacaatctcagctcactgcaacctctgcctctggggttcaagccattctccagcctcagcctcccaagtagctgggactgtaggcgtgcaacaccatgcccagctaatttttgtatttttagtagggacagggtttcaccatgttgcccacgctggtctcgaactcctgacctcaggtgatctgcctgcttcggcctcccaaaatactgggattacatgcctgagtcactgtgcctggctgctagccatgttctcattgctgattacgatgggagtgtccagttagtttgtggaatttcagtgggttgtactactctacaacttttttgtatgttgttacttcaataaaacatttaaaaattattttgtctgtcatacaaacaactctagggtttgttgttgttgttgttttgagacagggtgctcactctcttgcccaggctggagtgcagtggtgtgatcacagctcactgcagcctccatctcctgggcttaagcaattctccctcctcagcctctcaagtagctggaactacaggtgcacatcaccacacctgactacttatttctttatttatttttagtagagacgaggtctgcctatgttgcccaagctggtcttgaactccaggcctcaagtaatcctcccaccttggccccccaaagtgctggattataggcataagccaccttgcctggcctcaagagactctaggtttgactttgctgtaaccctaggcaggagagagcccattttcagcaggagataaaccaagataaattttttcctacttctataacaatatttttagaattacaaaagaaatatgtggctagggccaggcacggtggctcacagtactttgggaggcccaggcgggtgggtcatttgtggtcaggagtttgagaccagcctggacaacatggtgaaaccctgtctctagtaaaaatacaaaaattaactgggtggtagtggtgtgtgcctgtaatcccagatacttgagaggctgaggcaggagaatcacttgaacctgggaggcagaggttggggtgagctgagatcgcgccattgcactccagcctgggcgacagagtgagaccctgtctccccggcccccgcctccaaaaaaaagaaagaaatatggtggcttacacttgtaatcctagcactttggaaggctgaggcgtgtggattgcttgagcctagcagtttgtgactagcctgggcaacagggcagaacactgtctctactaaaagtacaacaacaacaaaattaactgggcatggtggcatgagcctgtagtctcagctactggggaggctgaggtgggagtatctcgtgagcctaggaggtggagactgtggtgagccgtgattgtgccactgcactctagccgtgtctcaaaaaacaaaacaaaacaaaaaagaacgaaagaaatatgcggttattgacgaaaactggaagaacattaaaacaacaacaggccgggcgtggtggctcatgcctgtaatcctagcactttgggaggcagaggcgagtggatcacttgaggccaggagtttgagaccaaccggggaaacatgtcaaaaccatgtctctacaaaaaatacaaaaactagccgggcatgatggcgtgcgcctgtagtctcagctacttgggtggctgaggcacaagaatcgcttgaacctgggagacgagacagaggttgcagtgagtcgagatcgtgccactgcactccagcctgggcaatggagggagactctatctcaaaaagaaaagaaggtagtttctacctggagagccagatgataaaaacggaaaattaaagtttgctgaggcaactacacaggaggctgaggcaggagaatcacttgaacctgggaggcggacgttgcagtgagccgagatcacgccaytgcactcaagcctgacgactggcgacagagcgagactccgtctcaaaaataaaataaaataagataaaaataaattaaagtttgcatttgggacaagaagtgttcctgttttgttccagtggatgtaactgttttatatcatgggcagcagtttgctaaagggaaaagaaaatactgcaagacaattcttgcattcttgattctgagttatgacctctctaattcgaaactaaagacttgtatttcttctttatctttagtccattcagaactcgagttctcagtatgcagaactaactgtaagtgaacagtcattttctgtgtaatttgcttggttatattcctcactatcctgaaattcctgggttcagaccagtgtaactaagagacaaaccctggtgtatgttctgacaagcataatctagctttacacccatcaaactatctaattagagggtaggggactgaattactcattttatttccaaagaactttgaagtttttgcccagagagagccactttaagttaaactctttgagactccatttctcatcagggataatgatacctcttctgcagatggttgctacgaagattccatgaaaagcgaaggcactttattagatataatttactacatgaaattaggggcttgttactgtcagttctttttatgcctgtctctagggtggtggttgaggaccatgtcttgttcatttatattctgggcatttggtacaattcctggactaggagtgctcaatacatatttgtcaaaagaaggaaaggaaagaaggtagtaagtctgaagaggtgctgtgggtctctctggcaggccaatctcggcctttgtaaccctcatcaataagaggatccaatgggcacaagtagaaccagattcagccctcagaggaagacgtggagcttctgccattggacaacagggggagcacccaagcaacaaagatgcactctatctcttgttcacatctctgcttttacatttcttcttttttgaagsctgttgcccacgctggtcttgaactcctggcctcaagggatcctcctgcctcagcctcttaaagcgctgggattacaagcatgagccagcttgcctggccacattgcttcttttaacatatattcttcataggcttaacaactgacatattaacatactatctaaacattctgatgaccagtatggaatatgctcagtaggtgaaagtgggttcaacccgctcccatttgtgcttctgcccaacagttggtatcctgaaacagttgcaatgaattggagatatcctgtgtgatgaagaggaaagaaacttgagttggaagtcaggaaatctgtgtgcatggtggtggctagagtttcttcctatcatttacctcttcagacaaatggacgccacctgcccatcaaccagattgaggagaggagtggataagaggagaggcatccacaccacattcattccttcaaccaaacatggaacttctaccaggctctgctaggcctcgttcacagtyacggtacaagatgtagcccccgctctcagggaactctggctggtggaaatacagcatcaaatattctgaaataagttgggggagggccgggtgcggtggctcacgcctgtaattccagtacttgggaggccgaggcgggtggatcacccgaggtcaggagttcgagaccagcctggccaaaatggcaaaaccccaactctactaaaaatacaaaaattagccaggcgtggtggcaggcagctgtaatcccagctactcaggaggctgaggcataagaatcgcttgaactcgggaggcggaggttgcagtcagctgagattgtgccactgcgcttcagcctgggggatagagagagactctgtctcaaaaaaaaaaaaaaagaaaagaaaaaagaaaaaaggaagttgggggagtgcaaacaataaacttcacaaataccacagggtcacttttccatatgtccctaccatctcaaaatgatgctatgtcacttctgtctataggttctcatggcacacaaacagtaaacctacagtagttgtccatgaggatagatcttgcttggattcaaagatggtttagccagagttgggagtggagaatgaccatgtaatatcttggacacctgccacttctcattaaaacactcagctctcaaagctgccacttccaggtttttgctcagttctatgtcccctaccctgccactatggaaagggggagaaagcccagkgccttgggaattcctgccccaccagtatttcccagtttccttttttttttttttgagacaaggtcttgctctgtcgcccatgctggagtgcagcggctcgatcacagctcactgcagcttccaactccggggctcaatcgatcctcccacttcagcctcccaagtagctgggaccacaggtgtccaccaccatgccaggctcatttttgtattttttgtagagatggggtttcaccatgttgcccaggctggtctcgaacacctgggctcaagtgattcccccacctcggcctcccaaagtgctgggattacagacaggcatgagccatcgcgcccagcccrtttccttaagaaacgttttgagcgtctgttaggtgtcatacgctctgacgggggaaacaaaaacgaatataaaacattgactatggttcacaatctgcgtggtggcagacacaaacttctaattttatttctcctctcatacagccgaaaacctggtttaacatacactgtttcatttatgccccaaaacagtcctgtgaggtcaaaacgtcattcacttacgcacggcgggtgacagttcacaaggcacatgacatccctcatcttgatctcccggtatccgcgcattttaggaagaaacatgctcaaagggatgaagggtccgctctyaagcattttagctagcgaagttacagtcacatccggcaaactcgcacactgcagawctaggactaccccgcgmggccccgcccactttcccagcagcgggacgctgtcaccccgactcargagctcctgggcccgcgggctcccggaagctgccgaccacgtgatwcgctggctcagctcacgtgacaaagctcccggaggtgggagccctgggccaaaatggcggcctacctgcagtggcggcgcttcgttttcttcgacaaggagctggtgaaggagccgctgagcaatgatggggccgctcccggggccacacctgcttctggatccgctgcttccaagttcctttgcctccctcctggcatcactgtctgcgactcaggccgagggagcctggtctttggagatatccttcgtttggagctgtcttttccctccygggatcccgaagagatcgagttaggatgaaatctgtttgtcggaggggtccgtgccgcgcgcctctttggtttagctggtcatccagagttgttctgtggtctacgggaagaaagaaggaagtccrtytcctaacttgttatcaactgagcaatcctgggcaagtcatttaacctctctgggttttaatttccttatctgtargagatgtgtgcatgccaatttgacgaggttaatttgagatcaataagaaaaagaatgcaagttggctttaaaagatgaatatgtannnnnnnnnnnnnnnnnnnnnnnnnnnnnnnnnnnnnnnnnnnnnnnnnnnnnnnnnnnnnnnnnnnnnnnnnnnnnnnnnnnnnnnnnnnnnnnnnnnnnnnnnnnnnnnnnnnnnnnnnnnnnnnnnnnnnnnnnnnnnnnnnnnnnnnnnnnnnnnnnnnnnnnnnnnnnnnnnnnnnnnnnnnnnnnnnnnnnnnnnnnnnnnnnnnnnnnnnnnnnnnnnnnnnnnnnnnnnnnnnnnnnnnnnnnnnnnnnnnnnnnnnnnnnnnnnnnnnnnnnnnnnnnnnnnnnnnnnnnnnnnnnnnnnnnnnnnnnnnnnnnnnnnnnnnnnnnnnnnnnnnnnnnnnnnnnnnnnnnnnnnnnnnnnnnnnnnnnnnnnnnnnnnnnnnnnnnnnnnnnnnnnnnnnnctgggattacaggtgtgagtcaccgcgcctggcctcactctttttaagataaggagtatgtgggaaaatccttgaaaattttagagttatatacatgtaattgttatctgagttctggtctgaatgtaagtatctctccttggaaaggaggctccttgactaccctgcacatatggaaggccagatctggttcttgccacgttccctacagcttacaggcttccaagcctacaaactacgggtgacacacctgtaccaactgaagcagcacaatattctggcatctgttggagaagatgaagarggcatcaaccccttggtgagtcccagcagggaaatgggaaagatccagaagcctaggaatgattttttgttggaggatgactagcatttacacttctgaggtctgtccacaggttaagatctggaacctggagaagagagatggtggcaatccactctgcactcgaatcttccctgctattccaggaacagagccaactgttgtatcttgtttgactgtccatgaaaatctcaactttatggccattggtaaacagaaggcaaaactaaccctcctagatttgttatagattttcttcagagttgcttctgcctctcatctttactgttttcaggagaccactttgtactgaactgaggcctttgcgatattaaattttggaatgggggccaggcgcggtggctcatgcctgtaatcccagcaccttgggaggctgaggcgggcggatcacctgagattgggagtttgagatcagcctgaccaacatggagaaaccccatctctactaaaaatacaaaattagttgggtgtagtggcacatgcctgtaatcccagctactagggaggctgcggcaggaaaatcacttgaacctgggaggcggagtttgcagtgagccaagatcgcgccattgcactgtagcctgggcaacaagagcaaaactctgtctcaaaataaataaataaataaataaataaataaataaataaataaataaaataaataaagtttggaatgggaaggcatttaattttgttctttgaaaatgtgtcagtgagtaccaatattcaggttaaccattagagaggttgggtatatggagaaagcttgtcacttctgagtgcctcaagtggtcttttttcccctctccacttcctgatcttttcagccttactgaagtaattttcttgttttcttacaggtttcacagatggsagtgttacattgaacaaaggagacatcacccgggaccggcatagcaagacccagattttgcacaagggcaactatcctgtaactggattggcctttcgccaagcaggaaagaccactcacttgtttgttgtgacaacagagaacgtccaggtatgaccaaggcctccactcttaggagcaggcagggagggcttctccattgttcagggggatagggtaatgaagtgacaggaaaggtgggagtgttaaagttttaatcatataattcgaatcatttgcctagctttgtattttatttttttgcctaggaagctggaaagagttagactctgggcttgtagtaaaaagatgtgaattttctttcttttttttttttttgagaccgagtctcactgtgttgctcaggctggagtgcagtggcgagatcttgactcactgtaacctcagtctcccaggttcaagcaattctcctgcctcagcctcctgagtagctgggattacaggcacacaccagcatgtccagctaatttttgtatttttagtagagacagggtttcaccatgttggccagtctggtctccaactcctgacctcaggtgatccacccaccttggccttccaaagtgctgagattacaggcrtgagccaccgcacctggccttgaattttatttctaactagcttttttttttttttttttcctttgagacaggatcttgctgtgtaacccaggctagagtgcaatggtgctgtctcagctcactgcaacctctgcctcctgggctcaagtgatcctcccacctcagcctcctgagtacgtgggattacaggcatgtgtcaccatgcctggctaatttttgtattttttctagatatgggggtttcaccatgttgcccaggctgatctcgaactcctgggcccaagcaatccacctgcctcaaccacccaaagtgctggaattacaggcatgagccactgcaccggcctattttctaactaactttttaaatgacgttggacaagtatctttacctttcttgttcctggtgccccagatttacaacagtctactctctcaggaatactcttgataaartagtagattattacatttytcttacttgcagaatttctgtactagatagtgataatatatacagagaaagaaattgtgatctctggttatatatttaatagatgggtaatggttaatgaagaaggccagcagccaagagaaagactttagaatgccaagagggaaaaaagagccagtatggagatgggaatacctttgtgaaggcttagagttacctcctcaaaggagcctgttaacccctttgttgcttctggcagtcctatatagtttctggaaaagactaccctcgcgtggagttggacacccatggttgtggcctgcgctgctcagccctaagtgacccttctcaggacctgcagttcattgtggccggggatgagtgtgtctacttgtaccagcctgatgaacgtgggccctgcttcgcctttgagggccataagctcattgcccactggtttagaggctaccttatcattgtctcccgtgaccggaaggtttctcccaagtaaggactcagtgagaagggacagggagagggctggacttgttccccagaatccgcctgattttaaaatcctaatgcctggatmctgccaatctcctactcctactccggtgttatgtaggtaacatttctgttttttttttttgaratggagtytcgctctgtcacccaggagtgcagtggcgtgatctcggctcactgcagcctcgcctcctgggttccagtgatactcctgcctcagcctcctgaatagctgggattacaggcatgtgccaccacgcctggctactttttgtattttcagtagagacgaggtttcaccatgttggccaggctggtgtcagactcctgacctcaagtgatctacccgcctcggcctcccaaagtactgggattacaggtgtgagccactgcacccagccagtgacacttatagctagagttggttacaatgctttttttaactgaaaaatggatgtttttactgcaggtatttgstacatagccctagcatactagaatgctccagggaatttggacctgctttttttgttctgttttgtttgagatggagtctcgctctattgcccaggctggagtgcagtggcgcgatctcggctcactgcaagctccgcctcccgggttcacgccattctcctgcctcagcctcccgagcaactgggactacaggtgcccgcccccatgcccggctaattttttgtatttttattagagacggggtttcaccgtgttagccaggatggtctcgatctcctgacctcgtgatctgcctgcctcgtcctcccaaagtgctgggattacaggcgtgagccactgcgcccggccttgttttgttttttaactcttttgtcaaaataarttgggcagaggaacaagggattcagcagtggagaaattagaaagtgctgggaaacgtaggatgcaagttttctgttttgttttggttttatttttttaaggggtaagtggggtcttctgcatgatgaaagtactccctgttagatgctggtttgttttgctttcattcagttccaggcacagtgttttacatataccatgtattggattattattttctaaatgaatggatatgttagtgtacttaattttctaatctgttacttgggttaattgtaggatcctaaagggtaagatcaggtttatgtgttctctatgtacaactaccggcacagcgctgcatgttatgggatgagagggaccagagaggtgatttgtgctgggtgaaatgtgcaccaaagttatcatgggaaaggaaataggggagataagacagagatgtccaaacatctggtgctttttctttcctatgcaggtcagagtttaccagcagggattcacagagctccgacaagcagattctaaacatctatgacctgtgcaacaagttcatagcctatagcaccgtctttgaggatgtagtggatgtgcttgctgagtggggctccctgtacgtgctgacgcgggatgggcgggtccacgcactgcaggagaaggacacacagaccaaactggaggcaaggccaccaggctcgcagagctggccacaggcacctagaagcagctgcaggagcaggttccccaagtcatattggccagggtgtttccctccttgtgggtcacagccttactyagcttccttagggtaggattataaggtaaatggcctgggatggggctttagagggaagtagtggctgggagcctgagcccacyctaagggttcactttgtttccagagaaccttatgaaataagatgatactgatcttggggatatctggtagctcttggtttgtctaggatctaggcagatcagaaatccaggactttctgttttgtgtgttgtgcgcacattttgggaaagtgtcttcccaggaccacttctaccaattttctaatctctcttcccttctagatgctgtttaagaagaacctatttgagatggcgattaaccttgccaagagccagcatctggacagtgatgggctggcccagattttcatgcagtatggagaccatctctacagcaagggcaaccacgatggggctgtccagcaatatatccggtcagtctggaggyactttgggatatagctgtgaatgcagggacaggcagctagatagctaaagcccatccatgctccaggtaggggctagaattctaccaggaactgtttttgtttttggytttttgtttgtttttgttagtttttttttgagatggagtttcgctcttgttgtccaagctggagtgcaatggcgcgatctcgacttactgcaaccttccctcctgggttcacatgattctcctgcytcagtctcccgagtagctgggattacaggcgcgtgccaccacacctggctaattttttgtatttttagtagaaacggggtttcaccatgttagccaggctggtcatgaactcctgacctcaggtgatctgcccgcttcagcctcccaaagtgctgggattacaggcatgagccactgcgcccggtgtttttttctttgctttttttgtttgtttgtttgtttttgagacagattctcgctctttcacccaggctggagtgcaatggtgtgatctcrgctcactgcaacctctgcctcgggttcaagcaattctcctgtctcagcctcccaagtagctgggattacaggatcatgctgccatgcctggctaattttttgtatttttagtagagacggggtttcaccacgttctctaggctggtctcgarctcctgagctcaggcaatctgcctgcctcggcctcccaaagtgttaggattacaggtgtgagccacagtgcctggcctttttaattttctttataagaactatgatgccttaaatgagagaacaagattccttgttgaaaagggaattttagggtcaaatattatatgaccagtatgcagttgagccgatgattacctctcattttaacctttagcttggcctttgtaaatattcactttgacctggttctttaagggggaaaaggtattcatctcttgcttccataattccttccatcagtactaattcttggaattttctgccttaagaaggggttttagaaatctgtctaaggtggccgggcgcggtagctcacgcatgtaatcccagcactttgggaggcygaggcgggtggatcacgaggtcaggagatcgagaccatcctggctaacacggtgaaaccccgtctctactaaaaaatacaaaaaattagctgggtgtcgtggcgggcgcctgtagtcccagctacttgggaggctgaggcaggagaatggcctgaaccccagaggcggagcttgcagtgagccgagatcgcaccactgcactccagcctgggtatcagagcaagactgtctcaaaaaaaaaaagttkgtytaaggytggggtgcagtggcatgtgcctgtgatcctatcccttkgggagaccgaggtgggaggaatgcatgagcccagtctgagcaacatagcaagaccccatttctaacaataaataaataaataaaatttaaaaatatggctgggcgccgtggctcattcctgtaatcccagcactttgggaggccaaggcgggtggatcacttgaggttaggagtttgagaccagcctggccaacatggtgaaaccctgtctccacttaaaaaaaaaaaaaaaaaaaaaatacaaggccaggcgtggtggctcacgcctgtaatctcagcactttgggaggctgaggcaggtggatcacctgaggtcaagagttcaagaccagcctggccaacatggcgaaaccccatctctactaaaaatacaaaaattagctgggcatggtggcgggcgcctgtaatcccatcttaaaaaaaaaaattagctgggtgtggtggcatatgcctgtaatcccagccactcgcaaagctgaggcaggagattcacttgaacctgggaagcagaggctatagtgagccaagatcgtgccactgcactccagcctgggcaacagagcaagactctatcaaaaaaataatagtagataataataataataataaataaataaattgccaggggcagtgactcacgcctgtaatccaaacactttgggaggctgaggtgggcggatcacgaggtcaagagattgagaccatcctggccaacatggtgaaaccccgtttctactaaaaatacaaaaattagctgggtgtggtggcatgcacctgtagtcccagctactcgggaggctgaggcaggagaatagcttgaacccaggaggcggaggttgcagtgagccaagatcgtgccctgcactccagcctggcgaaatagcgaaacttcgtctcaaaaaaataataataaaaaaaggccgggtgtggtggctcacacctgtaatcccagcactttgggaggctgaggtgagtggatcacctgaggtcgggagttcgaaactagcctgaccaacatggagaaaccctgcctctactaaaaatacaaaactagctgggcatggtggcacatgcctgtaatcccagctactcaggaggctgaggcagaagaatcgctygatcctgggaggcrgaggttgcggtgggctgagatcgtgccactgcactccagcctgggcaacaggagcgaacctccctctcaaaaaaaaaaaaattaattaaattttaaaataatgtaaaagaaagagaacaaaaatacaacaataaaacaacaacaaaatagtaataatataaaaagaaacctgtttggcctcttccccgttctctttagaattcctatttttagccaaatttaagaagcagtgctctggagccttgttacccagtgtggtccacagtctagtagcaccgatattacctgggactttgttagaaatgtagaatctcaggccccactccagatccactgaaatagaatttgcattttgagaagatctgcaagtgattcctgtgtacatgagctggagaagtacactgattcagatgctatcgggtgcacatgtctccctagaaccattggaaagttggagccatcctaygtgatccgcaagtttctggatgcccagcgcattcacaacctgactgcctacctgcagaccctgcaccgacaatccctggccaatgccgaccataccaccctgctcctcaactgctataccaagctcaaggacagctcgaagctggaggagttcatcaaggtgcaggatgttgttggtggggaagtcttggaggccccactgagcatgaggtggctccaccgggacttgttcgtttcagcaagacatagggagaggaaagggctgaccttatttagaggagtggctgttcctgttagttcggtgccatctcccctcttgttttatgattctagaaattcccatggtatctaagcccagggtggtggcactggggaagtcctgtccctagcggtgtccctctaatggtaggggcagaggaaaactttagtcagaaactcccacaggctgagtagcataatattttcaaagtgtgaacgttatgatatcaccttaggaatctgaaagtcaggtgcctgtttcctctcccttctctatctccctctgtgtaaatgattttgtctcatgtctccctgrcagaaaaagagtgagagtgaagtccactttgatgtggagacagccatcaaggtcctccggcaggctggctactactcccatgccctgtatctggcggagaaccatgcacatcatgagtggtacctgaagatccagctagaagacattaaggtaggtgagactgtcttttttccccaagagacagggtctcactatgttgcccaggctggagttgaattcctgggctcaggtgatcctcccaccccatcctcctgagtggaggtgagactctcaacttgggcagagccctgtcgtttttgaagacatctccagaatggtgaaagtgcttcctggtggctgaggcaggagtatacactattctgccctttacttttccacagaattatcaggaagcccttcgatacatcggcaagctgccttttgagcaggcagagagcaacatgaagcgctacggcaagatcctcatgcaccacataccagagcagacaactcagttgctgaagggactttgtactgattatcggcccagcctcgaaggccgcagcgatagggaggccccaggctgcagggtgaggctgcagggaaaagagcttcagactgtggggatcaccttaagggcttcctgtatatcacgcccactcattcagcctcctttttcctctcttgccatcctaggccaactctgaggagttcatccccatctttgccaataacccgcgagagctgaaagccttcctagagcacatgagtgaagtgcagccagactcaccccaggggatctacgacacactccttgagctgcgactgcagaactgggcccacgagaaggatccacaggtgaggcctggccagggcttcaggagaaaagacagttcrtgccgtctccattcttccgtcttggtggctgcctttcactgcattccttagaccagtaacaccttacctcggggctcaatggtcctctgtgaagagggaatggactgagggaaagagttgactggctttgtcccaagagaccttgtgattttccccttttgtccagcagctctgccctccttcctctccaggtsaaagagaagcttcacgcagaggccatttccctgctgaagagtggtcgcttctgygacgtctttgacaaggccctggtcctgtgccagatgcacgacttccaggatggtgtcctttacctttatgagcaggggaagctgtaagagtttggggaatttcagggaaaggggaagaatccaagtcattttccagagacagccactgaggtgtgcccttgccccggccgcaggttccagcagatcatgcactaccacatgcagcacgagcagtaccggcaggtcatcagcgtgtgtgagcgccatggggagcaggacccctccttgtgggagcaggccctcagctacttcgctcgcaaggaggaggactgcaaggagtatgtggcagctgtcctcaagcatatcgagaacaagaacctcatgccacctcttctaggtacttgggaagacagatgggtgggtgacaagctgctgacagctgggctctgtggcaggggcccttcacctttatccagagagtgccacacrtggttgattgtcttgtttcctcttggaccccaatctcagtggtgcagaccctggcccacaactccacagccacactctccgtcatcagggactacctggtccaaaaactacagaaacagagccagcagattgcacaggatgagctgcgggtgcggcggtaccgagaggagaccacccgtatccgccaggagatccaagagctcaaggccaggtacccggggcatggatatgtggaggagtccaggggataacttgcccttcacagggtattcattactaagtactttccgtagaggatactatggagtgcttttgagcattttgattcttcaagttgtgttttaattgaggaattccaaaaaatggtttattacatagatcattatttattgggctttggatgatattattttgtagsaggtactttttgttctttatatgcctgtattctaccacttctaaacacatccgtattgtggttggaagccgttctggtgtttttcttttttgagacaggatcttgtcactgaggctggagtggaggggtgtgatcacggctcactgcagctttgatctcctgggctcaagtgattctcccgcctcagcctcccaagtagctgggattacaggcgtgtgccaccaagcccagctaatttttggatttttagtagagatggggtttataatgttggccaggctggtctcgaactcctggcctcaagtgatcctccggccttgacctcccaaagtgctgggatgagccacggtgcccggccataatcccaactctgaaatcttacctgcccttaacattctgtaaaatatttattagagaacaacagtttcttcattctacaaatattgagcctctgtggtgtcccagacactattctgaacagcacaggcaaaaagccttcatggagctttatgttgtagaagagacaracagcaaacatgttaaataggcaaactttttttttttcttttgagatagagtctcactctgtcacccaggctagagtgcagtggcgcgatctcagctcacagcaacctttacctcctgggttcaagcgattctcctgcctcagcctcctgagtagatggaattacaggcgcctgccaccatgcctggctaatttttgtatttttgtagagacagggtttcactatgttggccaggctggtcttgaactcctgacttcaggggatctgcctgccttggcctcccaaagtgctgggattacatgcgtgagccactgcacccggccaaataggcaaattttttttttcttttttgagacgaagtctcgctcttgtcccccacgctggagtgtgatggcgcaatctcggctcactgcaacctctgcctcctgggttcaagcgattctcctgccttggccccctgagtacctgggattacaggtgcctgccatcatgccyggctaatctttatatttttagtagagactgggtttcaccatattggccaggctggtctagaactcctgacgtcaggtgatccacctgcctcggcctcccaaagtgctgggattacaggtgtgagccactgtgcccagccaaatagacaaagttttgtagtatgttaggtggtgataagttctgagtggcaaatgaattgagcaaggggagtgggagaagtgtgttaacaagtttagagaaggtggcccaggaaaggcctcagtgaaagggtcacatctgagtacagacctgaaagttaatttagtggcagttgtgaaaatggagacagaggaaacaatccccaggctgagttggccttgttgggagcatgctgagactcactgcaggtccagggctgttgtawtcatttgactcccttaaggcgataagaagagcagggcagggccttcaggggccttaccagggaccttgccctgtgcacttcagctgccttctttctcatccttgactcctggccttgccctcacttttgccactcacttctggtctttcttccctgtagtcctaagattttccaaaagaccaagtgcagcatctgtaacagtgccttggagttgccctcagtccacttcctgtgtggccactccttccaccaacackgctttgagagttactcggaaagtgatgctgactgccccacctgcctccctgaaaaccggaaggtcatggatatgatccgggcccaggaacagaaacgagatctccatgatcaattccagcatcaggtggggatgagtgggctagatgggccaggggattcccactagtgtcacagagtcactggagggcttgtttccttatcacctcctcatttaagaaacaagcactttgattctgattcgtattccttccctcctcttctcctgcagctcargtgctccaatgacagcttttctgtgattgctgactactttggcagaggtgttttcaacaaattgactctgctgaccgaccctcccacagccagactgacctccagcctggaggctgggctgcaaygcgacctactcatgcactccaggaggggcacttaagcagcctggaggaagatgtgggcaacagtggaggaccragagaacagacacaatgggacctgggcgggcgttacacagaaggctggctgacatgcccagggctccactctcatctaatgtcacagccctcagaactaaagcggactttctttccctgccttcttatttagtcagcttgccatccctcctcttcactagcagtgtagatcattccagatcagtgggggagggcacctcagcaacctctgagtgtggacaatagctgctttcttctctatccaagagcaccaggctgtgcttgggtccttgctctcagagtctataaataaaagaatataatgatttgggagcttaaggatttttttctggggacttcctggtgattcttaactgcatgatggacttccttccctctgctctcctggcgttccacttccctcctacggttttcttggagaccatgttgactcagtctcgttctggtaatgggtggggcctgtggcatcgcatacagttcaatttactgaagaacctctgcaaaagacctaatgactgagctccaggagcagcctggaccaagacccccaaaacagctcttactctttcctcttcctggtctctatggctgtagtttgggcaaaatattcaagcaggaggcagattctggtagggagctttgggcttaacctaccttaaataatgggtaggttggtgtcttgctatacttaataccagatgataaacgggataaaaggtcctttctggaaacacctttccctctctgaaattgtcagctaaagtttatgttgctaggtgtccccgtgtaatttgggtggtgctgcctgtctgaaaattgctcctatgttgtcgttttccccacagcctcacctaatttcatcttctacgttgtttaattggaggacgtaagtttgacactgtggtttaggtagtatttaggattgccatgggctgggcgcggtggttcatgcctgtaatcccaacactttgcggggctgaggtgagaggatcgcttgagtccaggagttcaagaccagccacccaggcaacatagtgagaccccgtctgtgcaagaaataaaaataaactagcccagcctggtggcgcttgcctgtggtcccagctactcaggaggctgaggtgggaggattgcttgagcccaggaagttgaggctgcagtgagccttgatcacaccactgcactccagcctgggtgacagacaccctgtctcaaaaagtaaaaaattaaaaaacagtggcagtattgtagctgctatgctatgagtagactttgcatctactgagctgggtttgaatcctagttgtgctgtttgacttaaggcacatcttaccttctcaacatgttttttttttttttttgagatgtatttttttcagtgggtttttggggaacagttggtatttggctatgtgaataagttctttagtagtgatttctgagatttggtgcccatcacccaagcagtgtacactgtacccaatgtgtagtctcttatccctcaccctgctcccaccctttccccctcaacctgtgtcttcatctgtacgttagggattataacacctatgctgtgtggctattatgaaagcctaaggatcaaataggtgttcagttctttgtacagtgctgagcacatgggtgattttttttttcttcttaagacagggtctcaccgggcgcggtggctcatgcctgtattcccagcactctgggaggctgaggtgggcggatcacctgaggtcaggagttcaagaccagcctgaccaacatggtgaaactccgtctctactaaaaatacaaaaaccagctgggtgtggtgggaggtgcctgtaatcctagctactcaggagggtgaggcaggagaattgcttgaacccgggaggtggaggttgcggtgagctgagattgcaccattgcactccagcctgggcaacaagagtgaaactccatctcaaaaaaaaaaaaaaaaaaaaatgggcgtctcactctgtcatccaggctagagtgcagtggcaccaccacagctcacagctacctcgacctcctgggctcaagcgatcctcacacctcagcctcctgaatagctgggactacaggtgtgtgccgccacacctggctatttttgtattttttgtggagatgaggttttcaccatgttgcccagggtggtctcaaactcctgggctcaagcaatcctcctgccttggcttcctaaagtgctgggaatataggtgtgagccactgcacctagctgggtgattattaataatcatgattgttaattatgttcatgattacaggcgcggtggctcacgcctgtactcccagcactttgggaggccgaggtgggcgaatcacctgaggtcaggagttcaagacctgcctgactaacatggagaaacctcatctctaccaaaaatacaaaattagccgggtgtggtggtgcgtgcctgtaatcccagctactcggggggctgaggcaggagaattgcttgaacccgggaggcggaggttgcagtgagctgagatcgtgccattgcattccagcctgggcaacaagagcgaaactccgtctcaaaaaaaaaaaaaaaattatgttcatgggaaagcacttttcctaacaagcccttttctcactacatgtagcgtttgtgctcccacttcagttacttgtctttaggcatgacctttaatctctctgaaccagtttcctcattttaagaattgaaatgctggctgggccagtggctcacgcctgtaatcccagcactttgggaggccaaggcgagatgactgcttgagtccaggagttcgagactagcctgggcaacatagtgaggccacctccccgctgtctctataaaaaaatctagaaattagtcccacgtggtgatgtgcgcctgtagtcccagctgcttgggaggctgaggtggggggatcgctgaagccgggaggtcaaggctgcagtgacccgtggtcatgccgctgcactctagtctggggacacagtgagaccccgtatcaaaaagaaaaatgctgcctatttcaaggttgtagcaaagctaagtttgaacagagcaaaggaagcgccatagaagctgcactacttgctcatgtcacagctggggaatggggaggtcgaatggggaggtccactgtcgcaatgttccaattcccgcccagagggagggacctccccttcgagggagggcgccggaagtgacgcgaggctctgcggagaccaggagtcagactgtaggacgacctcgggtcccacgtgtccccggtactcgccggccggagcccccggcttcccggggccgggggaccttagcggcacccacacacagcctactttccaagcggagccatgtctggtaacggcaatgcggctgcaacggcggtgagtgctgagccggtgaccagcacactttgggcttctggacgagccgtgcagcgattggccccaggttgccatcctcagtcgtctattggtcagaacggctatcttttttttttttttttttttttttttggtccgagtagcttttaaagggccagtagctcggttgccctccggaaggaatggggaaatcagagagcggtgatactgggttaagagtggaaggattgtttggaacggaactccggtccctgcgggcatctgggtgggattcccatcaggcctgggatgcacggctctagatttagtgacccagaccaagaacgttcgtctacacagacggggtcctttcattcgaggctgggctgaggcggatgcagatacggcccctttgggaagacacgttccacttttgattcataggagagagtatcagccaagcctccgaactgcacacaaacgtcttagaagtgcgccttctttttgtgttatagtggtctcccagccacagccaacgctccaagtccccagctgtgacacacctactgaattactaccgtgggtgggaggccgccgtgggcctttccattacgagcctgcttgccgagccctgggcttgtgcacagacaaactgcagagctggtggaggccactgccaggccgagataagaaagagatggggagctgctaatctccccctgtccagcctgttggtgagggctgggatctttgctcttgcagtcattccagagccctggactaggagtaggaagatctgaattgtggccccaactctctttcggttattagctctgtgaccctaggcaagtcacctcatcccttgatgccacccgttgcttctgtaacatggtcccaaaggtgcctgtcttgtccacctgataggatttttgagacgacaacaatatgcaaaagcaatagcttcaacatagaagtgctcagtgttttattttttaatgaaacggtttgacttggatatgctgtgcacattcaatgaacttaaggaattgtttgaacctagtagttctgggaccttagagtcctttctgtgggctccctgtggcccagatttttggtggccacgtttaatatcaagcctagcctaatttgcaaagggtctcccagggttaatttattggagtgatcacatggagtagaccagagtctgagggcagaaagctgtcacctgcttcggcaatagaggccccagatgtctgggtgcaaaagaactccatagcaccccgaccaacatggtgaaaccccgtctctactaaaaatataaaaattaggccgggcacagtggctcatgcctgtaatcctagcactttgggaggccgaggcaggtggattgcctgagctcaggagttcgagaccagcctagggaacacagtgaaaccccgtttctactaaaaatacaaaaaattagccgacgtggtggcatgcgcctgtagtcccagctacttgggaggctaagacaggagaatcgcttgaacctgggaggtggaggttgcactgagccgagaccgcgccattgcactccagcctgggtgacagagcgcaactccccctcaaaaaaagaaaaaaaaatatatatatatatatatatatatacacacatattttagctgggcatggtggtgtgcgtctgtagtagtcccagctacttgggaggctgagtcaggagaatcgcttgaacctggaaggcagtggttgtagttagctgagaacatgccactgcactccagcctgggcaacagagggagactctgtctcaaaaaaaaaaaaaaaaggaactacataggatgaacatcccagatcagggaatgttgactgtcgacagtatcagtatctacagtggctactgtctgatgtagaaagaaatgggatcaggctaggcgtggtggctcacgcctgtaatcccagcactttgggaggctggggcaggaggatcacaagttcgagaccagcctggccaacacagtgaaaccccgtctctactaaaaatgtgaaaattagctgggcatggtggaacatgcctgtagttccagcttgaacccaggggtggaggttgtagtgagcctagatcacgccactgcactccagcctgagcaaaacagtgagactctgtctaaaaaaaaaaaaaaaaaaagagagaaatgggacctccgtcttagactgaagaattcagttctacgtgcttagcagtgaatacttttgtccaaggtactctggcaggaggaagaggcgtgtcctcttgagttcttgacttgggctctggcctgttaatatttccatgttggtgaaaccagaggcagcactctaggtgcacgaactttaggcagcgcagcctcctagtcttatggaacatctgaggcagaagaaacctgagtccaaccttttcattttatagatgaacaaacagatcctgatgggacagtgtacccaaggtcacccagccaagaggctgagcaggactgtacgtcagatccgtttacctcagtccttaatgcatgcagtccagccagattaagggacccttaatactgtcagctttccccactgtgggatcttcatcctcttgacttcttttgtagccagacatctgggcctcttgctggagaaggtggcagcttgctgctcttagactctagtctactccatgtggcatctggatggcactgaaattttctcaagtgccttgtctgttgtagataatgaatctatcctccagtgactcagcacaggttccccagtgtggtcctggctgccctgcccctgccagctgcaggccccacccttcctgtggccaggctgatgggccttatctctttacccacctggctgtgcacagcactcccactgacaactgccttggtcaaggtgggcttc

SEQ ID NO: 98108 - DNA, 18268 bp, Homo sapiens
ggagagctcaaaccctgcccgaaacttctaaaaatggtgcctggataaatgaaggcattagagctgcgattggacggacggctgttggacggcgccactgctggcacttatcgggagatgctcattggacagtcacgtgacgggaccaaacctcccgagggagcgaggcaggtgcggtcacgtgacccggcggcgctgcggggcagcggccattttgcggggcggccacgtgaaggacgcacgttcagcggggctctcacgtgacccgggcgcgctgcggccgcccgcgcggacccggcgagaggcggcggcgggagcggcggtgatggacgggtccggggagcagcccagaggcgggggtgaggcgggaggcagacgggcgggaggagggcgagcccccttgccggcccgtccgggatccttcctaccggcctggggctgtgcgatctccaagcactgaggggcagaaactcccggatcgggcgctgccagcctccagtcccctccgtcctcggaggttcctggctctctgatccccgtgtcccgatccctgcctctctggcgctctcggaccctcgagaaccaggggatctcggaagccaagcccccgggcaggcccgggcttgtcgcccgcaccacttcctgcctctggcactggtgggaggggcgggtctcgcctctgccccctcaggccaggggtctggatgcatatagcgttcccctagcctctttccccggggagaatgtaggatacaggcccagcctcctggcctttctccatcagggactcagttgtctgggcccccccgtcactttatctgctagggtcccagaagtccagggtccccagctctgtcctccctcaggggccgtgagtctccacagtctcctgatcccctagaacccaagagtccaggtacctcttcccttcctttctcctctagggcccaccagctctgagcagatcatgaagacaggggcccttttgcttcaggggtgagtttgaggtctgattattgtggcacagatttgaggagtgacaccccgttctgattctgcaccctcactccatccccactctagtttcatccaggatcgagcagggcgaatggggggggaggcacccgagctggccctggacccggtgcctcaggatgcgtccaccaagaagctgagcgagtgtctcaagcgcatcggggacgaactggacagtaacatggagctgcagaggtgtgggcccctggggacccagaagtccagccactgggctccttcaggacacaggactctcagccccgcattctcctcctcccctaagaactaggagtctgggccccacaactcagcgcaagcattccggactcccagccctcctctctgccaggatcttaaaaccctccttcagggagtcatttttcccaccttcctaaatgtctgtcttgtccccttcccttgtcccccgttggcctgttgcttttcatttcagcctggcttggggctcagtctccttatctttagtgtgcggtggatgcgggaattttccaccatcagcctgatgcctgctccccggcactggttctcctctctcctgcaggatgattgccgccgtggacacagactccccccgagaggtctttttccgagtggcagctgacatgttttctgacggcaacttcaactggggccgggttgtcgcccttttctactttgccagcaaactggtgctcaaggtgggcagctgcagggcagtgagcccagggatgctccccctcagatctgtgaggacctggggatcgtggtatcaaccccctgcagtggcccagtgaccacagagggcatggagagagatggctgtgcactgggtgtctgctccttcttttattcattcaacaagcatttactggacctgctatgtgccaggcctatacctggcacctgggacacagcactgtacaaagcaggctacatccctgctctcagggagttcacgtgcaggggtgaagtaaagtgggcagagtgatttagcagagtggtcaggaaagatttctattttttttttttttttttttgagatggagttttgctcttgttgcccaggcttgagtgcaatggcatgatcttggttcactgcaacctctgcctcccaggttcaagcgattctcctgcctcagcttcctgagtagctgggattatgggtgtgcaccattatccctggctttttttttttttttttttgtatttttagtagagacgggtttcaccatgttggtcaggctggtcttgaactcctgacctcaagtgatccacctgccttggcctcccaaagtgctgggattacaggcatgagccaccgcaacaagccaggaaagacttctaagggcaggtgacatcaaagagcaggtgacattaaagccaaagctagaatgataagaagcatgcagtgatctatagtgatcggggggaagaggcatctggtagagggaacagcaagtgcaaaggccctgaggtaggaccaagcctcatcttttgacagtagggaggaggccagtgctgttggaacagagtgaactggggagagggtgggaaaggaaggcacagttgggcaggggcagattgtgtggagtttttcgggctgctggaaagactttttcttttcttttttttttttttttttttttttttttgagacagagtctcactttgttgcccaggctggagtgcaatggcgccatctcggctcactgcaacctctgcctcccgggttcaagtgactctcatgctttagcctcccaagtagctagaattacaggcacacaccaccatgcctggctagtttttgtatttttagtagagacggggtttcgccatgttggccaggctggtctcaaactcctggcctcaagtgatccgcccaccttggcctcccaaagtgctgggattacaggcgtgaaccactgcacccagcctggaaagactttaactttactctgagtgtgatgggagtgattggctggttttaaatacggaagcgacaagacctgatttataaatttaagagattattctagcaagtatagatgccccttgacttgcaatggtgttacatcctagtaatcccatcataaattgaaaataacataagttgaaaatgcattcaatgccccgataaacccatagtaaggtcaaaattgtaagtcaaaccgtcataagttggggactgtctgtatagcaaaatgttaattgtagaatctaattataggtggcggctatatggcttttaactgtgaaattcttttaacttttcattatgaagattctcataagaaaatgtggtgggggtggtggggaaatgctcctggctgttgttggccaaaagagatcatgaggcacaagggcagaagcgaggatcctggagaggtggcacctgtcatagtcttgccgaaagatgacaagccctggtggtagcagcagaggtgcggggggggcattttttttttttaagaggtagggtcttgctctgttggccaggctggagtgcagtagtgatcatagctcactgcagcctcaaaccgctggggtcaagcagttctctcgcctcagtctccagagtagctgagactacaggagcatgccaccacgccccactaactgttgcattagtctttttctatagagacggggtctcgctatgttgtccaggctggtctccaacagggagggatatttctttttggaagattttttttttttttttttttttttttgatacagggtctcgctctgttaccaaggctggaatgcagtggcatgaccttggctcactgcagtctccacctcctgggttcaagcaattctacctcagcctcctgagaagctgggattacaggctctccccaccacaccagcaaatgggagggatatttctttctttctttttttttttttttcctgagacggagtctctctcggttgcacccaggctggagtgcagtggcgcgatctcagctcactgcaacctccacctcctgggtttaagcgattctcttgcctcagtctcccgagtagcttgggattacaggcgtccgccaccacacccagctaatttttgcatttttagtagagatggggtttcaccatgttggccaggctggtctcgaactccttacctcaggtgatccgcctgcctcggtctcccaaagtgctgggattacaggcgtgagccaccgtgctcagctgagagggatatttcttgatgtgttttcaagattgagctgatggggcctgaacgtccgagatgaggggaatagcagtgcaggtgatggtggcaccacctacagagcggggatgatagaatagaagtggccagataaaggctgcaggagaagtcttgggagttgggagagcaggtcggggtccatggtcaggggttgatcttctctggtccagaaaagtcctctctggctgggcgtggtggctcacgcctgtaatcccagcactttgggaggccgaggcagggggatcatgaggtcaggagatcgagaccatcctggctaacatggtgaaaccccgtctctactaaaaatacaaaaaattagccgggcatggtggtgggcacttgtagtcccagctactcgggaggctgaggcagaagaatggcgtgaactgggaggcggagtttgcagtgagctgagattgcaccactgcactccagcctggagcgacagagtgagactccgtctcaaaaaaaaaaaaaaaaaaagaaaagtcctctctggggaagtgacatttgccctgagagctgaagggtaagaatttgcttcgtcgaggcctgtttaggcggaaacaggagtacatgaagaagtcccgaggcaggaagaatttgatgggaatttaaaaaattaaaaaaaaaaaaaaaaatggggctgggcatggtggctcacacctgtaatcccggcactttgggaggctgaggcatgcggatcacctaaggccaggagtttgagaccagcctgaccaacatggtgaaaccttgtctgcactaaaaattcaaaaaaaaaaaaaaaaatagcccggtgtggtggcggatgcctgtaataccagctgcttaggaggctcaggcaggaggatcacttaaatctgggaggcggaggttgcaatgagccgagactgcactattgtactccagcctgggcaacaagatcaaaactctatctcaaaaaaaaaaaaaaaaattagccaggcatgttggcaggcacctgtaatcccaaccctttgggaggctggggcaggagaattgcttgaacccagaaggcaaagctttcagtgagccgagattgcgccactgcactccatcctgggtgtcagagcaagactccatcttaaaaaaaaaaaatggaagcagctcagcgaggcacaaaacaggaagtggaaaggtggagtgaggtcaggccaaagcctgcacacagggcttgtgggctgcactgtgccttcgggtcttcatcctgagggtactggggagccacagaaggctcaggggtggggcagttgagagtaacattatcttgtttacaattttattttttttatttatttattttttgagacggattcttgctctattgtccaggctggcgtgaaatggcgtgatctgggctcactgcaacctctgcctcctgggttcaagcgattcacctgcctcagcatcccaaggagctgggattacaggtgcctgccaccacacccagctaatttttgtatttatttattttgagatggagttttgctcttgttgcccaggctggagtgcaatggcgcaacctcggctcactgcaacctccgcctcccgggttcaagcaattctcctgcctcagactcccaagtagctgggattacaggcatgtgccaccacgcccggctaattttgtatttttagtagagatggcattactccgtattggtcaggctggtcttgaactcccgacctcaagtgatccgcctgccttggcctcccaaagtgctgggattacaggcatgagccgccgcacctggccatgtttacaatttttgaagccgacttcaattgtgggtggcagaaatctttgaggggaggcaaagaattgacaaaggaggtttggggccactatctccaggcagtggggacaaggttcagtccctaacgcccactccactccccacaggccctgtgcaccaaggtgccggaactgatcagaaccatcatgggctggacattggacttcctccgggagcggctgttgggctggatccaagaccagggtggttgggtgagactcctcaagcctcctcacccccaccaccgcgccctcaccaccgcccctgccccaccgtccctgccccccgccactcctctgggaccctgggccttctggagcaggtcacagtggtgccctctccccatcttcagatcatcagatgtggtctataatgcgttttccttacgtgtctgatcaatccccgattcatctaccctgctgacctcccagtgacccctgacctcactgtgaccttgacttgattagtgccttctgccctccctggagcctccactgcctctggaattgctcaagttcattgatgaccctctgaccctagctctttcctttttttttttttccccactgagaaggggtctcgctatgttgcccaggttggtctcgaactcctggcctcaagcgatcctcccgcctcagcctctcaaagtgctgggattacaggtgtgagccaccatgcctggcctgagtccagctctttaatgcccgttcatctcagtcccctgcccgcaatcctgccttctggcctcctccgtccctgatcccgcctctgcctgcccaggggctgcccctggccgagtcactgaagcgactgatgtccctgtctccaggacggcctcctctcctactttgggacgcccacgtggcagaccgtgaccatctttgtggcgggagtgctcaccgcctcrctcaccatctggaagaagatgggctgaggcccccagctgccttggactgtgtttttcctccataaattatggcatttttctgggaggggtggggattgggggacrtgggcatttttcttacttttgtaattattggggggtgtggggaagagtggtcttgagggggtaataaacctccttcgggacacacttcggcatctgagtcactgggcctctgccccgctccccggcacgtcaggagagcaggccctgtccgctgccccacgccgggcccgccgtctgctggcctagagatacctgcttgggccactcagggacgtggggctctctgcactcacttgacatctttttytggggtgccctgtggggtctgtgggttagggatgagttggtcctgggcctgacctgcaggagctcacgggaaaggaaaagaagggagctcacgggaaaggaaaagggagctcacgggaaacgagggtgataggtggtacatctgtcgcagcccaggatgatctgtrcgggacagaggcagcggcctgtgaggcccaagcaggcgtgtgggtaagggaagaacagcacggccggctgcagagcaagcctcckcggcccggggaccacagcctggcgtgtcacacgtgggacctcaggaggccatacctttaccgagctggagaatgggagtggggggaggagggatgggaggaccagaggagcaggaagggctctggagcctggtggtgaggtcgctggagggtggcaggctgaggacaccagggcgagggcccacgggagaggcctcctgagctgggctgaggacagagaggaagggacctggctggcgactgagaggctggagggcagggcagaggaggaggaacctggtctggccccacagctgggtggggcccccctggagaggaactgccggaagaaggtgctgagctcagaggcccagtgaccttagacacaggcggagcgaagacaagggggctagaggatgtgggttctcagtcacagggtctctggcacccccctctgggtctttaccccctcccatctctgggtctctgtccccatgctctgggtctttgctktccgagcctctgttcccaccccacctttggccctctttctctgggcctctttccacccctggcacccagacctctggccccctctctctgggtctctgtccccccctctggatctctggccccccatctctctctgggtctgtcccccgaccctgagtttctgtctccctctctctgggtctctgtcctctctctggctgtcactctctcttgggtctctgtacctcccctctctctgggtctctttccctctccccggtctctgtcccccgcccccgggtccctgtccccgcccccccaggtctcagtcctccctagtctctgtccccttctgagtccctgtcccccctctctctgggtctctgtacccccttctctggatctctgtccccacctctctctggatctctgtcccccactctggatttctgtcccctcccgccgggtccctctgggtctctatcccccccacccctgggtctctgtacctccctgcctctgtccccccccacctctgtccccccctctctctgggtctcttttcccctccctctgggtctctgcccccctctctctaggtctgtccccctcccctctctctcagggtctctgtacccctctgtctccgggtctgttttcccctctctctgggtctctgtccccctctctctcagggtctctgtctgagtctctttttctctgggcctctgtctccccaccccacgttctctatggtcttcagatcctgtctctctcagcccctcctctccctccacctatgggccccaaggcccctctcggccgactaaaggtctctgggctgaggtatgacatttggtaaatgagtaactcgggccccacagtcaacggggtgctttggacggctgcccctcctccatggactcttcccagagaccccaagtcaggggagagagaggggcagaggatcaatgagtgtacactgagccaccacccagagtgaggggacaatatggccacaggcaggatcccagaaaaaaaaaaattatgggaaccaaaaagacacggagacaaagcacacagccggcttccaacaaggggggaccttggggtagggggcccgatttgggtctgagccaggtctagttctgagggtcccaccaaaaaagtcggggagtgccaaggggatgaggtcagcgagtggccccacccccatccgtccccgcgggggccccttcccgcgctgagctcagcatgactcagcagtcgctgcctgcaacaaggaccccagataccggcctggcggggcatctgcagatcccctcggtcaggggctgccccgcctgggctgttcggagcagctcctctgtagggcagggcctgacctcaccccacaccccagtggcttcagctccctgcccagcgcacgggctgcctccatcagggcacttaagtagagtcaaggtttgcgccgactccgtctcccagaaatcaacgtggaccaggcccacttaaaaaatatgcattagtcgaagacagacgtctcgtccataggtccccagactgtttgtccacaacgcagggcttctctttgtgggcctgaaggagcacacgtcaggcaagacacgagggcaacttcagagacactgttcagggccacggagaattctcgaagtctgtgagttgtctccaaaacagcctccaggaaatgcaatcccagagacaccgcaaagctcaaaacagacttttcattcctccccatttccactcccagaaaaagcctgggcccctgaaagagctccaaggtatccccaaagtcccagcccatctttggagggttccagagggctgtccagggttccagaagtcaccctacctcatacaatgctcctcctgggcttcccgcactgggtgaaacccacggctccagaataactgccctttccaacttgcagagcacctcaagaacctaaagatttccccggggagggctccaaaatatagagagtttgcatcgtgaacccccacccctgtaaatcccaggactccagtccccgcaacactccatcttccagagatctccaggggtccagaaataacacctcacagccttccaagcttcccaaggatccggagactccttatctcgcagcgcaaacctcaggcaactacaggtcctccctgcacctttgaggtgcccctccccccactcaaggttccagaaaaatccatgccctcggaaaccccagaatcttactttcccgaggcaccccaggaccccagggtcatcagttcacagggctgttagtgctcccataaaactctagcctcccagagggaccccagcccccaccctcccgcccacgaacccctgcatttccagaatcagccccagggccccaacccccccaagcccccatttcacaacacgctggcgctacaggcgcgtgacttccccttgctttggggcggggggctgagactcctatgtgctccggattggtcaggcacggccttcggccccgcctcctgccaccgcagattggccgctagccctccccgagcgccctgcctccgagggccggcgcaccataaaagaagccgccctagccacgtcccctcgcagttcggcggtcccgcgggtctgtctcttgcttcaacagtgtttggacggaacagatccggggactctcttccagcctccgaccgccctccgatttcctctccgcttgcaacctccgggaccatcttctcggccatctcctgcttctgggacctgccagcaccgtttttgtggttagctccttcttgccaaccaaccatgagctcccagattcgtcagaattattccaccgacgtggaggcagccgtcaacagcctggtcaatttgtacctgcaggcctcctacacctacctctctctggtgagtccccaggacgcccctggccctaatttcctccagctgcgcacctccggccctcactgcacgcgccagccttctttgtgcggtcgggtaaacagagggcggagtccccttggcctcgcctcccgctaaccattgttgcctccatctcttcccgtagggcttctatttcgaccgcgatgatgtggctctggaaggcgtgagccacttcttccgcgaaytggccgaggagaagcgcgagggctacgagcgtctcctgaagatgcaaaaccagcgtggcggccgcgctctcttccaggacatcaaggtaactagtgtgtgggtaatggactacatctcccagcaggccgtgcgcgcgaggagccttgatttgagggcgtaggtgtcgcgtgggcttctgggagattgagttcggtcttgtgagccctcttaaccgctggaaatagaggcgcacctcgtgcagtgcccacaacacgcggcagtccacaccgctgcgtggtcttagggacgtatagctgtaagagctaggacagggtgcggagagtgataaatacaagctgtcacatgtctttgtggcctgggcctctgacccccaacgactcttgggaaatgtaggtttagttctatgtgccgagtgtgtgtattctgagccatttctcccttctatatasaagccagctgaagatgagtggggtaaaaccccagacgccatgaaagctgccatggccctggagaaaaagctgaaccagscccttttggatcttcatgccctgggttctgcccgcacggacccccatgtacgtacccgctgcatccatggctacccaaccatacccctcaagcctctgctccctttgggcaaatttccttcagagcctcatttcacacctgtcacattttaatctgcaactggctgctctctccccctcttttccagggattgggtttctaatttctccctcttctctctcagctctgtgacttcctggagactcacttcctagatgaggaagtgaagcttatcaagaagatgggtgaccacctgaccaacctccacaggctgggtggcccggaggctgggctgggcgagtatctcttcgaaaggctcactytcaagyacgactaagagmctkctgagcmcagcgacttctgaagggccccttgcaaagtaatagggcttctgcctaagcctctccctccagccaataggcagmtttyttaactatcctaacaagccttggaccaaatggaaataaagctttttgatgcagctggtggttttgtgtgtggtgtggaagatgaggtgggatctgttctcataaagcttctggctgggttgggatgccagtgaaagaggagttggccccatctcccattttcttaactgtcctaagacaagaggctatctgggtagtgttgaacctgagggttctctgcttgcctggctgttaactgtccctcccagatggtagagatagactccagggagttgaattaagacctaggttggtatctagaaacagatgttaggtctcagccagaaacagccctatttaacgagtgattatggggccaggtgggtcgctcacctgatgtcaggagttcgagaccagcctgaccaacatgaagaaaccccgtctctactaaaatacaaaattagctgggtgtggtggctcatacctgtaatcccagctagtcaggaggttgaggtaggagaatcgcttgaatctgggaggcggaggttgcagtgagctgagatggcgtcattgcactccagcctgggcaaaaagagtggaactcccatctcaaacaaaaaacatgtctgcctcacggaagttgcggtgagctgagatggcgccactgtgctccagcttgggcaacagagtaagactctgtctcaaaaaagaaaaaagcctcaattctgggaggcagttggaattattaggccctttatatgggcacattgacgctattgctatgcaacttgcatggcaaccggggggctcactgaggtctttgctccagagtttaagagattatggcccgagcttgagtgatcccaatgtgaggcgcacactgagaggaactggccagtggagctgagcagccaggaacacgtgatgcccaagcaatgctggacaaggggtttagggttcatcacagaaatgggatgtgaaaccttgggccggattctccaaatgggaactgaagaagcttaaaacaggccttaaaaagcacttgctgtgtccaagctgcaaaactgctgtgtcagctctgactcttccccttctccttcccctgggtctggggcagggtggttcaagcctgtaatcccagcactttgggaggccaaggcaggacgatcacttgagcccaggaggttgagaccagcctaagcaacatagggagaccccccaagtctctctagaataagaggatgagctcagaccagggaaggggtggcactggggggacgtcacagccaggcccaccaagtgtcatgtctgaccacacctgggattcttaaatatagatgtatttttttcatctcatctccggacacactccaatcacacccctcctgccctcccctctcaactgcaaaccaagcggtgcagacacagcacagcacacatgaggggccctccctttcaccaaagctgaaggcagggcacagtttggggatggaagagcctcgaggtaaatgtgggggttctagaacccagtgacctcagttctggatcatgggaaagggatcagtatgcagtaacgtggtaaggttccagatctagaagccaggacctagaacctagtggtttcacagtgggcagagcagttgggaataagccaggttaggggtgggggaagacagccagctctgtcctctgcaggcggattccctggagggagatctcagatttagaaaggaagagtaggatctggtccagaaagggccagaaagacaggaaggcatctggactgagactgtgtgtcctccagaaggaatgagcagccaagtggttctaccacctcttgcttggccaaagtgtaggggatgacaggagccggatggagggatcctccaggcagagcctggctctgacatgccagggagggctagaacatccctcccagagccccacttctggagttgaaatggaggaccatctgctctcagttaccttcaaactctgaaagtgccccggctctggacttgatcgccccattcgcagggacaccacgtggtttccagaacttggtggcccgcatgccgggcctgagcgtggcctgctctgtatgctgtagaatttgtaagccacacggggggctctaaaagccccagacctgaaagcaccatgccaggtttcctaaaacctctggcaccaccgcagagtaatggcagattcctggcctctgggaagcggtccaggcccaggggactccagggcgctgattatgcatattctggagccagagaaaggcacggctttgtggattctggagtgcaggaacttggaaactggagctggagggggtggagtgtttggcggactgggtgggggcactgcggggccacacccagtgcagatctggagcgggggtttaggagcagcacccctctgcatcctctctctggagcagagaggcaggacaggcggggagtgtggtggggcggacttagttacgctcctcgcccagggagctggtggggctgaggggctcgctcggggtgctgagtgagctggaggtggccgtgtccacagagttgcgcttgctgccgctggtggaggaggtgcaggacgctcggcgcggccactctggtgcacggatgttgcgccggtccttggcggcctcctcgtcctcatcgtagcgctcgccgtcttcctccagcggcccgttccggggatcctcctcgtcctcactctggtgcgggctggagtgtcgtgacagcgagggcgacggtggcaccgaggctggccgtgggtagcggtacccctgggcctgcatacggcgatgtgggtgcaaaccagggtgagctgaggacctcacagtcccacccaggcatccagccacctctaggccttcccactccaggagggacccccaccccaccgaagcccagccctttagctcctggctaagcagaaatccagggtccactcaccgcatccgcctcgttgggctcgtaggtgaagtgctctggaaaggccttggacagcgccatgtggcgcgcagacatatagtactaggggaaaggaggagagggggcagaggatgtgagagccaggccccacccccaggcagatgatgggggtcttggccacaccctttatgcagatgagcacactgctgcaccccatacaaataatccatctatctgactccaccccttatgtagataagcagacctgtgaatggacagtttctgagccatacccctcaaacaggggccgaattctcaagtgagtctcctctttggccacacccttatgcaaatgagaacgcctgaccaatgttctttttttctttttaaacacggtcttgttctgttactctaggatggagtgcagtgggtttgaacaaggctcactgcagcctcaacctccggggctcaagcgaccctaccacctcagcctccccagtagctgggactacaggcacgcaccatcacgctcggctgatttttttttatttttagtaaaaataaaatgttgcccaggctggtctcttaactcctgagctcatgcgatccttcctgttaggcctcccaaagtgctgggattacaaccatgagccaccatcgcgatcggcctggttcattgcttaaagggacagcaactgttacaagtaggatgagaccctgcaccctgcaccaaagacccctagccaggagctgctgatttgccaggagaggataggaaagtgggggtcctacccggcctaggtatttccagtccagaaggtcggagaggcgctccgtgcggttccgctggatgatacgctgccgccggctctgctgacagaaactgtagaggaaggaggtgagctgcgagcaggaatcatccaggctgcggaaccgccggtcaagaatgtagatacctgtggaggccaggacccaggttcagaaaacatcctggggagatcttcatggtctccaggtctctgtggcaccaggacccctcctctcccagcggcccgagagcccccccatttcctggtgcccctggtctccaagggtgcaagctcctccttcccaggatccaggagtcactgttctcaagcccccttccagaatcctcaggggcctgggcgctgaccgtaagctgaggggtctgcgatgtgttcctccatgaagcagccgaagccggagagattggtggagatactggggattcccataaccgtgcactcagctgcgggaaggcaggagagagacccacttagcttccctcatcgcctaccgtcttaatcgcaatagacgcctcaacaccgccctctactggcgcctgtaccaagtgccaggcgctgtgcggagcgtcgctgagcccccacaaccaggctgtgcatttccctatttctcagaggggacgctaagaggctcagaaaagagaattacttgctcttgctccaagatgcgggaaagtccatagttgggagataaggatgctaatttattgagcatcccaatatccatttgacttaactctcacaacctgtaggatcgggccaaggtccatcattctacttaattgtcacaacctgtaagatcctttcttgtgccagtatcttgtacggacttagtctattttgatggggggtaagataaggtctctcattattagtatccctgtgtacagagcatctagtacgtcttgtttaatacctttaacaaccttgagaaatagttcaaggaatgtattataattttttgatggatttttatgcttttttttttttctttcgagacagggtctcactctgtcacccaagctgtagtgcagtggcacaatctcggctcactgcaaccttcacctcccgggttcaagcgattttcgtgccttagccacccgagtagctgggactacaggcacacaccaccatgcccagttaattattgtattttttagtatagacagggtttcaccatgttggccaggcaggtcttgaactcctgacctcaggtgatccatccgtcttggcttcccaaagtggtcaaattataggtgtgagccactgcgcctggcccaatgctttttttttttttttctcgagacaaggtctcactttatcacccaacctggaggacagtggcttgatcatagctcactgcagccttgacctcctaggctcaagcaatcctcccacctcagccacccaagaggctgggactacgagcacacaacactacgcatggctaattaaaaataaaaaaaaaaaaggccgggcacggtggctcatgtctgtaatcccagcactttgggaggccaaggcgggtggatcacgaggtcaagaagagaaaaaaaaaaaaaccatcctggccaacatggtgaaaccctgtgtctaataaaaatacaaaaattagctgggtgtggtggcaggcgcctatagtcccagctactctggaggctgaggcaggagaatcacttgaacccgggaggcggttgcagtgagccaagactgtgccactgcactccagcctggcaatagagcaagactctgtctcaaaaaaaaaaaaaaatcttttatagagacagggtctcaccatgttgtccaggctggtcttgaactcctgagctcaagctatcctcccacctcagccttccaagatgctaggattataggtgtgagccactgcccctgacctataattattattattattattttagacagggtctgactctgtcgcccaggctggagtgcagtggcgcgatctcagctcactgcaatctctgcctctggggttcaaacgattctcccacctcaacttcccgaagggctgggattacaggtgcctgccaccacccccagctaatttttgtatttttagtagagatagggtttcaccatgttggccaggctggtctcaaactcatgtcctcaagtgatcctcccacctcggcctcccaaagtgtggggattataggcgtgagccaccatgcctggcctgatctataattcttatgtaagttttcctaaaaacatctgtaaactgcaaaaataggcactaaatataatacatctgtcaggcatggtgggatgcacctataatga

SEQ ID NO: 98109 - DNA, 43537 bp, Homo sapiens
ggtctgactcagcttctcccaaggctgcttctgaatcatcttccttatcctcactatccacatcctcatcttcctcctcctccgtgtcctctcctggccgatacacccaggccttcaagaaagcacttgcagggggtgtggaagcagaagtctcagcttctctttcatcctcggctgatcctgtatcactgtcctcatcttcctcctcctctgtgtcctctcctggctgatagacccaggacttcaagaagacacctgtagcaggagtggaagaggaagcctcagcttctccctcttcctcatctgatccagagtcactgtcctcatcttcttcctcatcttcctcttcctctgtgtcctctcctggccaatacacccaggccttcaggaaggcacttggtggggggatgcagggaggacactcagcttctccatccttctcagctgcccccaaagccttgacctcaccctcctcttcatcactgggttggcaccaccaggacttgagctggggcctctgggctggggctgaggattgcggccctggggcagcttctcctttcccagtttctttgtgtgccttttcctccttctcctcggacgcctctcctgaacgatactcccaggacctggggtcggagcctgaagatcggggggacacggaggtcttcctggctcctttacttctttctgttcttttatcctccgtggcttgattctcttcctcccctgggcaagacacccaagtgctgggcttggatcctggagacaaggcagaagtagaggttctgtgagcttctttctttacagcttcttcatcgtcctcctcctccacggctggacaacactcccggtgtgatggtggataagagaacttgttaactccctcctcttcagcaactccctcttcctcggctttctcctcccctgggttcttatcagaaccttgcagtgtccttatcagaaggctgggagacaggggagcacgctggccatctgcaaattgacttccctgccctctagggacactggttgcctctcgctcaccatacatgccatcatcatcatccaaaagtccccaggcttcaggaagggaactgctggttttcagccccagtgtttctctgtcctctccagggcctccactgtcttcagcctcctcttcagggcgtctgccccaaggggtatgggggattgccagaggagtcctagcttctccctccaggccagcttctaccagagctgctccttttactgcttccaccagccagggctctagaggtcccaggcccctcaggcggctccaggcgcggctgaggaggcccatcactggggacaggaggaagaaagggtgggcatccctccacggggtagcctgatggggtgcttggcctggggccatgtgtctgggctggaaaagggggagaaaaaaataaagtttaggggccatttagaggatggcatccgggcgtgactatgagtcatagcaacggaaatagtaacacaactattgtaaatagcaacgcgagagtcccaaattcctttctgatctcggccacgcccatctctgtcccttggctctgttcttatctctcaatagccaggagtctgagcccctagttctgccttagatccaagggtccaagcccccagccctctctttcttcagacgcagaactcccagtcccaagaaccaagaacaaaagtctttacttgcttcccttggcgacaaagtcatagtccctagctctctcattctgctgaagattgacaaatcaaaccctcacaccctcctccctcgcagactgaaacattctgacccgaccccctacttggcagatgattccttcacgggggacccaagaatctggcttccagatccctcctccctcaggctcaggactccaggctcccaaccccttctcctttctaaatccgggcccccagccccgtggggacccaggcgttccgaccccttactcaccggctgggagctgcgcgtcaccccgggggcaggagcgccggttcggtctgccagaagcgatcacaggtccggacggttagggaggccagcgcgttcatctcaccctcaggcgtcgggctccgagtaactcagagtatctccggctgcctcaagtgccgtggcgacaagcgggcgcggggtcgtgcagcgtcttgcataagatcaacaactgggatgggaaccgataagagcaacgaacacaatggccactaggcttttatagcctaccgcgcccggcgtgctgacgtcacgaagagaggcggggtttcgagaccgcaacccgaagggtgggaagtggaagtaagacaggacttctcgcggagattccagcttttgcaacgtcacggcggagtttccgagcgtgaccacgcccctccaacaaacgaactgtcaatcaaatgcgtggccctgcttcaacagcgagccagttctctctcagctcagggtcaatgccttcccaccccaatttatttatttatttagttagttattttgaggcggagttttgctcttgttgctcaggctggaatgcaaaggggcgatctcggctcaccgcaacctccgccttcggggttcaagcgattctcctgcctcagcatcccgagtatctgggattgcaggcatgtgccgccacgcccggctaattttgtatttgtttagtagagacgtagtttctccatgttggtcaggctggtctggaactcccgacgtcaggggatcctcccgccttggcctcccaaagtgctgggattgcaggcatgtgccgccacgcccggctaattttgtatttgtttagtagagacgtagtttctccatgttggtcaggctggtctggaactcccgacgtcaggggatcctcccgccttggcctcccaaagtgctgggattacaggcgtgagtcaccgcgcccggcctatttatttatttatttattcattatttatttttctgagacgggatttcaccatgtttgctaggctggtctcgaactcctgacctcaggtgttctgcctgccttggcctcccaaagtgctgggattgcaggcgtgagccaccactccaggcctatttatttatttgttattttttatttttttatttttttttgagatggagtctcgctctgtcaccgaggctggagtgcaatggcgtgatctcggctcactgcaacctccatcttccgggttcaagcgattctccctcttcagcctccgagtagctgggattacaggcacgcactaccacactcagctaattttttgtatttttagtagagacagtgtttcgccatgttgcccaggctgttctcgaactcctgagctcaggcagtctgcctgcctcggcttcccaaagtgttaggattataggcgtgagctactgcacccagcctatttattttttgagtaggcgtctcactctgtcgcccaggctggagttcagtggcgccatctcggttcactgcaacctccacctcctgggttccagcgattctcctgcctgagcctctggagtagctgggattacaggcatgtgccacaatgcctgggtaatttttgtatttttagtagagacagtgtttcgccatgttgaccaggcaggtctttttttttttttttttttttgagacggagtcttgctctgtcgcccaggctggagtgcagtggcacgatcttggctcactgcaagctcctcctccctggttctcgccattctcctgcctcagcctccctagtagctgggactacaggtgcccaccaccacgcccggctaattttttttgtattcttagtagagacggggtttttcaccgtgttaaccaggatggtctcgatctcctgaccttgtgatccacccgcctcggcctcccaaagtgctgggattacaggtgtgagccaccgcacccggccgaccaggctggtcttgaactcctgacctcaggtgatctgcccgccttggcttcccaaagtgctggaattacagttgtgatccactgtgcctggcctcctaccccaatttagcccacaggccccagcctagagtctcccattttcttttttttttcttttctttcttttttctttttctttctttttttttttttttttttgagacggtgtctcactctgtcacccaggctggagtgcaatggcatgatcttggctcactgcaacctccgcctcccgggttcaagcaattctcctgcctcagcctcctgagtagttgggagtacaggagcttgccaccacgcctggctagagtctcctattttcacatgtggttggtttcctccccgagtgcgagggtgtcattgttcccatttcacagatggggaaacaggcttggaaatgaagccacttgaccaagatagtcacagcagggtccagattccttgcaaatgagaatgaggatgtaagcactatgagatcaggcactttgctgggctcaatgcttttcaaaaaaaagtaattaggctgagcgcggtggctcacgcctgtaatcctagcactttgggacgctgaggcaggtggatcacgaggtcaggagatcaagaccatcctggctaacacggtgaaaccccgcctccactaaaaatacaaaataaattagccgggcgtggtggtgggcacctgtagtcccagctactcgggaggctgaggcaggagaatggcgtgaacctgggaggcagagcttgcagtgagctgagatcgtgccactgtactccagcctgggcgacagagcgagactccgtctcaaaaaaataataataataattaatttaggccgggtgcagtggcatgtgcctgtagttccagctactcaggaggctgagtcaggagaatcgcttgaacccgggaggcggaggttgcagtgagccgagatcacgccactgcactccagcctggcgacagagcaaaacaccgcctcaaaaaaaaaaaaaaaagaaattcattttctaaatagagacaaggtctcgctatgatgcccaggctggtgttgaactcctggtctcaagcgatcctcctgccttggcctcccaaagtgctgggattacaggcgtgagccattgcacccagccagggctcactgctttcttctcagtggctgcaacagacagtgcctgcacacagtaggtgctcaacaggtgcatggtgaatggcagttaaaccgaaagctcagattccttcccggtcacaggcacaaggctccactcctgggtgtcatctgcttcagacttaggcagtagctctgcccccacaagccgcgattctgcctgggtggcactctttgtgcgggtgggggcgcttctgctacaagttccaggccctgggtgacagttccagccccccgctctcctcccctgcctacggatgcataatcttgttcctcaaaatataccaaggaatcatgtctctctcctgagggagttgtcctcagtctagaagagaattctcacctggatctgaggtggaggtttggaactctccatttcaccctgccctactgggaccatccccttttctccctaggggacctggacaaaccgtccctggccccttccaagcacagccatgtttccagacccccagctctttcacgactcaggagtcctgatcctagctcagaccttctcgggcacccaggagtctggatccctaacccattccctccagggctttggaaatttgagtccccaccccttgcaggacacaagcctcctccgtttaggacaccagtggctcaggcccccaaccacagcagcaaacccacgggggccctggagtgcaggcctcaagtccaactctccaaacactgagaagtcccaaccttggtccttaggggacctgggaattggggggcccaagcccctcccttcagctatgggggcagctgagccagaggtcaggctgtagtggggaggccagaaggggcggggacagccgggattgggaggggagaacagcagcgtgggcggctggcagaggcagggaaagaccagcagagaggaaagagaaactgggagagggaggaagggagaaagtgagaagggaaatcggaaagagaaaagggaggaaacggcagagccagagagaaagaggaagagactgagtgtgaaggagagaggacacaggggatgactgagagacagagagagagagagagagagaatgagacagagacttaaggaagagaccctgtgagtctgacaataaaagatttggacagaaacagaaagattggagagagagagagagggagagaatgagtgagagagagactggaagagacagagatcagagggagacacagaaagtgagagtggggagagaggtagtgtaaaaggaagagagagagagagagaccgtaagagacrggagacaaagagacaaaaagtgtgagtgagcaggtgaggagagagattgagaactatgagagacagcagctaagagacaaaggaggcgggagactgcctaggtgccgcagcacccacaccgtcctcttgcccccccgtcactgggaccccagagctgggtaagttccctggctgggctgggaggggctctctgggttcacattcctggtgccgcagggcttggcttggggagttggcaggggtggtttgggggtgcrtgtgggagggcgggagacaggtagcctggggcagccggaaggaggcagggaatggggagtccctaagyacagagagggtcaaattcctggcctgagtgcagtgggcaggaataaagaagcccctattctctggcctgggctgcagacagctgccccctcccgcagctgccagggccgcctacctctcttggcaccactcttggtatgtggtcacgggccatggcctcccccagccccccaagtcccgaaacaacaggctctttctctgcagcctcctccgacctccaagcccctgaccccatctctgtctcacacccgtcactgcagagacacagcccctttctttctctcccccagcccttgatggaggggagccgacctcgcagcagcctgagcctggccagcagcgcctccaccatctmctcgctcagcagcctgagccccaaggtttgagcttcctggcggggatggggaggaaggtggggctctgggccgcccatccttctgtttccccaaggactctggttgttaaggacaaagatccttagcaacggggtctgccagacatagtaaggtcccaaattgcctacacrccgcagctaggaattcagaggcactcccagctctgtccmcaccctttgtattttcctaattctaaaccagagtaacaacctcccttgaccctggttgctaagataaagccgctccccagccatgaggcccctcgagttctgagaagtartggctgctcttgattagtgccagaacttgctgtcctatctctcgccatccaatctacccactaatgaaatcctataaggagagacccttctctgacaataagacccaaggggcctccagatacttgcatcccaaatcggcatcccagccaaaagcttagggagacactcatttctttttcctcctgccgttccacacatattgtttctcaagttcagagcccagagatctgatctcagccttggtcagtaccaccgcttccaaggaagggcatattgtcgggacctggctaaggatgcctgagatatctgtgggcatcaggagatgaggctccatccgggcaggatggagggatttgaggcttcctctccttgtacttggttgctaaggggtgtgaccgcagggcaccagggcatcctttgattcactggagactcagcgtgagagttccccctgattatggggccctcccagcccatagtcccagttcagatcccaaaggacctactacagctctggctctggtggccaagggcatctgcttcttggcagtggaygcttgatccccaaattgcttccctacagcctcttccttgcctctgaacacctccctctgcccatcaaaaaaagagtctcggcccggcgcagtggctcacgcctataatcccagcactttaagaggctgaggcgggtggatcacctgaggtcaggagttcaagagcagcctgactgacatggcgaaaccgcgtctctgctaaaaatacaaaaattagccaggcgtggtggcacgtgcctgcaatctcagctactcaggaggctgaggcaggagaatcacttgaacccgagaggcaggggttgcagtgagccaagatggtgccagtgtgctccagcctgggggacagagcgagactctgtctcaaaagaaaaagaaaaaaagagtctctcccagcctgggcaacaaagtgagacccccgtcccctacaaaaagtaaaaaaattagctgggcatggtgggacatgcctgtggtcccagctacatgggaggctgaggctggaggatcacctgagtccaggaggtaaaggctgcagtgtttaggctactgcactccaaagagcctgtcaaaaaaaaaagagtctcttaactctgcaataagaacacctcccaattctgatctccaacttcagcccccaccttgacccttttctttctttctttttttttttttctttgagacggagtctcactctgtctcccgggctggagtgcagtggtgcgatctcggctcactgcaagctcctcctcccgggttctcgccattctcctgcctcagcctcccgagtagctgggactacaggcgcccgccaccacgcccggctaattttttgtatttttagtagagacggggtttcaccgtgttagccaggatggtctcgatctcctgacctcgtgatccacccgtctcagcctccgaaagtgctgggattacaggtgtgagccactgcgcccggctggtccttgacccatttctcagggcagccaagcgagagcctacggttgcctgtgtccaccctcaccccctcccaggaccatcctaggctctccctgttcacttctgtccccttctctcctcagaagcccacccgggcagtaaacaagrtccacgcctttgggaagagaggcaatgcgctcaggagggatcccaaccttcccgtgcacatccgaggctggcttcataagcaggtggggtcagtaggagaaggaaaaggacactgaagtctgtgccccggctgtcctctgtctctctccttgcaagtccccaaataggctttctttttcttgctatcactgcccctccccttagtccgtcattgtttgtttgtttgtttatttatttatttttaagacagagtctctttctgtcgcccaggctggagggcagtggtatgatctcggctcaatgcaacctctggcctccagttcaagcaattctcgtgcctcagcctcccgagtagctgggcttacaggcatgcaccatcatgcctagctaatatttgtatttttagtagagatggggttttatcatgttggccagggyggtctgaaactcccgacctcaagtgatccacccgcctcggctccctaaaatgctgggattacaggcgtgagccaccgtgcctggcccattcattcattctttcttgactacttcttgaacacttacagtgttcccaatcccagggcacacaccatgcaaataacacaaaagtatttatattacattccagattgggtggagcatgggtggataataaattagtaaataaataaatggacttggtcatttcagatcgcaggatgggctatgaagaagtaacatagggtccaggttcagtggtgtaaccccagcattttgggaggccaagacgggaagatcgcttgagcttaggaattctagaccagcctgggcaacatgaagaaacctcatctcaacaacaaatacacacacacacaaaacctagctgagcgtggtggtgtgcgcctatagtcccagctactcgggaggctaaggcaggaggattgctgaagcccaggaggctgaggctgcagtgaactgtgttcatgtcactgcacaccagcctgggtgacagagtgagaccctgtctcaaaaacaaaaacaaaaaaacggaatatgatgtgcttgaacgtggctgagagaggagaacttcaatttgacatttggtcagggaaaattatctctgargtgacatttgagctggctgagcatagtgggtcatgccggtaattcaaacgctttgggaggctgaggygggcggatcacctgaggtcaggagttcaagaccagcctggtcaacatggcgaaaccctggctctactaaaaaatacaaaaattagccgggccagctygggggtgcctgtaatcccaactacttgggaggctgagacaaggaaaatttgaatctgggaggtggaggttgcagtgagccgaggttgcgccattgcactccagcctggatgatggagtgagactccatgtcaaaaaaaaaaaaaagacctggaggcagatcgcatccaaaaggaaaaggtctgcagcaggcaaaaccttggtgtcaagtgaggccaggggaagaagccaggaggagcagcagagcagtggttctcaaagtgtggtcccagaccagcagcatcagcgtcatctggggacttgctagaaaggcaaatgatgaggtaccatcatagatttgccaaatcaggaactctggggatggggccccagaatctgtgttttaacacaccttcctggtgattcttatgcaccttcaaactcaaaactctctgcaaagcagtacatgggctgggcacgatggctgacgcctgtaatcccagcacttcgggaggtcgaggcaggtggatcacaaggtcaagagttcgagacaagcctggccaatatggtgaaaccccatctctactaaaaatacaaaaattaggctgggcgtggtggctcactcctgtaatctcagcactttgggaggccraggtgggcggatcatgaggtcaggagatcgagaccatcctggctaacacggtgaacccccatctctactaaaaaatacaaaaaaaaaaaaattagccgggcgtggtggtggtcgcctgcagtcccagctacttgggaggctgaggtaggagaatggcgtgaacccaggaggtggagcttgcagcgagccaagatcatgccactgcactccagcctgggtgacagagcgaagactccgtctcaaaaaaaaaaaaaaacaaaaaacctaaattagcctgcatggtggcaggcacctgtagtcccagctactcaggaggctgagccaggagaatcgcttgaacccgggaggcagagattgcagtcagccgagattgtgccactgcactccagcctgggtgacagagcgagactccatctcaaaacaaaacaaaacaaacaaacaaaaaacagtaagtgatggtaaggaatttgagactgaatttcaagtgttcttaattctctgttttgaaaaggggactcacgtgatctaacttataattttaaaagatcatgtgggcttctatgggaatgggttgaggagaagaggcacacgaggttggagatagttagtggagtagttcaggcagaggcgatgagtagttcaggcaggtggagacgctgcatttgggtcatggctcattgccaccttcctggcctctctgtgtctcaggctccagaataattggactaagtctctgcagctaaagtctgcccatatgtggtccatgtctcatccaracctccctaaaacttctcaatctccagcggatagacgagaaaacatgaaggtggattctaggcggaaatgacttgttccagagcatagtttgaaagtgggggctgggtgcggtggctcacgcctgtaatcccagcactttgggaggccgaggcaggcagatcacaaggtcaggagatcgagaccatcctggctaacacggtgaaaccccgtctctactaaaaatacaaaaacaaaattagccgggtgtggtggcggggggcctgtagtcccagctactcgggaggctggggcaggagaatggcgtgaacccgggaggcggagcttgcagtgagctgagatcgtgccactgcactccagcctgggcaacagagcgagagtccatctcaaaaaacaaaaaaagaaagtgggggaggccagacgcagtggctcacgcctgtaaccccagcactttgggaggccgaggtgggtagatcatttgaggtcaggagttcaagaccagcctggccaacatagtgaaaccctgtctctactaaaaatacaaaaattagctgggtgtggtggtgcgtgcctgtaatcccagytactcgggaggctgaggcaggagaatcatttgaacctgggaggcagaggttgccgtgagccgagatcatgccactgctctccagcttaagctacagagcaagactctgtcaaaaaaaaaaaaaaaagagagagaaaagaaaagaagtagggctactattctattctatcatgttcagagggcttccagctctccttcttatccactccattgccccaaacatgtgtctctgtctcttctgtctctctgggtctttctcctgtgcctccaccccactcccaggctcaagtgatcctccctcctcagcctccggagtagctggggctacaggcacgcgccaccacacctggctaatttttttttttagtagtagagatggggtttcgccatgttacccaagctggtctcaaactcctggaattgagtgatccacctgccttggcctctctaagtgctgggattacaggcgtgagccattgtgctcggcctcaccccactctcttgatccctactttatgtctctgttctcctctctccaagtttctttctctctctggctctctgtccccatcgtcactgccttcatcccctttttctgtttccctttactcaggcccctcctcccatctctctccccaggacagctcggggctccgtctctggaaacgccgctggttcgtcctctccggccattgcctcttttattacaagggtcagtggctggctggctggcttggggtgggagggccccyccgcycagtctgcccttctctctagcatcttggccttctgatccctgtgtgatccttgaccccagcccctctttgcagacagccgygaggagagtgtcctaggcagcgtcctgctccccagctacaatattagaccagatgggccgggagccccccgagggcggcgcttcaccttcaccgtgagtccatccatscatgttgtgcaccaggcratgggaactggagatgagggcgggtagatatctgtcgaggaaactccaagtcctaacaagcactggaatatccattactggagataaaaggtcttgacaagcgtcaattgcatcctcgttttgttttgttttggtttgtttttttgttttgttgttttttgagacagagtctcwctctgtcacccaggctggagtgcagtggtgygatctcggctcactgcaacctccgcctcctgggttcaacggattctcctgcctcagcctctggagtagctgggattacaggcgcacgccaccacgcctggctaattttttgtatttttagtagagatggggtttcgccatgttggccaggctggtctcaaactcctggcctcaggtgatccgcctacctcagcctcccaaagtgctgggattacaggcatgagccaccgcgtctgtccagtcctttcctttcctttcctttccattttcctttcctttcctttcctttttcctttcctttcctttttttytctctctctctctttctttctttctctttctctctttctttctctcccttcccttccctctttccctctttcctttctttcttgacggtcttgctctgtcacccaggctggcgtgcagcgacgcaaagtgcagtcttcctgcctcagtctcccyggtagctgggactacaggtgcgctccaccacgtccggctaattttttgatttttttgtagagacgggggcggaaggaggtggaggggggtgtctcattatgttgcctaggctggtctcaagccatcctcccgcatcggcctcccaaagcactgggtttactggaatgagtcaccggtccggcctgtcctcctttttacaaggcccgggagtccggattccaagccttctcttcccgcaggcagagcacccgggcatgaggacctacgttttggccgctgacacsttagaagacctgcggggctggctacgggcgctgggccgggcctcccgtgcggagggggacgactagtgagtagaggtccaagccatgctcctgaccctccaccctgagtcagtctcgtcatcccaactcctcccctttggggccctgcccccttgartgtccaatcaccagtcttctagctaaggcgcctcgtcttctaggccccacctccagggaacttttccaatcagcaaaagtctttctccyttaagttccgcccaccaccttgtccgtccccgcccccaagctgacccttcagtcacgcactcagctctgctccaggaatgatcaatattgcacactctctgattggctccttctgaagtcccctgagctgccacctaaacaatgccaggtaaaagatagtatcagattttaaaaaaatgtcagactatctcttaggctctgacatggcctgcgccaattatcaggctggaaactggactacctggctgagtctatcccatattccggggcattgggtccagcaacctggatagacgttgtggcctggcgcacaggtcagtttcacattggaggcctcagtttccccttctgaagaagggggacgatgatttatagtgcacaactttccttttttgggtgcatccttgtgttctcacctgtgacaagagaatagkgctgttatgaagttcgaaggagtgatatcttgtctatgtccactcgctagtgggcaacccaggtcacctgcacgaccccagcccggggagggccccggcggccccggtggtcccccggaggtgagcagaggggaagaggggcgcatctcagaatcaccggaagtgactcgactctccagaggtcgtggtagacccaggctgctcactcccagccccacarccgacctccactctggactccagatgcggagggcgaggagccccgagtgagtagggaggacatggttgtgggcgtggcctaagagaagggcagggccggaaactggttgggggcgggccttagcgctttctgcttgagtgtgtgtgacttgctggggctcccgtgggggtcacagcctgtcggggagaagactggaggggaagatgccacaaagcggacattactgaggatttggacagtagaggaggattctaacccagtgggacagtaagacacagtgaagtgagacatgtccttgaggctgacttgatgggtaaggaggtggatggagagggctctagttgactcagttccccgattctctccttcccacagcctgttcacccccctctctcgccctccctcgcctctgagcctcccccgtccccgttctgcccctgcgcggcgaccccctgccccctcaggagacacagcaccccctgcccgacctcacaccccgttgagtcgcattgatgtccgacctcctctggattggggcccccaacgccagaccctctcccgaccccctactccccgccgaggacctccctctgaggctgggggaggaaagccccccaggagtccccagcactggagtcaggagcccagaacacaggtgagcagagaggtgagaaggaggggactacgtttcccatcaggcctcagggctgtctttccgtattctcaaggccattgctccctgggtgtcatgggtattgtagtccataatgatctcagctgggctcaggtgagagagagcttgaacctatcaggtgtccagctcctctcaggtgtctgggctgtctttctaggctggtcttcggccattgctttttttttttttttttgagactgaggtcttgctctgtcgccaaggttagagggcagtggcacgatctcggctcactacaacctctgtctcccgggttcaagcgattctcctgcctcagcctcccgagtarctaggattacaggcacctgccaccacgtccggctgatttttatatttttggtagagatgaggtttcaccatgttgaccaagctggtctcgaactcctgaccagctgacaggtgatctgcccatctcagcctcccaaagtgctgggattacaggcgtgagccaccgcgcctggcccagccattgctctttaagcatcatggggattgtagtcctggatactctgtgccaagacagtgcggtgagaggtttgcatctcccttgtgtccccagttcaccttgcaagttggttgcctgctgttttgtctgagcatcatgggacggtagctcagaatatccacagctgactgcaagtctgagaatgagagtagcaaattccatcatcttgtggggctgttttgccaggctggtgcatttattatcaccctctgtgtccccacagtggcacacagctggagagcaggtagttgaggaagttgagagggcccagttctgaacctcaaaatatctcctaaagcacttcaattatggacatgcccactctactatttgtcactaagacatgccagtttctttttttttttaattattattattatttttttattgatcattcttgggtgtttctcgcagagggggatttggcagggtcataggacaatagtggagggaaggtcagcagataaacaagtgaacaaaggtctctggttttcctaggcagaggaccctgcggccttccgcagtgtttgtgtccctgggtacttgagattagggagtggtgatgactcttaacgagcatgctgccttcaagcatctgtttaacaaagcacatcttgcactgcccttaatccatttaaccctgagtggacacagcacatgtttcagagagcacagggttgggggtaaggtcatagatcaacaggatcccaaggcagaagaatttttcttagtacagaacaaaatgaaaagtctcccagacatgccagtttctaaacatctccatttcaacgttcctcccaggcacactctggctcccccacttatctccagctccccccgcggccccctgggacccgggcctccatggttttattggtaggtatcctggagtaccctaaatctaccrgagccccctcccttcctttcttctctatgaggratgtcatctcttggcctagggtgcctagagaactgtagatatttcaaagaccctgggtaggtattagattcatgtggtggctgtaacaaagckcatggccgaaaacaacagaaatggattatcttgcggttctggaggccagaggcctggagtcaagggattggcagggctatacttccactgaargttctaaggargagcttttattgactctctcttagcttctggtggttgccagcaattcctgaggttctgtggttttttttatggccacatctttgcctccatcatcccatgatgatcttcctttgtgtttttgttgctgtccatctcctcctattaggacaccccatgacrtcgtcgtaacttaacttaaatccgcaaaaacctctttctttctttctttctctttctttttcttttcttttctttctttctttcttttttttttttttttttgagacggggtctctctctgtcgcccaggctggagtgcagtggtgcgatctcggctcactgcaagctctgcctcccgggttcatgccattctcctgcctcagcctcctgaatagctgggactacaggcgcccgccaccacgcccggctaatttttttgtatttttttctttgtttttttcttgagacagagtctcgctctgtcgcccaggctggattgcagtggcgcgatctcggttcactgcaaccttcgcctccctggttcaagcaattctcctgcctcaacctcctgaatagctgggattacaggcacgtgccaccatgcctggataatttttgtatttttagtagagacggggtttcaccatgttggtcaggctggtctcgaactcctaacctcgtgatcctcccgcctcggcctcccaaagtgctgggattacaggcgtaagccactgcgcctggcccaacttttttgtatttttagtagagatggggtttcactgtgttagccaggatggtctcgatctcctgaccttgtgatctgcccgcctcggcctcccaaagtgctgggattacaggcgtgagccaccgcgactggccttccttcctttctttctttctttcccccttccccttccccttcccctcccctcctcgttctttcctttcctttcctttttctctctctttctttctttccttctttccttcctttttcttttttttttttgagaaggagtttcactcttgttgcccaggctggagtgcaatggcgtgatctcggctcaccgcaacctcccctcctgggttcaagcgattctcctgcctcagctgcccgagtagctgggattacaggcacccaccaccacgccctgctaattttgtatttttagtaaagacagggtttctccatgttggtcaggctggtcttgaactcccgacctcaggtgatctgcctgcctcggcctcccaaaatgctgggattacaggcatgagccactgcgcctggccacctagctaactttttctactttttgtagagacagggttttgccatgttacccaggctgttttttgtttttttttaaattaaaaaaaattatttattttcttgagacagagtctcactctgtcacccaggctggagtgcagtggtgcaatcatggctcactgcagcctcagtctcctgggcccaagcgatactcccacctcagcctccctagtagctgagactacaggcatgtaccaccatgctcagcttattttatttatttatttatttatttatttatttattwgagacgaaatctcactctgtcacccgggctggagtgcaatggcacgatctcggctcgctgcaacytctgcctcccgggttcaagtgattcttcttcctcagcctcccaagtagctgggattacaggcgcccgtcactacgcctggctaagttttgtatttttagtagagacagggtatcaccatgttggtcaggctggtctcgaactcctgacctcaggtgatccacccgcctcggcctcccaaagtgttgggattacaggcatgagccaccgcacccggccctatttttttatttttattttttttgcagacacaaggtctccctatgttgcccagactggtctttaactcctgggctcaagtgatcttccctctttggcctcccaaagctttgggattacaggagtgagtcactgtgccctgcactttgttttattcttagtcataaataaaatgtctaaatttctccattaattataatatttgccatggctgcttgatcaagagcccattattgatctttctgaagccaagaatgtgsaagttggtctactgaaatttgctaatgcttagaaggaagctgataaggagaggggtcgctaggcttggtggttcatgcctgtaatcccaggacttcaggaggccaaggcaggaggatcatttgagatcaggagttcaagactggtctgggtgacatagtgagaccccagccctgaaaacaaacaaacaaacaaccttagctggcaccggtggctggcatctgttgtcccacctacttgggaggctgaggtgggaggatcctttgagcctaagagttcaaggctgcagtgagccatgatcatgccactgcaccccagcctgggtgacagaccttgactcaaaaaaaaaaaaaaaaaaaaaaaaaaaggccaggcatgatatgatggtgcatgcctataatcccagcactttgggaggccgaggcaggaggattgcttgagcccaggagtttgagatcagcctgggcaacatggcaaaaccccatcgctaccaaaaccaacagcaacaaaaattttaaaactacaaaaattagccgggcatgatgtgtgcgcctgtggtcccagctactcaggagactgaagtgggaggattgcttgagcccaggaggttgagcctgcagcgaaccatgatcgcacgactgcacaccagcttgggtgacagagcaagaccctatctctaaataaataaataaataaatagtgcagtacctatcagtagagacagggcgtggctcagcactgagttacaagaatgaccagcctgtcccctttgacccctgacttttttccttctcttcagccgggtcctcccctggagtcaactttccaccaaagcttggagacagatgtaagttgtcactgatctaatccttgctgagttcccagagttggggagagaatgttctagatgatgggaggagcggcaggggaagagccagatctggaccatcagtagctcccgctctcctttctccagacrctgctgaccaagttgtgcgggcaggaccggcttctgcggaggctgcaggaggagatagaccagaagcaggaggagaaggtgcggggccctgggccaaggacagggcgcctggcctctctgcctgccctgagcccttcctgaatgyggaagtcaggatgctgactggacgtccaggacgtgaaaggacatcttttctttcttcttggggctaggcatggcttctgaagtctaaccaccttctgtcttggtgcaggagcaactagaagcagctctggagttgacccggcaacagctgggccaagccaccagggaggctggggctcccgggagggcytggggtcgccagcgcctcttgcaggaccggctggtcagtgtgagggccaccctctgtcacttgactcaggtgagcacctgggaaggggcctgccctcctaggaggccccaggactatgcaagtcgttacgaaggggacctgccccagagggctcataggaagatcgttcttcagaagtctacactccaaattttattattttttctctctcctcattgtcttgtaaccactctaatttttttttttttgggggggacagagtcttgctctgtcgcccaggctggagtacagtggtgccatctcagctcactgcaacctcagcctcctgagtaactgggattacaggcatgtgccaccacacctggctaatttttgtatttttagtagagatggggttttgccatgttggccaggctggtctcgaactcctaacctcaggtgatcagcctgcctcagcctcccaaagtgctgggattacaggcatgagccactgcgcccggccttaagtaactctgagaattattatatgtgatacgtgaaaatgagtgaatgaatgaatgaatgaatgaatgaadatttaacacttaaggtacttggtacttggtaaagcaatacttaagtgtcagctataattattatctgtaaaatggagacaataatagtaactacctcataggaattaaatgagagttgagaacmatgcctagcacatgatcagtgcccaataagtgttagctgatattatcattgttattgttggtattggcaaggaagtttctgctgccccagggtgagtgggtgctgtggttattttttttgagacggattcttgctctgttgctcaggctggagtgcagcgcctggatccaggctcactgcaacttctgtctccctggttcaagtgatcctcctgcctcagcctcccgaatacctgggattacaggccctcgccaccattcctggctaatttttgtatttttagtagggacggggtttcaccatgttggccagggtggtctcgaactcctgacctcaagtgatccgcccgccttggcctcccaaatagctgggattaaaggcctgaaccaccgtgtctggctgggtgctgtggtcttttaactgtctaatgaaattcattagatctgtagactctgctacctaggagagagcagaagtaatcctggggattcagggaatgctgttatttgtctacactagcagtgtactggaattgcaggttccatacagactttggggttcccagtagtccaagcaaagaggcccatgggaattgtagtccatacgcctgcagggctccagggaccaaactcccttatctcctccttagctgacaaatgatggggtggggaasgatctggtgggagagggacctaacctatgtctccccctttatgcaacctgaggagcgagagagggtttgggacacgtacagtggcctggagcaggagctgggcaccttaagagagacgctggagtacctgctgcaccttggttctccccaggtaaatcgctgcttggagaccccaagacccacccccaactccaagttctgcctggaaatccttttagcatttaatcttcrcccacagaatcgaggccccgcccagttgacccttagcctcctttctgtcctttcaatctaagccccttattttagttaagaccatgccctttggggtttttttttaaattctctcattaaaattttaattaagcttcaattttgaatgccgttttctcgagctgttatctaatttctgctgtaaagttgtttmtttgtttgtttttaagacagtctcactctgtcgcccaggctggagtgcagtagcgcaatcttggcgcactgcaacctctgccttccaggttcaagtgattctcccacctcagcctcccaagtagctaggatttcaggcacatgccaccatgcccagctactttttatatttttagtagagacatgttggtcaggctggtcttgaactcctgacctcaagtgatctgcctgccacggcctcccaaagtgctgggattgcaagcatgagccactgcgccagacctaatttctgctgtaaagttggctataattttacaacatttttttttgagggggagggggacagagttttactcttgttgcccgggctggagtgcaatggcacgatctcagctcaccacaacctctgcctcccgggctcaagcgattcacccacctcagcctcctgagtaactgggattacaggtgcccgccaccacgcccagctaattttgtatttttagtagagacggggtttctctatgttggtcaggctggtcttgaattcccgacctcaggtgatctgcctgcctcggcctcccaaagtgctgggattacaggcgtgagccactgcgcccggcctacaacattctttttaaaaaatgtattgtgggtacatagcagatgaatatatttatgaagtgcataagayattttggtacaggcatgcaatgtataataatcccatcatggaaaatggggtgtccatcccctcaagcatttatcttttgtgttacaaacaatccattatactcttttattttttatttttatttttgagacagtctcgctttattgcccaggctggagtgcagtagcacaatcttggctcactgcaacctccgcctcccaggttcaaacgattctcctccctcagcctcccaagtacctgggattacagatgaccaccaccatgcccggttaatttttctattttcggtagagaggggggtttcaccatgttggtcaggctggtctcgaactcctgacctcaggtgatccacccacctcggcctcccaaagttctgggattaccggtgtgagccactgtgcctggcctactcttttatttttattttatttattttattatattttttgagatagagtctcgttctgttgcccagaccggagtgcaatggtgcaatctcggttcaccgcaacatccgcctcccaggttcaagcaattctcctgcctcagcctcccgagtagctgggattacaggcatgcaccaccatgtctggctaattttgtagttttatgagagacggggtttctccatgttggtccggctggtcttgaactcctgacctcaggtgatccacccgcctcagcttcccaaagtgctgagattacaggcgtgagccaccgcacacagcccttctattttttattttctttttttgtgtgtgtgagacatagtcttgctctgtcgccaggctggagtgcagtggcacaatctcgactcactgcaacctccacctcccaggctcaagcaattctcctgccgcagcttccccagtagctgagactacaggtgtgtgccaccatgcccagctaatttttgtatttttagtagagatggggtttcaccatgttggccaggatggtctagatctcttgacctcatgatcyacccgcctyggcctcccaaagtgctgggattacaggcgtgagtcacggcgcctggccrccctcttatttatttatgagatggagtcttgctctgttgcccaggctggagtgcagtggtgtgatctcggctcactgcaacctctgcctcccgggttcaagtgattctcctgcctcagcctctagctgggactacaggcgtgtgccaccacgcctggctaatttttgtatttttagtagagacggggtttcaccatgttgattagggtggtcttgaactcctgaccttctgatccgcctgcctcggcctcccaaagtgctgggattataggcatgagctactgcgcccggccaatgcctttcgttttaatacctacttcagatccagagctgctctctcccctggttctaaatctctcctcttgttgaagccatgctctcaccagcaaaactccaaccctcagccttttttccatcttgcaagttcatctcttgcatcctgcatcctgacttttgctgttaaatttatcctctggagttccagttctgaacccattcctttagtgcaagctctgctcctaaaatataaacctcattgcttagcctcagacctgctttttcactctaaatctagccatcaagttctaaatcatgtatctttaaaaacattgacacggccgggcgtgttggctcacgcctgtagtcccagcactttgggaggccaaggcaggtggatcacttgaggtcaggagttggagaccaatctgacgaacatggtgaaaccctgtctctactaaaaatagaaaaatttgctgggtgtgctggtgcacgcctgtagtcccagctactcaggaggctgaggcaggagaatcgcttgaacccgggaggcggaggttgcagtgagccgagatcgtgacactgcactccagcctgggtgatagggagagactccatcttaaaaaacaacaacaacaaccccaaaaaacaaaaaaccattgatgcctagttttaaatgcatcttctcactctaagctgctcccactagatctacaatccagacttggcaagaacagacmcatgccagctgcagtggctcacacctgtaatcccagcactttaggaggatgaggcaggtggatcacctgagcccaggagtttgaggctagcctgggcaacatggtgaaactctgtctctactaaaaataaaagtgaaaaaattagctgggcctggttgtgcayrcctgtggtcccagttactcaggaggctgaggtggaaggatcgcttaagcccaagagttygaggatgcagtgagctatgatcaagccattgcacgccagcctgggtgacagagggagggactgtctccaaaaacaaacaaaaagaacagactctcatattcgtatggtcacctatttataatagatgtaacacagtaaaacaacatagaaagaaaagacagttttttctttttcttttttttttttttgagacagtgtctcgctctgttgcacaggctggagtgcagtggcacgatctcagctcactgcaacctccacctcctgggttcaagcaattctcctgcctcagcctcccgagtggctgggatcacaggcatgcaccaccacccccggctaatttttttttgtatttttagtagacacgagggttcaccatgttggccaggctggtcttgaacttctgacctctggtgatccacccgcctcggcttcccaaaatgctgggattacaggtgtgagccaccacgcctggccaaaagacagttttttttttttttttgagacggagtctcgctctgtcgcccaggctggagtgcagtggcgggatctcggctcactgcaagctccgcctcccgggttcacgccattctcctgcctcagcctcccaagtagctgggactacaggtgcccgccactackcccggctaattttttgtatttttagtagagacggggtttcaccgttttagccgggatggtctcgatctcctgacctcgtgatccgcccgcctcggcctcccaaagtgctgggattacaggcgtgagccaccgcgcccagccaagacagtttttttcaattcaactggataaccacatgggaaaaaaaataaatcccaactccataaatatagcccagctgatttcagacctttgcaggggcctattagctgaaaccctcctgcgttttcccacctttaagtaacaaattcctttcctccctgcaggacagagtgtctgctcagcagcagctgtggatggtggaagacacgctggcaggtctgggtggcccccaraaaccgcccccacacactgagcctgactccccatctcccgtgctccagggcgaggagtcctcagagagggaggtaagacrcacataattcctcyccaccccaagcttcatgtcccacctgtccttgactcagtctattccccacccacctctttaattcttccttgatcagctaacccacctggtacaagtgtcctaacctctggaagcctttgttttcttttttttcgggggtttttttgagacgtagtctcactctgtcatccaggctggagtccagtggtgcaatcttggctcactgcaacctccacctcctgggttcaagtggttctcctgcctcagcctccgaagtagctgtgattacaggtgcccacaaccaagcctggctaagttttgtatttttagtagaaacggagtttcaccttgttggccaggctggtcatgtactcctggcctygagtaatccgcctgcctcggcctcccaaagtgttgggattacaggcgtgagccacctcgcccaaccaggatttttttttwaagatgggatctcattctgtcgcccaggctggactgcagtggtgtgatcatggctcactgcagcctcgaattcttgggctcaagcaatcctcctgcttcagcttcctgagtagctgggaccgcaggctcgtgccatcatgcctggctaatttttggttgtttgtttattgtggagatggaacctcactttgctgccaagtctggtcttaaactcctggcttaaaatgatcctccagtctcagtattccaaaacgccaggattacaggagtgaggcaccgcacccagccctaatatgattatatatatawtgcacttagacaccaggcactgttctaagtgccacatatatatggactcaatcctaatatcaaaaagtaaaatgttaatgagccaggcacagtggtgcacacctgtaatcccagctacttgggagactgaggcaggagaatcgcttgaaccagggaggcagaggttgcagtaagctgaaccaagattgcaccactgtactccagcctggctgaaagagcgagactgtgtctcaaataaaataaaatatggctcagagaggtaaagcagcttgccgaaggtcacacagctaataaatggcacagttgggatttgaagccaggacatctggctcctggtttacagtttttttgtttttttggagacagggtcttgctctgtcacccaggctggagtgcagtggtgccatcacagctcactggaacctccatctctggggcttaagtgattctctcacctcagcttcccaagtagctaggactacaggtgtctgccaccatgcccggcgaattctttaacttttttgtagagacggggtctccctatgttgcctaggctggtcttgacctcctggtctcaagtgatcctcccatctcggcctcctaaaatgctgggattacagacgtgaacccactgtgcccagcctaaaacgtttgttttgttttgctttgttttttgagatggagtctctctctgttgctcaggctggagtgcaagtggctcgatcttggctcactgcaagctctacctcccgggttcacaccattctcctgcctcagcctcccgagtagctgggactacaggcacctgccaccacgcccggctaattttttttttgtatttttagtagagacggggtttcaccgttttagccaggatggtctcctgaccttgtgatccgcctgcctcggcctcccaaagtactgggattacaggcatgagccaccgcgcccagccttaaaaagtttttaagggaaggggtcttgctatgttgcccagctggtgtctagctcctggcctcaagtgagcctcctaccttggcctctcaaagggctgagattacaagcacaagcctccatgctcagatctggtttatagtcttttttttttttttttttgaggcagagtcttgctctgccgcccaggctggagtgcagtggtgcgatctcggctcactgcaacctccaactcccgagttcaagcgattcttctgcctcagcctcctaagtagctgggattacaggcgcctgccaccacgcccagctaatttttgtatttttagtagagacgggttttcactacgttggactaagctggtctggaactcctcaggtggtctgcctgcctcggcctcccaaagcgctgggattacaggtgtgagccactgcgcccggcctggtttatggtctgaatcctattcagactgtattccaatgcctaaatgcttgcaacatggtaataataataattattataatgatcatcattatyccccttttctaatccccgcagagcctgccagagtccttggaactgagctcccctaggtcccccgagactgactgggggcggcctcctggaggcgacaaagacctcgccagccctcacttaggtgagcatcctggttgggtgggactttacggaaattcccgtcctcaccaagtcccgttctgtctttccaggtcttgggtctccgagggtctcccgggcttccagccctgagggtcgccacctcccttccccacagctaggaaccaaggtaagctgtaggtccatcctgtaatccttgcatctgaccatcagggacccccacacttctgggaaacagctaggagtagagcgtyctaaggccatactcagagcagagagagcactgcttgttaagagcattgagattgatttttgtctctgtcgcttctaagctgtgtgactttgggtcagttattaaacctctctgtgccttcattttttcttctctaaaatggggctaatagcagaacctaccacctagagctgacatcaagatgaaaactagatgaatgaggccaggcgcggtggctcacgcctgtaatcccagcactttgtcaggagttccagaccakcctggctaacatggtgaaaccccgtctctactaaaagtacaaaaattagccaggcgtggtggtgggcgcctgtaatcccagccactcgggaggctgaggcaggagaatcgcttgaactcgggaggcagaggttgcagtgagctgagatcacaccattgcactccagcttgtgcgacaagagcaaaaatctgtctcaaaaaaaaaaaaaaaaaaaaaaaaaaagacaccctgagtggagcagaatgctgatctcatgtggccctggagttcagaaactggttgacttctagtggcaggaatgtttaggaattggttgactttaagctgtggaagctctgtgctctgtgtctgttgctgattggctggttttcagaagcatggagctatcaatgattggctgattttcagaagtacggatccatcactgattggccagccctcagaagcatgtgaccatcactgattggctgattttcagaagcttggctccatcactgattggctggctttcagaagtctttggggtacctgttgggattacttgatcaaatagatttaaaagcacttcttggggcygggaaccgtggctcgtacctgtaatcccagcactttgggaggccgaggcaggcagatcacttgaggtcaggagtttgagaccagattgaccaacatggtgaaaaccctgtctctacaaaaatacaaaaattatccgagcgtgatggcgggtgcctgtaatcccagctacttgggaggctgaggcaggagaatcgcttgaacccaggaggcagaggtggcaaagacccaagattgcaccgttgcactccagcctgggcaacagagcgagactctgtctcgaaaataataataataataataataataataataataataataataataataaaataaataaggcatttcttggccagtggtattggctcatgcctgtaatcccaacactttgagaggccaaggtaggtggatcagttgagtccaggcgttcaagagcagcctggctaacgtagcaagacccatctctacaaaaaaataataaaaagttagctgtggccaggtgcagtggctcacacctgtaatcccagcactttgggatgccgaggcgggtggatcacctgaggtcaggagttcaagagcaccctggccaacgtggcaaaaacccatctctactaaaaatacaaaaattagccgggtgtagcagcacgcacctgtaatcccagctacttaggaggctgagacaggagaatcgcttgaacctgggtggctgagattgcagtgagctgatactgcgccactgcactccagcctgggtgacagagcaagactccatctcaaaaaataaaaaaataaaaaataaaaagttagctgtgcgtggtggtgcccacctgtggtcccagctgcttgggaggttgagacgtgaggattgcttgagtccaggaggtcaagcctgcactgagccatgattgcaccactgcactccatcctgggcaacagagggaaaccatgtctttaaaaaaaaaaaagaaaaaagaccgcgtgcggtggctaacgcctgtaatcccagcactttgggaggccaaggtaggcggatcacaaggtcaggagttcgaaaccagcctgaccaacatagtgtaaccccgtctctactaaaaatacaaaaaaattagccaggcgtggtggcacatgcctgtaatcccagctactcgggaggctgaggcaggagaatcgcttgaacctgggaggcagaggttgcagtgagccaagatcgtgccattgcactccagcctgggcaataagagtgaaactccatctcaaaaataaaataaaataaaataaaatawtttaaaaaaaagaaggcatttcttgtgcttacttgttatcatggatacaaaagcaatcgagcctttcctaggaagagaggagaggcactttttgattctcagtggtgtgtcatgggcatggatgattggagcctgctgggaacatcacttatcttgggacatgctcctccctcaccccaaccgggtggtttcaggggctgccaaggtccagagcacaggggtggtctagtgagttccagggatttcagggtttagcaaagaaaaagctatgaccaccagatggcagtagcacacaggagctttatttggtggacactgacagatttgtctatgggggagtcacacccagtgtgagaccctccagaggttactgtgtgagggtgaggaccactgcacaggaagggaggaaggcaagggagctcccaagagaaagggactggagaaggggcttacttctgggtgatgccagccaccagcatgtggaggtttctctggatcagagaggtccaaagagcagcaggggcttggggctcatcttatctatgggtagcagatgttgggcacagtttcagggtatacaaagcagscagactgcatagctaaaaatacctgcttattaagactatgtttaaaacaattggatgtgtagaaatctgagtgtgctgctaccaagcttttaggccaatggtctggcctgctgtgaagaaattaacaacattggctgggcgcggtggctcacgcctgtaatcccagcactttgggaggccgaggcaggtggatcacgagatcaggagttcaagaccagcctggccaagatggtgaaaccctgtctgtactaaaaatacaaaaaaattagctgggcgtggtggcgggtgccacctactcaatcccagctacttgagaggccgaggcagagaagtgcttgaacccaggaggcggaggttgcagtgagcagagattgcgccactgcactccagcctaggtgacaaagcgagactctgtctcaaaaaaaaaaaaaaaaaaagaaaataaattaacaacatagggtaatatacagtggccactggccatcatttatataaacaggactcaggattggtcaaagcagaggaaactgcagggactggttctacaataagcacagatccatgctatctcactgggatgtttaactggaagcttcagcaatgagtgctctctctgtctttactttttacttttagatacgggatcttgccctgtcacccagagtgaggtgcagtggcacgatcatagctccctgaagccttgaactcctgggcttaagtgatccccctgcctcagcctcttgagtagctgacaggcatccaccaccacatctaacaagtttattttttgtagagatggggtcttgctatgttgcccaggctggtctcaaactcttggccgcaagtgatcctcccacctcagcctcccaaagctctgggattacagtcacccaccactgcacccggccttctccctctctccttgtttaagcaacatatatatatatatatatttgagacagagtcttgctctgttgtgcagctggagtgcagtggcgtgatctcggctcactgcaacctccacctctggggttcaaacaattctcctgcctcagcctcctgagtaattaggattacaggtgcctgccaccacgcccagctaatttttgtatttttagtagagatggtatttcgccaagttggccaggctggtcttcaactcctgacctcaagtgatcctctctactcagcctcccaaaagtgctgggattacacgagccactgtgcctggcctaaaggttgggtcttgggacgtttctcgcctccctaggccccggtggcccggccccggatgagtgcccaggagcagctggagcrgatgcgcagaaaccaggaatgtggacggcccttccctcgcccgacctccccccggcttctcaccctgggaaggacactgtccccagccagacgccagcctgacgtggagcaaagggtgaggggaggagggctggggctgggcggtggggtggtagtaggtcctcttcgcctactttgagtccctttctgtaaaatggagataatcactacctccttcctccaaactggatttccgaatttaccccagtttgtacttgtgctagagtcagcttcctcgcctggatagtggtgggtggacaggagtggcagtgaggggaggacagtgggtgggggcgggggtcacacatctggattggaagcctagtttttcttctcagttgctatgtgttgtcaatagcaagaaagcaaaaaagaaaatgtaagccaggaagaaaattgattttattcatgccctttcaataggaagaacgtcccagatctgaacatcagagtgtctcagatatctcaggatggtttccccttagacgttttcctttttcggccgggcatggtggctcacgcctgtaatcccagcaatttgggaggccaaggagggcggatcacctgaggtcgggagttcaagaccagcctgaccaacatggagaaaccccgtctctactaaaaatagaaaattagctgggcatggtagcacatgtctgtaatcccagctccttgggaggctgaggcaggagaatcgcttgaacccaggaggtggaggttgtggtgagctaagattttgccattgcactccagcttgagcaacaagagtgaaactctgtctcaaaaaaaaaaaaaaaaaagatgttttctttttttttcagggacaaggtcgcccaggctagagtgcagtggtgcgatctccactcactgcaacctccacctcctgggttcaagtgattttcatgcctcagcctcccgagtagctaggactacagggatatgccactacatccagccaatttttgtatttttagtagagacagatttttaccacgttggccaggctggtgtcgagctcctgagctcaagtgatcctcctgccttggaaggaggtgctaagaatataggtgtgagctactgcacctaacctccccttagattttttttttctttttttgagacagagtctccctttgttgcccatgatggagtatagtggtggaatctcgactcactgcgacccctgtctcccaggttcaaacgattctcctgccttagcctcccaagtggctgggattacaggcccatgccaccacaccctgctaatttttttttttttgtatttttagtagagacggggtttacaccatattgaccaggctgttcttaaactcctgacctcaagtgatctgctcacctcggcctcccaaagtgctgggattacaggtgtgagccaccagacccggccccttagacttttatagaaaggatttagacaagtcacaggtggtggtggtggaggtgggatttctgaactcatgtgctgctttataggaacacaggtaaagttaaacattgtcagtcactgggtgctatggctcacccctgtaataccagtactttgggaggcsgaggcaggagtaagagaccagcctgggcaacatagcaagactctgtctctactaaaaataaaaataaaaataattagccaggcatggtggtgcgagcctgtagttctatttactcaggaggctgaagcaggattagtccaagcctgggaagtcgagactacagtgagttatgatcacaccactgtactccatcctttctaaaaaatgaataaataaaataaattaatttttaaaaattcagtgcctacagaagcataggaaaaacaaaacaaaacattgccagtgtttttgggcaatttcattctcttttggagcccccttcacttcaccctcaaaatgagaacgtggggcttccaggtgaggagttctaatgccccaattcctttccagcctgtcgtaggacactcgggagcccagaaatggctcagaagctctgggtcctggagtaggtaaggaactggagggcgtatcaagggagcaggaaaaaaaaatttgcaaaarcaaaggggartagmattattattaaagtctcctgaatatggaastacaaatcgcaacccttctagagatgcttaagttcccggggcatctgcaacaaaaccagaaagccctagatccgtagtgatatctttagttcctcarattcccttggtcaatagcagatcctacttctscatcaaggaaaytgggtgatagtgacrcgcgagwggactacaaatcccrtaatgcatgtgggcggtatgagggcggtgccatgtttaacgtmttttagagacacgtgctaggaactacaactcccagaaaggcacgtgcggtacccgggtccccactgtgccagctgtttattttttatttttatttttattttttactttttttttttttttgagacggagtcttgctctgtctcccaggctggagtgcaatggcgtgatctcagttcactgcaacctccgccttctgggttcaaatgattctccttcctcagcctccctagtagctggaattacaggcacccaccaccatgcctggctaacttttttgtattttttggtagagactgggtttcaccatgttggccagggtggtctcgaactcctgacctcaagtgatccgcccgcctcggcctcccaaggtgctgggattacagggataagctgtcgcacctggcctgcttttttttttttttttttaatttttaatttttgttggtacatactaggtatacatatatttacgagataattgagatgttttgatacaggcaggcaatgtgaaataagcacatcatcgggaatagggtatccatcccctttcaaggatttaccctttgatgtataaacaatctagttacaccctttaatttatttaaaaatgtacaattaaattattattgactatagtcattctgttgtgctatctaatagtaggtcttattcatccttttctttttgtaccaattaaccatcccccacctctcccccatgtacacacccccacccccaatcttctttttttttctagtccaaggaacaccaccccttacttgccgacttccgaaggtcaccgggagcgggttctcagcctctcccaagccctggctactgaggcgtcgcagtggcacagaatgatgacaggtgactggctggggatgttggacttctgggttttagggaggagagagctggagacctggaatcccaggtcctggagaggaggggtctgggggccggtgagaaytttttatcttggtgagtaaagagttgggcagggtttgggagttttaggtctcaggcaagaggtgactggggtccgggacacttgggaggaggggaggaagaggtcagggggcggggagagggccgacaactgagtctcaaagaggactggactggcgtatccagactcctggatctgagggaggaggggctgggggcctggactcctgggtctgagggaggaggggctgggggcctggactcctgggtctgatggaggaggggctgggaatccggagtcctgggtctgagggaggaggggctgggaatccggrgtcctagcgctgaggtttgccattctcatgtcccactcatcctctccaggtggaaatttggactcccagggagaccctcttcccggtgtgccgctgcctccttcggaccccrcgcgccaggagacccctccccccagatctcccccggtggctaattcgggttccacggggttctctcgccgagggagtgggcgtgkaggaggtcccaccccctgggggcccgcgtgggatgccgggatcgcccctccggtcctgccacaagacgagggggcatggcctctgcgagtcactctgctacaatccagcttctaatcygcccaaaagcggcagccaatcggagcgcgaggacgtggtctggaggtaccgcyggagatctgggaccactcagggcatcagggggcgtggtctggtccccattgcgggcccgggaggggaatggtttctatggccaaagtttggttttctcaacactgtctaaatttggattaaaactttgaacttttagtcaatagctttctttctgtctgtctggggttgtggcactggtgtctctgaggggcagagctggagtcgtggactcctgggtcctgagagaggaagggacagggggcttggacttataggtctctgggaagaagggatagagaacctgatccctcggtctgagagtggagggggctgggccaggattcccgggtctgagggaggaaggggtgggaccctgactcctgggtctgagggaggagggactgggaggctggactcccgggtctgagggaggaggggctgggaccctgactcctgggtctgagggaggaggggctgggaggctggactcccgggtctgagggaggaggggctgggaggctggactcccgagtctgagggaggaggggctgggggcctggactcccgagtctgagggaggagggactgaggcttctggattcctgggtctgtgggaggagggactggggctcctggattcctgggtctgtgggaagagaggagtgtctgagggaggaggggctggggacaaacttccaggtctctagccttcctggcaacgccccccgaggccggacttccaggatccagcctctattgaggatttgatgcgacggcctcacggggctttggaggtgaaagaggcccagagtagagagagagagagaccgacgtacacgggatggctacgggaacgcgctatgccgggaaggtggtggtcgtgaccgggggcgggcgcggcatcggagctgggatcgtgcgcgccttcggtgagccgggtctgactgctgggagctgtggagtgtgagaaaggaaggatgggggcggggtgatgggggcggaaaatagggactccagtactgcagccaggattctgatattataaaagccaatttgcaggctaaagtaagcgtgtggcgctgtaggctagggctgagtctggcagggtctccgaaggcagtggcccctttctctgggtctgttggtgtagctacaaaaccagtggtttgaggaatggctctgtcagtcgtggagtttgctccggaagccacgaacgggggttcaggagcctcagcagaaacaaggcaaggagagtatgtgtcaaggcgtctgccctctgtcctatgggtgatcatgagactggggtcacgaggggagagggagatcagccccaatccaggtggccacaagagggcggcagaggctttaaccaaggctcggagagtaacctgttcccttcctattctcagtgaacagcggggcccgagtggttatctgcgacaaggatggtgagtgacggtccctcagccctcaccttggcccttcctccctcagacccagaggtccagacccctagcacctcctccctcagaccccggagtccaggcccccaggccctacttcctcagacccaggagtccagacctcagcccctcctccctcagacctaggagtccaggcccccagcccctctgccctcagacccaggagtccaggtccccagcccctcctccctcagacccagaagtccaggctccggcacctcctccctcagacccaggaatccaagtccccaacccctcctccttcagacccaggggtccaggctcccagcccctcttccctcagacccaggagtccaggctctggcacctcctccctcagacccaggagtccaggcccccaggccctactttctcagacccaggagtccagacctcagcccctcctccctcagacccaggagtccaggctcccagcccctcctccctcagacccaggagtccaggcccccatcccctcctccctcagacccaggagtccaggcccccagcccctcctccctcagacccaggagtccaggctcccagcacctcctccctcagacccaggagtccaggcccccaggccctacttcctcggacccaggagtccagacctcagcccctcctccctcagacccaggagtccaggcccccagcccctcctccctcagacccaggagtccaggctcccagcccctcctccctcagacccaggagtccaggcccccagcccctcctccctcagacccaggagtccagacctcagcccctcctccctcagacccaggagtccaggctcccagcccctcctccctcagacccaggagtccaggctcccagcccttcctccctcggacccaggagtccaggctcccagcccttcctccctcagacccaggagtccaggcccccaggccctacttcctcagacccaggagtccagacctcagcccctcctccctcagacccaggagtccaggcccccagcacctcctccctcagacccaggagtccaagtccccaacccctcctccctgagacccaggggtccaggctcccagctcttctctccctgcagagtctgggggccgggccctggagcaggagctccctggagctgtctttatcctctgtgatgtgactcaggaagatgatgtgaaggtaagccgagttcctgttcctacccccatctccgctaatgaccagttctttgttctcctccagccatttgcatatgcctttccctctacttttccttcctctcctggctccgctggactcgtcaaaggtttccacccagtgtcactccacacacaaggtcttctgtgactgatgggcaggtcacatgttccttctgtcacacctctccaaggctcttagcacatttaacatgtggatggaaatgaataagtccctcaaagtgggtcaactggaactgatttttctgtctcttttttttgtaagtgtcactgaggctggagtgcagtggtgtgatctcggctcactgcaacctcagcctaccgagttcaagccattctcctatctcagcctcccgagtagctgggattacaggtgtgcgccaccatgcccggctaattttttttttttttaagacagagtttcgctcctgttgcccaggctggagtgcaatggtgtgatctcggctcaccgcaacctctgcctcccagcttcaagtgattctcctctctcagcctcccgagtagctgagatttcaggcatgtgccaccacacctggctaattttgtatttttagtagagacggtgtttctccatgttggtcaggctggtctcgaactcccaacctcagatgatccgcccgcctcagcctcccaaagtgctgggattacaagcatgagccaccgtgtctggctaatttttgtagttttagtagagacagggtttcaccatgttggccaggctggtctcgaactcctgacctcaggtgatccgcccacctcagcctcccaaagtgttgggattacaggtgtgagccactgcacgtggcctgtatgtaactgattttttctccattatttctgggttcctatttcttccttttaatcagtatctctctgttatctgccccccttgggcaactgtcccctacgcgctctctgaatccttgtcacccccctgccccaccccctgaccctgggtgtgacgactgcagtgtggctctgaccagccccctgtctccttcctgtctcctgcttgcctgctgtgtctgctgatctcggagtcccctcttcctctagctcttgtcccctgacctgggagttcagcttccccctcctgccttgcatttgggagccctgtcttctttatggctggacaccccatctactgctcattcaaaggacatttcctgggctgggcgtggtacctgtaattccagcactttgggaggctgaggcgggtggatcacttgagctcaggagtttgagaccagcctggctaacctagtgaatccctgtctctactaaaaagtacaaaaattagccgggcgtggtggcagtcgcctgtaatcccagctacttgggaggctgaggtaggagagttgcttgaacgcaggaggctgaagttgcagtgagccaagatcgtgccaatgcactccagcctgagtgacaagagggagacaccgtctccaaaaaaaaaaaacaaaggacatttcctttctcctcagaccctggtttctgagaccatccgccgatttggccgcctggattgtgttgtcaacaacgctggccaccgtgagttgtgagaccccagggccattctccacctcctgccccccaactctgtttcctgcacgtcagtttccccactccctgcccctgattccctcatcctgcctcatacctctttctagccacttggacaggagagtaaagcaatggaagccccccaggcctgtgctgaaactgtggccctgttccatccctcctgtgtgtccccagggctgtgccctcacttggccatgtctctcttcttttcttttcttttttcttctcttctcttctttcttttctttttttttcagatggagtcgcactctgtcgtccaggctggagtgcagtggtgtgatctcagctcactgcaacctctgcctcttgggttcaagcgattctcctgcctcagcctcccaagtagctgggattacaggcgcccaccagcacgccaggctaatttttatatttttagtagagatggggttcatcatgttagccaggctggtcttgaactcctgacctcagatgatctgcccacctcggcctccccaaatgctgggattacaggcatgagccactgcacccggctttttttttttttttttttctgagatggggtctcactctgtcgcccaggctggagtgcagtggctcgatctaggctcactgcaacctgcacctcccaggttcaagcaattctcctgcctcagcctcctgagtagctgggaatataggcacccgccaccacacccagctaatttttgtatttttcgtagagacagggttttgccctgtcagccaggttggtcttgaactcctgacctcatgatccgcctgcctcagcctcccaaagtgctgggattacaggcgtgggcaactgtgtccagcccccgtcacttttcctctctctctcaccccccactttagacccacccccacagaggcctgaggagacctctgcccagggattccgccagctgctggagctgaacctactggggacgtacaccttgaccaaggtgagggctggcgaccctgccgccaggcccgagcagcctcctgataggtggattgtgtgatgcattttgtctaagagcaaaatgttttccgttctttttatttgtttgtttgttggagacagggtctctctctgtcgcccaggctggaggacagtggtgtgatctcagctcactgcaacctccacctcctgggttcaagcgattctcgtgcctcagcctcctgagtaactgggattacaggtgcgggccacaaaaccagctaaatttcataatttttggtagctatgcttctgactgcaagtgatctgcctgccttggccttccaaagtgctgggattacagacttgagtcaccacgcctggccatctattttctgttatttagtttaatctccttattccaaaaggaagataaatgactgcgaatctctacatccagcaaatctacctttgtagctacatagcccagtcttaggaaccttctagaaccttccagactggtggtggtaggaggggatgttaagaacatattggggccagacacagtggctcacacctttaatcccagtgctttgggaggtccttgtgggaggttcacttgaggtcaggagttcaagacagctggggcaatacagcgaaaccccccatctctacaaaaagtttaaaaaattaggcgtggtggtgcccttgtagtcccagctactcaggtggctgaggtgggaggatcgtttgagcccaggaagtcaaggctgccatgagctatgtacacaccactgcactacagcctgggcaacattgcaagatgctgtctcaaaaataaataaataaataaataaataaataggccaggtccagtagctcacagctgtaatcccagcactttgggaggccgaggcaagagg

SEQ ID NO: 98110 - DNA, 31619 bp, Homo sapiens
tttaatgattgccattctaactggtgtgagatgatatctcatagtggttttgatttgcatttctctgatggccagtgatgatgagcatttcttcatgtgttttttggctgcataaatgtcttcttttgagaagtgtctgttcatgtccttcgcccactttttgatggggttgtttgtttttttcttgtaaatttgtttgagttcattgtagattctggatattagccctttgtcagatgagtaggttgtgaaaattttctcccatgttgtaggttgcctgttcactctgatggtagtttcttttgctgtgcagaagctctttagtttaattagatcccatttgtcaattttgtcttttgttgccattgcttttggtgttttggacatgaagtccttgcccacgcctatgtcctgaatggtaatgcctaggttttcttctagggtttttatggttttaggtttaacgtttaaatctttaatccatcttgaattgatttttgtataaggtgtaaggaagggatccagtttcagctttctacatatggctagccagttttcccagcaccatttattaaatagggaatcctttccccattgcttgtttttctcaggtttgtcaaagatcagatagttgtagatatgcggcattatttctgagggctctgttctgttccattgatctatatctctgttttggtaccagtaccatgctgttttggttactgtagccttgtagtatagtttgaagtcaggtaatgtgatgcctccagctttgttcttttggcttaggattgacttggcaatgcgggctcttttttggttccatatgaactttaaagtagttttttccaattctgtgaagaaagtcattggtagcttgatggggatggcattgaatctgtaaattaccttgggcagtatggccattttcacgatattgattcttcctacccatgagcatggaatgttcttccatttgtttgtctcctcttttatttccttgagcagtggtttgtagtcctccttgaagaggtccttcacatcccttgtaagttggattcctaggtattttattctctttgaagcaattgtgaatgggagttcacccatgatttggctctctgtttgtctgttgttggtgtataagaatgcttgtgatttttgtacattgattttgtatcctgagactttgctgaagttgcttatcagcttaaggagattttgggctgagacgatggggttttctagataaacaatcatgtcgtctgcaaacagggacaatttgacttcctcttttcctaattgaataccctttatttccttctcctgcctgattgccctggccagaacttccaacactatgttgaataggagcggtgagagagggcatccctgtcttgtgccagttttcaaagggaatgcttccagtttttgcccattcagtatgatatgagctgtgggtttgtcatagatagctcttattattttgaaatacgtcccatcaatacctaatttattgagagtttttagcatgaagggttgttgaattttgtcaaaggctttttctgcatctattgagataatcatgtggtttttgtctttggctctgtttatatgctggattacatttattgatttgcatatattgaaccagccttgcatcccagggatgaagcccacttgatcatggtggataagctttttgatgtgctgctggattcggtttgccagtattttattgaggatttttgcatcaatgttcatcaaggatattggtctaaaattctcttttttggttgtgtctctgcccggctttggtatcagaatgatgctggcctcataaaatgagttagggaggattccgtctttttctattgattggaatagtttcagaaggaatggtaccagttcctccttgtacctctggtagaattcggctgtgaatccatctggtcctggactctttttggttggtaaactattgattattgccacaatttcagagcctgttattggtcgattcagagattcaacttcttcctggtttagtcttgggagagtgtatgtgtcgaggaatgtatccatttcttctagattttctagtttatttgcgtagaggtgtttgtagtattctctgatggtagtttgtatttctgtgggatcggtggtgatatcccctttatcattttttattgtgtctatttgattcttctctctttttttctttattagtcttgctagcggtctatcaattttgttgatcctttcaaaaaaccagctcctggattcattgattttttgaagggttttttgtgtctctatttccttcagttctgctctgattttagttatttcttgccttctgctagcttttgaatgtgtttgctcttgcttttctagttcttttaattgtgatgttagggtgtcaattttggatctttcctgctttctcttgtgggaatttagtgctataaatttccctctacacactgctttgaatgcgtcccagagattctggtatgtggtgtctttgttctcgttggtttcaaagaacatctttatttctgccttcatttcgttatgtacccagtagtcattcaggagcaggttgttcagtttccatgtagttgagcggctttgagtgagattcttaatcctgagttctagtttgattgcactgtggtctgagagatagtttgttataatttctgttcttttacatttgctgaggagagctttacttccaactatgtggtcaattttggaataggtgtggtgtggtgctgaaaaaaatgtatattctgttgatttggggtggagagttctgtagatgtctattaggtctgcttggtgcagagctgagttcaattcctgggtatccttgttgactttctgtctcgttgatctgtctaatgttgacagtggggtgttaaagtctcccattattaatgtgtgggagtctaagtctctttgtaggtcattgaggacttgctttatgaatctgggtgctcctgtattgggtgcataaatatttaggatagttagctcctcttgttgaattgatccctttaccattatgtaatggccttctttgtctcttttgatctttgttggtttaaagtctgttttatcagagactaggattgcaacccctgcctttttttgttttccattggcttggtagatcttcctccatccttttattttgagcctatgtgtgtctctgcacgtgagatgggtttcctgaatacagcacactgatgggtcttgactctttatccaacttgccagtctgtgtcttttaattgcagaatttagtccatttatatttaaagttaatattgttatgtgtgaatttgatcctgtcattatgatgttagctggtgattttgctcattagttgatgcagtttcttcctagtctcgatggtctttacattttggcatgattttgcagcggctggtaccggttgttcctttccatgtttagcgcttccttcaggagctcttttagggcaggcctggtggtgacaaaatctctcaacatttgcttgtctataaagtattttatttctccttcacttatgaaggttagtttggctggatatgaaattctgggttgaaaattcttttctttaagaatgttgaatattggcccccactctcttctggcttgtagggtttctgccgagagatccgctgttattctgatgggctttcctttgagggtaacccgacctttctctctggctgcccttaacattttttccttcatttcaactttggtgaatctgacaattatgtgtcttggagttgctcttctcgaggagtatctttgtggcgttctctgtatttcctgaatctgaacgttggcctgccttgctagattggggaagttctcctggataatatcctgcagagtgttttccaacttggttccattctccacatcactttcaggtacaccaatcagacgtagatttggtcttttcacatagtcccataattcttggaggctttgctcatttctttttattcttttttctctaaacttcccttctcgcttcatttcattcatttcatcttccattgctgataccctttcttccagttgatcgcatcggctcctgaggcttctgcattcttcacgtagttctcgagccttggttttcagctccatcagctcctttaagcacttctctgtattggttattctagttatacattcttctaaatttttttcaaagttttcaacttctttgcctttggtttgaatgtcctcccgtagctcagagtaatttgatcgtctgaagccttcttctctcagctcgtcaaaatcattctccatccagctttgttctgttgctggtgaggaactgcgttcctttggaggaggagaggcgctctgcgttttagagtttccagtttttctgttctgttttttccccatctttgtggttttatctacttttggtctttgatgatggtgatgtacagatgggttttcggtgtagatgtcctttctggttgttagttttccttctaacagacaggaccctcagctgcaggtctgttggaataccctgccgtgtgaggtgtcagtgtgcccctgctggggggtgcctcccagttaggctgctcgggggtcaggggtcagggacccacttgaggaggcagtctgcccgttctcagatctccagctgcgtgctgggagaaccactgctctcttcaaagctgtcagacagggacacttaagtctgcagaggttactgctgtctttttgtttgtctgtgccctgcccccagaggtggagcctacagaggcaggcaggcctccttgagctgtggtgggctccaccccagttcgagcttcccggctgctttgtttacctaagcaagcctgggcaatggtgggcgcccctcccccagcctcgttgccgccttgcagtttgatctcagactgctgtgctagcaatcagcgagattccgtgggcgtaggaccctccgagccaggtgtgggatatagtctcgtggtgcgccgtttcttaagccggtctgaaaagcgcaatattcgggtgggagtgacccgattttccaggtgcgtccgtcacccctttctttgactcggaaagggaactccctgaccccttgcgcttcccaggtgaggcaatgcctcgccctgcttcggctcgcgcacggtgcgcacacacactggcctgcgcccactgtctggcactccctagtgagatgaacccggtacctcagatggaaatgcagaaatcaccgtcttctgcgtcgctcacgctgggagctgtagaccggagctgttcctattcgggcatcttggctcctccctctcttttttttaaaattatactttaagtcctagggtacatgtgcacaatgtgcaggtttgttacatatgtatacatgtgccatgttggtgtgctgcacccactaacttatcatttatattaggtatttctcctaatgctgtccctcccctctcctcacaccccacgacaggccctggtgtgtgatgttccctgcctggtgtccaagtgctctcattattcaattcccacctatgagtgagaacatgtggtgtttggttttctgtctttgcgatagcttgctcagaatgatggtttccagcttcatccatgtccctacaaaggacatgaactctcatccttttttgtggctgcatagtattccatggtgtatatgtgccacattttcttaatccagtctatcactgatggacatttgggttggttccaagtctttgctattgtgaatagtgccacaataaacatacgtgtgcatgtgtctttatagtagcgtgatttataatcctttgggtatatacccagtaatgggatcactgggtcaaatggtatttctagttctagatccttgaggaatcgccacactgagccttttaaggatgtttgctctttccagaagcacattggaaaaccatcacagggggctgaagaagagtgacagaatctgtttaatgttttaacaagatcatcctggttgctggatgaacaatacacgaaaggacaataaagggagaaggatgaaggccagatggagattgcatcagttagattttgctatacgagagataaccagaaaactccagtggtatacagtgataagtttttatttttgtgcttagagtttcagctgatctagggtggctctgctgatctcaggtggatttgttcgtgagtctaagggttggatgggggttggctgacctaggctgggcccacatttgaggtcatgaaaagtgtgtctttgatctcatgtggcttggccacaacatttttaaggcacccttctctgacttgcacaaatttttattcccatattataaatgagtaaacaagttctgaaaaatgaagtggcttgcctacattaagcttctagcaaattgaaaagctacttcttggatgaagatctcaacttcaaatcctccacaaaatgcttctcctaatgtctaatgccattgagatacatagaggaatgttatttaatatgtgcaataattttttgagataggtattactaccccattttatcagtaaggaaattaagaccaagaaagggtaagaaaactgtactgattcacacagcatattagaaacaaagtgaaaactcaaattcagtggcttgctaaattttcattgcctttttttttttwaaagcatgccactgctatctaataargatcacatttatctaagcttgcaaggatccaggaactctyccaatgatgaacttaaaccaaatcccacatattccctatctactccccactcccaccccaggccattgggctccttttagaacctgcacagaagtgtctcctaatcttgggggaaattaaactgtctactaaagaaatcactagatgtctacatttcctgatcttaaaagtttgcagttattctgtcatgaaataggaagtgaagcaactacagttctctcttctcaaaacagaaggattaggatttcctttctgttgtctgagttctggggcttgcctttggctagagttctgttgatatttttctccacctagactcagcctttcttcccttctcaacggtagcacttatcctttcccaacacagtcagagaacttgtatctccaccggctactaatataattccaatttccaccccatctcaaacacaaattacttctggtaattcccttcaagcaagttctgacacctgatgtgttatctcatgttaaaaaattgtaagtggccatgctaaggagccaaaaatgatgaaacctaggaatgcagaagcagaacttagtgttgtaataaaaaatatgatttacaacaatcttgtttggtatacatacaatgacatgtacagtcattactgtgctacattgttattagacacaaaatggtatgtgctgtactttggtgactattatttccatcagttttatacatggtcttccttatggtttaattattcttactcaaaacacaaaaggcatctcttttctctytcttatgcaccaagcagagtatatagctgatgtcttgtgagtgtggagaacagccagggtactccaagacttgtcttcctctttcttgcctttcttccagtgtggccaaatgaactccctgtttcctgtctcaggtgatttccatttgaccctgatgttccctttttactatgtgcttattccgtgcccccagccaatgtttccctgagcagcccttctcttttcctactcttcgtcggctggaccagttctagatcaatgtgatgccaatcagtgccaggctccttggggtcagtaggctgtgcctggtatcaggctttctccagaactgaagggatgaatatattgtgattattgttgcctaagagactatccaaaattttaaaaatactcaacaaatacagccaggtactcaaaaccttcagagcaaaggaagcctgcttacctaaattttggttacaaaggagttacatatgttataatggagtttcagaaatatgacaagggaatttttagcttaagtgtctcttcagggctttgctgaagaacagaaatctagtgtgtttggctcccttggctgcctggttttcttcaaaggggtctccaagaaggttcctatcctgcccagacctctctccattcccataaacaatgctgctgtccgtgctgctccaagctcagcactaggagccctccccaaggccaagccttagttcagactgaggagagcctctgctaccctcgcttgtggagttaggaggggcatgtgaatggggttcccttgagaacagagacgaagtcacaggacctatgtttatccctcttccaccatggtaatccctaaataatgtttataatttctcactctacagttactccctagtagtatggtatactctgaggctaaaataaaacaaaccctgtcaacagactaggcctttttgatcagtcagaaatgctcagtactacagaagcggacctcatctctatactaactgagttgtttccgtaaaactgatcctgtctcctggagatggctagcatccagtcccccagtgcagaagaaagaagctcagtttcccaaatgggcaaggaccgctactggtagacagataggtaagtaaaagaatcattggccagacgacctgtatggattcaaaaagagttgcaagtatagttcttgtcacagggaactgtgatcatttggcattcttctcacagatcctgcggtagctgatgtcacatgatgcagcatcaaatgtctttgttaggccaatggtcgcacagttgaaattctgattctgattggtaacactaaatgagaaaacaaaacaaaacaaaacaaacaaacaaaaaacaaagcatggtgatggcccatcattttagcccagcctcttcctgattccagagtgagagtcttgcaggagttttgcctggaagggcagcagactaccgggcccacacacgtctccatctgcgtagcctcctttttagctcagatccttttcctaatccagctccgcaaatgcagctctaaacccaccctttcctgtcagctctccygtgagcgtgtatggattcacagtcttggactaactaactcactctggcatttggttagaagcatctcatgggctgtctcttcttccaaaagtactgtttaggatagcatgcatgttcacagcaagaggacaggaaggaaaaggagagaggttgtgcatccctttccagaccatagtggcctcagaaaaacttggtggaggtatttgttggctctcccacctctttttctgtcattcagtctgtttcagtctgactgaaaaggctctggtttcggagaaatgtcatgtgtttgggactagctttatgatatttaacacatttctaagctttacttgtcctcagttcaactgtctgtgaaatggggagcgataaaagcttttcatgtagcatcatggggaatatttcaggaaacaacatatgcaaagtgtttagcatagtgctggcattagcagacactgaataaatgtcaatttcctcctctctgtagggaagcccagttacaggctgggggactgacttgacctctgtctgaatcactatttttgtataaacactgggaagattattgrtgttctcaccaatcctcatctccatggaacaattcacaggagacagctcttgggggtcagaagttcatagctttaagacatagacaagttgcttataataacctttcttagataaagaaggcatatctggggaaacttgtatgtactttgtaataaaatgtgatctgtgggttaaaagacgaagcccttttgatcagtcagaaacactagtgttatagaaatagatctcatctctataccaactgggttgcctccataaaactgaccctgtctcctagagatggctagcatccagtctagactcatatctagtctgtttgaagtcaagagactgagcttttttgatcagtcagaaatgctcagtgctatggaaactagcatctatagagagctacaagatacatcaaatgaatgctatgtaggtggatttgtttggatcttgatatgaataaaataatttgctatatgaatactcttctttctccttatgaaagtttgatctctttcataagaaaacatttattaaaatgtgtctcagggaatagatgggttggaagaaaggagaagagcagaacagagtcaagtgtcagcgtttgagctattccagggtgaacccagcaatctcaggtttggtcttttgaagcaaaccaagatccccaggaaactgtggbatgttcacgtacttgccattgaacacagagttgttgatccaaygccaccttttctcttcacgrtggtaaattaagccaataaaatacttctcagcatcagttatgtcctgaagaaacttctrgaaataaaaaaaaaatttyaccagtgagtcttttaatgatgcctctcttgagccaatgtgcccatgattatatctgatcctgggaataaggaaggccggtagagaactctgggaccrgctatagctgggactcacaactaaccctaaagaagtcattgtcaagattcagagggaatttggaaarcctgaggtcttgttaaaacacagactgctgggctcctggttaagtaggtctagtgaagggaaccaataatttacttttctacaaaatgcccaggtgatactgatgtttctgtccagggaccacactgtgagaatgaaggggaaggggtactgtacaatctaaaacagggtcatttaaaaaaatatgtcatgcttctatccataggattgtttttgttgccagaaattttgtatgctaagtgaggctgaaccaagtgctaataaaatgtgtttctatatattgagtacttaggaaaggaaaacggtgagatttaaaagtgtattgcttttaaaagtgtaatccaagaagaaataagcaagtgcttgtcaaatatttgctgatttgacactagtcctagacatctttgttctgtaattaattggtgagttacaaatcatttcagccagaagtgtttcctatacttgtcacatacgtcccataatcagtgggtatccaagtcttattctttccatccccatggctatttccttagtttctcrcttttcaatgttctccttttctgaaatatcttatttcattactttttaattaattactgaatgttctcattcaccaaacatctctcgagtgtctattatatgccatgcattgtgttaggctgaggatgtggaaacaaatatatttctcctcaaagaaattatgatcaagagggttggcaaactacaaccagtgggccaaatccagacttcatcctgttttggtaaatgttttattggaatgcacccatgcccattgtttacacattatctacggctgctttcaagttacaacagcagagaccaatgccctgaaaagcttaaaatgtatgttatctgacccttttttaaaaaagttttctgacccatggtctaaaaccagaatccttaatgctgaactctcatgctggaagccatggatggtttcccaggaaaactatgaaaccactggaatgttatgaaaaatattttgcttatgtaatgtttctgggaaggggtacatagattttatcaccattttaaaaaagtcagtggtcccatcatgtttgaagaaccacaggtttaatgagggaagacaaccaacttaactagcataaggaggtatctcaggtgtagtactaggaaattatatactggatctggaagaggcagaaaggaggaagcgatcattctacatagatctgaagtttttctagaatgatagatgaggtgayacctgagatgaattttaggagatagctaagtttgtcagacaaactgtcagggagagtatggacttcctggaagagagcatggattataggcaggtggggaagcagcctggagctcttgaggaactacgagatgctcagcgtagttagtgcagaggtggcagggaggtggtttgagagacaaggctggagcaaaggcagaggcggcactgtgcaaggcctgatatgatgtaaggtacatggatgtgctttggtcaagraataggctgaggtggacatccaggccaaagtgactcagcgagtttagggagcaggcatatatatatatatatatatatatatatatatacttgttatataacctatttgtgtaagctcatgcttagctcagagccactattgtttgaaaaaggtataattgacctgccgatgctgtgcacgcaacttggcttggctcaacgtgccttgacatggtacaggctctggtgcccagagaaagagagagagaaccaaggctgtccatcttgcagactgatagagggcagccaggacatggctcagcatgcattcatgcccagarggagaaagagttaagctgctgaccctgaacgctaagggagagccggctgcgcagctgtgaatgggagcggctggagcaagcagctgagacagacagacagagagtatgagaaagctgctgatgaaagagctgctgaataaaactacatttcacctgtgtatggccccctgagtgttctttcagctatctgccacccacccactcccctaggaccttagcatgggctggaacctgaccctgagtgtgacatttggcatggtcatgaacctgacatatgccatgctaggagaactggcgtttaacccactttaatttggaaaatggtacagtttagagccttagaggtattataatgtcagttctgaggaggatagctagaaagagtgcaaaactggaggcaaggagatggattagaagaattctgaagaaatccaggtgagaactgaactatttgttgttggcatagagagaaaaggacttgtttaacaaataattgaggaagaaaagagaaggtaaagtcccagaaaactcttaagccttcaatcttgggtgacatgagtactcaccagtatttggaatgcaacaggaagagtgggggggtcaaatataattgactcagttttgaacatagtgagtttgtgggcctcttgaaacatcgaagtggaatttggtatacttgttgggaggagaaggatgagctggagatacagacttgcgagtcagcagcaaaccattgccatgatgacctttgtctttttctttaacgttttttttttttttttttttttttttttttgagacagagccttgctctgttgcccaggctggagtgtagtggcacagtcatggctcactgcagcctccgcctcctggattcaagcaattcttgtgcctcagccacttaagtagctgggatttcaggcatgcaccacctcacctggctaattgttagtagagacatggtttcaccatgttggccaggttagtagtgatgacctttttcatcaccaaggaaaaggtacatggatgtgttttggtcaagcaaattgggatccacaaaacttaatgggtgtggcagacttgtcacacttgcttcttcccgttgccttccctcctttcctcttttcattcccctgtcttgctcctgtttttctatcttaagacattttcccttgctacctgggtacttagccctagagggtttgtagcatccagatcccttggtcatctattaccaagattcagaaaggagawgttcttacaaattcttctaaatcacaggaggactttctagaggaggaataaagggatagaagcgagagaagcaagagtatagtgtatgtagcacagattagagtatgggttttggagtcagagagttctgaattcaattccacgttctgttatttgaccttgggcaaattacttttctgtgccctagttgccatttataaaatgtggataataatacatcctcattattattatcatgatcatcaactgcaaattcagtatgacctgattcttactttttcacactactaattttgtcagttcacgtcttccttgtttactatgcagactgggatggtacattgacatcacatctataaggtattctttttgttgttaaacaacttttatacacatcatctcatttggtcatttgcttcactttaaatgtcttggcccatccccaggatatcagctaattacagtgcgctatagaaaagaccacaaggtgcgaatttctgtggttaaatgaaactggaaaatcatgctgcttcactgctactaagaagaatctcctaacctccagtccagaacaaatagcttcagtttttcagccagccacctctccattcctcactccatcccatccccactccccacaagtttctaccccatcccacccactgaggctgtgtggagtgtgtggctttactgtaccattccagtgttctcaccagtttctctggcgtgttgacaattgccaatgtggatccttttcctttgcaaaagtccctgctttcattccaagatgattcagaagtggataagaaaaaacatcttgcttgataaaattcccagtctttggggcagactgaagaggtscaagaaaggagagtacgagtttactggtttgggttatgaatcctgcaactaagtcatgaaacagtgatacatatttttgctttgttttaacaattatattggtaaaaattattctccatccaggaagaaattccacccagtctagtctggttccttgacaataatataaggagaataaggagaagagcgcagtggctgaataaagtttccattagtcatccccctacaggaacaccaaatttgacaactatctacacacaaaaaagcacatatacatacatgagaacaaaaaatcagatgaacactcagtacctggatagctgaaagaggcactgcagagggtaggaaagatagtcttgaattgctgacaccacccccaccctatccctgctgcagtgacagcatggcatggtaaagtstatgtgcatgggagagggagtgtgcagggattgtgagactttacattggactcagtgctgccctgtcacagtggagggcaaaacggaccaaactcagctgatacccacccatggaggaagcatttagatgagcgctagccggaggggaataacccatcccagtggttgaaacctgagttctggcaagcctcrccactgtgagctgaattgctttggggccctaaataaacttgaarggtagtctaggccacaaggactgcaactcctaggcaagtccttgtgctgagctgggctttgagccagtggaattagggggcacctactgagataccagccagggtggccaagggaatgcttgtgccattgctctcccaaccccaagmagcacaacttgcagctccaaaagagaccctttctttctgcttgaggagaggagagggaagagtaaagagtactttgtcttgcatcttggatgcaagccacagtagaatagggcactagtcagagtcgtgaggtccccattccaaaccctagttcctgaaagacatttgtagagacacctagacataccctgggccaaaagtgaatcctctgtcttgaagataagtacacagtcctgacaggatcccttacctgctgatgaaagaattcttgggccctgaataacaagcagcaatacctaggtagtatgttatgggccttgggtgagactgagatgtcttgggcttcagatgaaacccagcacattcttctgcttgagaaaagaagagagaaaagtaaagggggctttgtcttgcaccttatgtaacagactggccacagagaagtaaaggtcagctcttggggtccaagattctaggccttgactcttggatagcatttctggacctgccctgagccagataggagcccacagacataargggtaggttctaggcctggcagcattcgtgacaagctgaccaaacagcccctgtgccttaaacaaaaatcagtggtagtctggcagtgaccctgtgggcctgtgatggtagtggtcatagggtgaagctcctctgcctgcagaaaggggagggaagagtggaaagaactatgtctcatgaatcgagtttcagctcagccacaggaggacagaacaccaggtagatttataaggtttttgactccagtccctggttctaagatagcatctccagacctatttagggcctggtggaactcactgccctgaaggggaggtcacaggcttggctggcttcaccatatgctgattatagagccccaggacattgacaaaacataagcagtagccatgtagtggttacagtgggccttgagtgagactcagtgctatgctggcttcaggtctgacccaatgcagtcccagtggtggtggtcacagggatgcttgtgtcaccccactcccaggtctgggaaggtcagcatagagaaagagattctgtttgggagaaagtaaggaaaaagaataagagtctctgtctggtaatccagataaatctttcagatcttatccaagaccaaccaggtgggtacctctacgagtctgcaagacccacagcattactgggcttgggatgtcccccatgcagatagagcttaggtcacagcrcccaagtccttttgaatacctggaaagccttcccaagaaggatgggtataaacccagaccatgaagactacaataaatacctaaatcttctatgcccagacactgatgaacatccacaagtatcaagaccattcaggaaaacatgacctcaccagttgaggtaaataaggcaccagggaccaatcctggagaaacagaaatatgtgaccttttagacagagaatccaaaatacctgtgttgaggaaactcaaagaaattcaagataacacagaaaagaaattcagaattctatcagataaactaagagatagaaataattaagaaggatcaagcagaaattctggagttaaaaaatgaaattcacatactgaggaatgcatcagagtatattaataacagaatcagaggggtcacagaagtcagaggatacaaaagaaaaaagaataagaaacaatgaagcacacttgtaaggtctaaaaaatagcytcaaaagggcaaatgtaagagttactggccttaaagaggaagtagagaaatagataggggtagaaagtttattccaagggataataacagagaacttcccaaacctagggaaagatatcaatatccaagtayaagaaggttatagaacaccaagtagatttaagccaaagaagactaccttaaggcacttaataatcaaacccccaaagttcaaggataatgaaaggatcctaaaagcagcaagagaaaagaagcaaataatatacagtggagctccaatatgtctggtagcagacccacagcgttactgggcttgggatgttccccaagtggaaatcttataggccaggagagagtggcatggcatatttaagttgctgaagcaaaaaaccctttaccttagaatagcgtatctgatgaaaatatccttcaaacatgaaggggaaataaagactttcccagacaaataaaagctgagggatttaatcaacagcacatcagtcctataagaaktgctaaaaacagctctttaatctgaaagtaaaggacattaatgagcaataagaaatcatctgaatatacaaaattcactgattatagtaggtacatggaaaaacacaatatcacaacagtgcaactgtggtatgtaaagtactcttatcttaagtagaaagactaaaagatgaaccaataaaaatgataactacaacaacttttcaagacatagacagtaaaaacaaagttataaatagaaacaataaaaagttaaaaagtgggagacaaagttaaaatgtagagtttttattagttttctttttttgcttacttgtttgttaatgcaagcagagttaagttgttatcagcttacaataatgggctataagatagtatttgcaagcctcatagtaaccttgaatmaaaaaatatacagtagatatatgaaaaacaaaaagcaggaaattaaatcataccaccagagaaaatcaccttcactaaaaggaagacaggaaggaaagaaagaaggaagagaagatcaaaaaacaaccagaaaacaaataacaaaatggcagaagtaagtgcttacttattaataataatattgaatgtaaatggattaaactttccaatcaaagtacatagagtggctgaatggatgaaaaaacaagacctaaygatctatttcccacaagaaacacactccacctataaagacacatgcagactaaaaatgaagggataaaaagagayattccatcccaatggaaaccgaaaaggagcaacagtagctatayttatttcagacaaaatagatcttgagacaaaaactgtaagaagacacaaagraggtcactgtataatgataaaggggtcaattcagcaagagaatataacaatataaatatatatgcatccaatactggcacacccagatatgtaaggaaaatattattagagctaaagaaatagatagtctccaatataataatagctggagagtttaacactctgctttcagcattggaccgatctttcagttggaaaatcaacaaagtaacattggacttaatctatactatagaccaaatgaacataatagatatttatagaacattctattcatcagctacagaatacacattcttttcttcagcatatggatcattctcaaggatagacyatattttaggtaacaaaacaagccttaaaacattcaaaaaattgaaataatattaaacatcttctctgaccacaatggaattaaatagaagtcagtaacaagaggaagtttggaaactgcacaaatacrtggaaattaaacaatatgctcctggatgaccaatcagtcaataaagaaattaagaaaggaattgaaaaacttcttttaacaaatgataatgaaaacacaacatactgaaacctgtaggatattaagacggaagtttatacctataagtgcctgcatcaaaaaaaamcaagaaaaaataaaaacttcaaaccaaaaacctgatgacaaatcttaaagaactaaaaaagcaagcacaaattaaacccaaaattagtagaacaaaagaaataataaagatcaaagcagaaataaattgaaatgaagaaaacaatacaaaacatcaatgcaacaaaagtcggctttttgaaaagataaacaaaatcaataaacctttagccagaccaaaaaaaaaaagagaaagagatgacccaaattaataaaatcagagatgaaataggagacattacaatggatggcacagaaattcaaagaatcattagtgactgctatgagcaactatatgccaataaattggaaaatctagaagaaatgggcaaattcctagrcacatacaacctaccaagattaaaccacaaagaaatccaaaacctgaacagatcaataacaagtaatgagatgaaaaccatgataaaaactctcccaataaagaaaagcccaggatccaatgatttcactgctgaattctgccaagtatttaaagaagaactaataccaatcctactcaaactgttctgaaaaatagagaaagagggaatacttcgaaatttattctatgaagcctacattaccctgataccaaaaccagactaagacacatcaaaaaatgaaactacacgcaaatataccaatcaatattgatgcaaaacacctcaacaaaatactagcaagctgaattcaacaacatattaaaaagaycattcatcacgaccaagtgagatttatcccaggaatgcaaggatggttcaacatatgcaacttaatcaatgtaatacattatatcaacagaatgaagaacaaaaaccatacgatcatttcaattgatgctgataaattatttgataaaagtcaacatcscttcatgattaaaactctcaaaaaacagggtattgaaggaacatccctcaacaaaataaaagccatatatgacagacctacagccagcatatattgaatggggaaaaaatgaaagcctttcctgtaagatctggaatatggcaaggccgcactcgctttcatcactgtttttcaacatagtgctgggaggcttagctagagcagtcagacaagagaaagaaataaagggcatccaaattggaaaggatgaagtcaatttatccttgttttcagatgatatgaccttatatttgtaaaaacctaaagattccaccaaaaarctattagaactgataaacaaattcagtaaagctccaggatacaaaatcaacagacaaaaattagtagcatttctatatgccaacagtgaacactctgaaaagaaattaagagactaatcccatttataatagctacaaataaaataaaatatctaggaattaatttagccaaagaagtgaaagatctatacaatgaaaactataaaacatggacaaaagaaattgacaaggacaccaaaaaatagaaaaatattccatgtttgtggattggaagaatcaatattgttaaaatgtccactctactcaaagcaatctacagatttaatgcaatctttgtcaataacccaatgacattattcacagaaacagaaaaaattatcgtaaaatgtacatggaaccacagaagacccagactgtccaaagctatcytaagcaaaaaaataacaaaactggaggaatcacattacctgatttcaaattatactacagagctttagttaccaaaatgccatggtactgtcataacaacagacatatagaccagaacagaagagagaacccataaataattccctacgtctatagtgaactcattgttgacaatggtaccacaaacatgcattgaggaagggacagtgtcttcaataaatggttctgggacactggatattcatatgcataagaatgaaaggagacccttatctcttgacatatacaaaaaccaaatcaaaatggattaaagactgaaatctaaaatctcaagctatgaaaatacaagaaaacttyggggaaactctgtaggacattgaagtgagcaaagatttcttgagtaatatcccacaagcacaggcaaccaaaggaaaaatagataaatgagatcatatcaacttaaaaaagcttctgcccagcaaaggaaacaatcaacaaagtgaagagacaatccacagaatggaaaaaaatgtttgaaaaccacccatttgacaaggtattaataaccagaatatataaggagcccaaacaactgtataggaaaaaaaatctaataatctagttwaaaatgggcaaaagatctgaatagacatttctccaaagaagttgtacaaatggcaaatagaaatataaaaaggtgctcaacaccattcctcattatagaatttcaaatcaaaactaccgtgagatatcatctcaacccagttaaaatggcttttatccaaaaggcaggcaataccaatgctggaaaggatttggagaaaagagaaccctcatacattgttggtgggaatgtaaactagtacagctatggagaagagtttggaagttcctcaaaaaactgtaaatagaactaccacatggcccagcaattacactcttaagtataggcccaaaagaaaggaaatcagtatattgaagagacatctgcactcccgtttttatcgcaacactattcacaatagccaagatttggaaacaacctaagtgtccatcaacagatgaatggataaagaagtgtggtacatatacacaatggagtactgttcaaccataaaaaaatcagatcctgtcatttgcaacaacatgaatggaactggaggtcattatgttacatgaaataagccaggcagagaaagacaaacttcacatgttttcacttacttgcaggagctaaaatttgaaacaattgaactcatggagatagagcatagaaggatggttaccaggggctggaaagggtagttggtggggaggtatgggggagaagtggggcttgttaatgggtactaaaaaatagaaagaataaataagatctagtatttgctggcacaacagggtgactatagtcaaacataatttaattgcagatttaaacataactaacagtataattggattgtttgtaatacaaaagataaatgcttgaggtgatggatactccatttaccctgatataattattacatattgcatgcctttatcaatatatatcatgtaactcatgaatatatatacctactatgtactgagaaaattaaaaaataaaagccaaaataatatgtacaaagagaatgaactggaaggtcgttatggtccctttgagcaaaaaaattccataagaataaagacaatgggagaaatctctaagaattcagtgcatgagaacctaggggatggggagtaggttgtaatcatgcactttacctgttccatagctccttgtggtaatgaagccgttgggacttggggaactgctcccaaaaatctgtgagactaaagtgaaaagtaaacctaaaggttatggtatgatgaatacaacacagaaacagaaacatcagagtatgggctgtgtgactctgaatcatggagatgacaagaagctcttggccactctgagctagaacatttcaaataatttctttctttgagccttccatctaactactatcattatttgtcaacttgacacccaaatcctatttcatgtctcctttttttgatgtagccataggcatcaaatcctgagaaaaagaacagaagaaaggaaaagtaatggaggaatttagtatcagagagaaactctcacactcctatcgtatataaacctttgacagtgttttctccaaaggactgtttggagtacttctcgcccaggctccacacagcatctttgctgttctttctacttctggtgtcccagattcagtatgaaaattcataatcctgggcaactctgggactcttttctcatcagcactgtattagctctaaggattgaagctaattggaacaaaatttcagggccaaggggatattatcagacaaggaagcaggtgaactttagggagattttctataagcagggaagggtccattcatttctagaaatccatataggggcctcatttccctgggaacactggctgtctgagcaggcagccgcagtggcttcagaggctggtcaaacatctaattgggctgccagttatttgtccattgtggttgaagaccactttactctgacatcaaattagttacttacatttatcttaatgaaacaaattggcattcactttttatttcagtaccccgtttatagactctaagatgtaatagcctggttttcatcagaaactactttgagattataacttaaggactcaatacatattttatgagtattttctccatacagctcactgtattgggttgcctctgttgatactaagataaatgagaaacggtctttctcctaacgatgtcagtagtaataggtgtcttaagaggaagtgagaggatgttgttgggaaaggcttcagaaggaagctggtttaatcgggagaggagaaccatgccccactcatctctctatctcccatagctactggctattaagcactttcacattctattacaatgattagatataaatcatccccatatccaggagaaaaactaaggatcagaaatttccctcagtctgctcttggttttctcatatgtaaaagaaagggaattaattagaagatctttatggaccctttgtacaaaagaatttcttgggaaaggaggctgtgtggaaggtctctaggaattcagcatagaagtagcaggaggatggggagaagatttaccaccatgcagattacctgttccatagctcctggtggtggtgaaaccatcgttacttttgttaaaaatctgtgggactgaaaagaaaatcagctgttggctcagccccaaatgtgmctgcatgatgaatatgacaaacaagtatcagcacaggggctgctagggtactgtgactattagtgggaaatactgaactctctgactcagtgaagatgcataaatgtggttttgtgaatacgttcccttattcatatttctgtcctgctgtctgacatgataggaattgcaccttcagattgcatcatgaggaagacacctcttagctaactactgcctcccactcacgtttccttcctcatttattttccctactggcttctggggctagagaagattctagtttctgattgcagtaaaatcctttcataggaggcttctttaactaggcatttggatgaattaatttatatgtatacaaagagaaatttctttctcagttaaatcctgttacattatacttcagctcttaccatggccttgtcattgggttgaactggagctgtattytagattttgccaacaataacaagcgctgccaagtacttcagctgagatcacccaaataatactctactagcaaaagctttgcgtggcgttctaaccatcagaaactggtaagttctatatctccaaggtagaccaaggagcctgggccactgtgtgtgctggggagtgagaaaggcattgccaattgacctcaggttgggtcagttagtctcaggtggaaagacttggatatgtaacctttacacacaaccatgcattctgagagaagagtcaatgagcaagacaacatgaagtctggggcaagaggttgctcaaatactcacaataaagtagaaataaggtcattccaacaactttaagcactaccacaataagcccagagatgatcatgtgccagttcatgatgaaggagctgcaggggcctgtgaagattagagcacagcagcatcagaattcgggtacaaggctgcttttcactaggacatatcccagcctctcgctcagagtacccaaagcaaggcaggcttggaagacaggcatgacattgacaggtaccaggaggtgacccagcgtgggccgcgaacacagaaagaatcatgtattgattggagccttggaacttggcatactgcctctccttcactcattccctactccaggcctcagccttgccctatttgtggcctcctaaattctgtctaataattaaaccctctcctgtattttgagaacccttatcyttgraatgacccttgttcccaaggaccttagtctgtagccttcaccatactgacttaagttgtcagaagcctcagtcttccaaataccaggggtaggtgacagacaggacaggcatccctgaaggtcttggcattggtcaacagtccatgcagccaagacagacagacagactcacctctttctccctggaaggctaggcttgcttgcagatgggggtcttcctggtggcctaatgcttggtgtggcaggcaggggccccgtctcctgagaatatgctccttttgcccaagcaacgttcttccttcttcacagtctctgccttggtagcatccccaagaaatacctcttcctgttcagtggggttcttggcaaagggagcaggcggggcaaagaagggaagagactctctagccctagtggtggcaagagcagacttcctgccaggagagttctaatgcagaggaacattttaaggacaatttggaaaacaaaatacctcaacacagattcacccttcctctgtgtctaaatctccttgaaatacagtgggaagagaaatgtagtaaaattttaacaaacattgaatctgggtaaaaggtagctggaagttatttgtactttccttacaacatttctgcaagtctgaaattatgtcaagttaaaaatgttaagaaatccagttgaagacactaatatgaatgagcaggttcttgctgttccatttgctccatttgctggagctctgctcattcccctttatcatggactcctctctggcaccacctgctcaccttccagacctcatggtggctcttcagtgtttcttgaacatggcactctgctggatacagcagtgggctggggtgaacaatactcaagtcctattgtcaaggagtttttaatttcgtgttaaatttgaaaatttgcttttattttccctactatgaaaactactgtgctcatgacaaaaaaatggctggaaaatattaacaaggaaaattgagaaaacaaaaccatttataaccttgtacatttagttatagtcattgctagcacctcagggtgtatcctttcgagatgagtaggtagatagaaagatagatggatagatagatagatagacagaaaaacactggttcacaaagaacaatgggaacatattgtacatattgttttgcaatctatctgctcaagattaagctaacactatgttatatatatcttttcatgtcaaaatatagattttgataatgtattatttaatatgtgcatagcattcaggtgtaaaactatatgatttatttattcaggtgtaaaagtatattatttctttaacaattgcataaccacaaatcttctagtaaagtgtggtggacaagaacaaagttttaaaaatcagtcctgcttttgattcctggagctgaccttcactagctgaacatccttgattaagttactgagtctctttaccttccatttctttatctataaataggagtaattatagtaaataccacataggattgttccgagaaatgagcaagataatgcttgtaatttcaatagcgtgatactcagcatcttaaacataaatccttagtattctaactattttctaaaactcttctaactatcttcccaatgcacagtgaacagctaagtgcatgcatccttttacatgtccttaataactttcttgggctaagttatcagaaatataaatgctggatcaaaagacatgtacatttggagggctttggaacattaaagttgtgttttgttctacttggatagtcctctgtgtttttgaaaaatctcattgaacctgatttatctggtcacaaggtaattacttctagaccctagattgctgtccagaaggatccacatatttattggacaataaatatggccaattatgccagctatgttaggaagtatgggaatcaggagacttggttattattatttagaaagtttttaacagagactttctgaataacttaataaaatctatacacttggatagcaagtgaatcttttataacaaagaggtataagagatctttcaaatatcatcaaaagagaagaaaatgtcatagtataaaaggatgtccacagaagttttgggggtagtactctgactgatgcattgtgggacacctctgctctgctagaaaatctaaagaaaaatctaaattcttgttcaaggcttcgcactgcaatgcttctcttaaactcgacattatcagaaaccttgctaaaaaaaagccaatatctgcaatggcaaatgcaactgaggggttactagagatgaagtcaatagcattgggggcccatgcccattgctttgggaaaataataagaaaggggcttctagtcacacaattgtaaggaaatacccacacattgttttttggggaaaaaaccatgagatcactaatttttaatcagttattgcagactgggataacaaattctctgcttagtgagtcaaattagatttttttcactaggctgagtcctaaaaataaagaaaaaagttttattgaagagtaaaactgaaatttaactttggcaatcttcatgtgacatcaagttggaaatgctaagtctttagggactgtattatgcaatattataattgcctgagcagacaacggagtcacctctacattgtaattaccaaagagttaagaagaccatgcccacaattgtaggtaatttggaagggacacagtgtatggctaaacaagacttctgggttatcgtgtgtgttttgtgggggaaaatggcagtgtgcagtgtgtgtgtgtgtgtgtgtgtgtgtgtgtgtgtgtgtattgacatggatagtcattaaaagctttcctatcctaacgagcaaaaaaagaggatctataacgttttcttaatccagctcccaggatcagctgttgatgctgataggctatggcaccacacagctggactgctattttcagaatgtttaccctatggtgacagtggcagcaacaataccaacttggtggactgatcagactttgtcaaagtaggaactgtaactgccacatttggattaggtgtccatggggtatcaagaaaggaaaccaaaagaagaaaggacatcctatgattcattaattggagtttcaagtggtatcaacatgaatatttacagacataactttattttgtatctcaagatgataaagactagtactgtctcttgagccttattagtagcatatatatatatttatatacatatgtacatacgtaagtatatgtatatttccttaaatgtatattgctggaattctctcaggcagtttagtgagaaaacctgaaaatttgaaagagacctgatgtttccccttatcttcacagtcagaatttttgaatggattgccagttttcacagccccctcttccccacctcctgctttctcctcagctcacgccagtctgagttccactatgaccacatcactaagtgctgactcccactcgatgaattaaatgggctcctttcagtctttacgccacttgtggcagaggcccacattggcctacattgtataatctttttcttggtctccataattttacattctcctgactttcttcccttctccctggcctctccatttattatttttctcctctgcctattcctcagattttgtagttatccctcctctcttcatctcacggttttaatcaccatgttcatgaagttgattcctaaatctttatcagagagcttcagatctatatatctctgactagctacatttttcattgaggtgcttcgcagacaccccagagtcaccatttcccaaaatgtattaattgctataccatggccaaaacaagttcattctcttatgttccatgtctctgaatgtaaagaccatttgtttagttgcctgaatcatgaagtgtgggtattatccttggcttctctaattccatcccatctatgatggttaatattgagtgtcaacttgattggattgaaggatgcaaactatcgttcctgggtgtgtctgtaagggtgttgccaaaggagattaacatttgagtcagtggactgtgagaggcagacccaccctcaatttgggtgggcaccatctaatcagctgccagcacggctaggataaaagcaggcagaggaacatggaagggctggctgagtcttctggacttcatctttctcctgtgctggaggcttcctgccctcaaacatcggactccaagtccttcagcttttggactcttggacttaaaccagtggtttgccagggtccctcagaccttcaaccacagatgaaggctgcactgtcagcttccctacttttgaggttttgggactctgactggcttccttcttcctcagcttgcagacagcctactgtgggacttcaccttgtgatagtatgagtcaatacttcttaatgaactccccttcatatatacatctatcctattagttctgtccctctagagaaccctaatacaccatctaataaaactccaagtcatggtgactttacctcctcaaagtctatcaaatctatcctctttactattttctctctgctaccccttggccctctccttgactccttcagtaacctccaaagaaacatttctgccataatcttgcctttaatagttctccactctttagtcagaatgatctaaatgcaaacttgattatataatttccatgattaaacattttagtaactttctattgcatttaggacaaggctttggccccttaacatggtctttaagtctttgcatgttcattcttttagcaaacgttgctgagtgctgccatgaaccagatactcttctgggcaatgaggaccatgtgctggttcttctgtacctctcatgacaccacatctaccctaccattgtctgctagtgacattaaacttctagttttttatgcactctctcctggatccaactcttcaaatatttatctgacacatgtttattgagcacataatatgtgcaaagcactaacggcaccacttgctgtcttccaaacacacacgtatactcctatatcctctttgactaaataattctgactcatctttcaggtctgagctcacccttcaggtctcatcttttcagaaaaactttcttgccgattctctttccctggcccagttgagtttagtgactgttatctttggtgtcgcataatatcatgtattttttccttgggagcacttattgcatgataatgcacttgtttgcttcccctattagactctataaagtcaggaaggcagggctgagtctgtcttcttcactgttgaagctccagcatatccacagtgctcagaacactgcaccatggagttaggcttttagacttgtaatctaaatctttatttgtgagagcatggtaaggcctaaaaaatatttctaaccaatcaaaaatttgtgcaatagtctttatactagttgacaaatttgctgtcatagtgttcaagaatgatcatttaagtgccagaccatctccaaaagtattcattcctgattaaatctttctatctcaaataaccaccttggagaatgcattgtgattatagtactttaaataataacaaaccatcccctagtttgtaaatagagttaacttatattcacccttaccatattaataaaactatatattttaaaggaaattgctgctcagataatataacacaccagaactcatacaaaccacagaaaaaggctgctttgggaataattagaaggaacatctagtagaactctattatatatacctgaacctgatgtgtcagagctttgaggtgaggggaggctgtggggcctggagacaggctgatttagagcttgcaggaaggctgtatggttctggagcctaccagcagcagagatgcacttggcttctatttcgtacagtgactccttaaatgaattgggaatcccattgcagagaacagtcattccagttggatgatgatgacattaccccattaatataaggctgtcccagcaccaagccaaagaaacactatgctcagtggtcatacttcctgctcagttggtctctagcctggcaacacagaactagagtaaatataaaacttcccccattttccttgatcaaatcctctaagatgtggtatttgcaatatctatcagaacccatcactaggcttcaggactttgaatatgggcaaaactcatttctcacttcaaagtttaacatgtggaaaaaacaatgggtatgcgagaatacagtaactcaaaataagatgagcattatgaagaaagagatccaatgtcca

SEQ ID NO: 98111 - DNA, 13466 bp, Homo sapiens
atttgaagtatttttttccatttacagtggctctaagctaaccaagtaaatcaaggttaaattaaatatctcccacaatcctacagtccactgaactctgcttctaaaatagtggacttggagaatggttgaagtaagaaaggaatggatccagatgctgtaggaatttggtaggatttggtgatgtaccagggatactatggggcaagtgtagaccagggatgggatggaatgatcacagtaaggccagagtgggtaggagatattagaatcaacatttagaaatgtcagaagttcaagaccagcctgggcaacatggcgaaaccccatgtttacaaaaaaaaaaaatacacacacactagccgggtgtggtggtgtgtgcctgctgcagtcccagctactggggtaggaggtgtgtggtgggggtgcttctgaggttggaggaaagtagagacagcgaaaccctgtctctactaaaccttgagctcaggagatcaaggctgcagtgaccgtgattgcgtcactgcactccagccagggtgacagagcaagaccctgtctcaaaaaaagaaaaaaaaaggaaaagaaatatcggggctgggcgtggtggctcacgcctgtaatcccatcactttgggatgccaaggcgggcagattgcctgaggtggggagtttgagaccagcctgaccaacatggagaaaccccatctatactaaaaatacaaaaaaattagcgggatgtggtggcacatgcctataatcccagctactcacgaggctgaggcaggagaatcacttgaacccgggaggcagaggttgtggtgaggtgagattgtgccattgcactccagcctgggcaacaaaagcaaaactccatctcaaaaaaagaaaaaaagaaagaaagaaaaagaaaaaaaaaaagaaaagaaatattggaaaagcactaaacctatggttctgttttccatggactttggttctccatgcattgctctctaagttactagaccaccgttaagggtcagaaccttggagagttccaggcagtagacgctttacaatgtgtgtgactactgcactagcatgaaatggacaggatgaagctagtataaatgatgctgaagcagacctctcatgtgctttctgttgaaatctccaagtttaaaaggctgccacctctacctccccgcaacctcaaggagatgttggtgcagtgaaatatttcagtccatcttgtgaaagaggcatgaaatcagcatagttaccgtagggtttctgttaaattttgatgttgtagaggggtgttggagttcctttcaggttctgtgctttctcctgaggtcttttctaagggtatggtattgcttctctgttatttcctgacctgttataaaattaattggaatctttgtagggttggaagagtgagtttgcctaaatctacccttgtcgttttctggtaagtgcttatatttgtaacagaaagattaaaaaaagatactgtatgttatacagatagtttgtaaaagctgaaggtaagtttaggctgttgctagccataacagacttttgcagtataattaagttaaggctatctctgctttttaccacctctaatttcagtaatcttgttttgttttgtggcactaaaataaatctagacacttaaattttcattgttacaatctctttttcttcagttttaggaaaaatgatggttttcacatcagattactaaatttctgatgctttgattaaaatttcatcatactgtttttaaaaatgtttaaccatctgcatttatgatgtcatatcaggctaaaaataggaacttgagtgtaaatattaggaaacacctaactagcaaatcctgggcataataatagcagagagcagaaaattatatgaaaatagaattttttgcagataaatagtcatgacatatttacactctgtattacagttccaagatgtagtcattatcttttttattttattttatttatttatttatttatttatttattgagacagagtctttttctgttgcccaggctggagtgcagtgacacgatcttggctcatcgcaacctccgcctcccaggttcaagcaatcctcatgcctcagcctcccgagtagctgggattactggctaatttttgtatttttagtagagatggggtttcgacatgttggccaggctggtctcaaactgctgtcctctggtgatccacccatcccggcctcccaaagtgctggaagaccatgcccggccgtagtcattatctttttatactatttgagagaacaggagcattacagtaaaattcctaagtagccaactgatttgcagtgccagaaatgaataccgatcctaaaaggtgtgtgatgaaaaggcagtctccagcattacattagcatttcaattagattttggagatgatttagctatggataacaataatagggatcagtgagaaatatgtaagatttttaaatgatactgatcaatagttattgttggttatctttttttttttttttttttttgagtcagggtctcactctgtcgcccaggctggagtgcggtggcacaatctcagctcactgcaacctccacctcctgggctcaagcaattctcctgcctcaccctcccatgtagttgggattacaggcatgtgcccaccacgtccggcttgtttttgtatttttagtagagatgaggtttcaccatgttggccaggctggtgttgaactcctgacctcaagtgatctgcccatcttggcctcccaaagtgctgggattatagatgtgagccaccacaccaggccactgcaacacatttctatgtaatgtttaagatcactggggtaaggccatagttgtatgtcagtggtagatcttgtggcatataaataaattatattgaatttgagagaaagagaatagataacaattaattcgagaatgacatttcaagctaatttttagaatatagaaaatgtagattttttttctttattctattcagcaaacattaagtgcaagtcctacccagacaggagtcaggaaaggctttcttagtgagatgatactctgaaattagtcttgaaggatgagcaggaattcttacagtgaggagggtggagatattcagagggaatggtaagggctctatgtaggaagctcttctcagtatggaataactaaagtaaggagtgtgtgtgtgtgtgtgtgtgtgtgtgtttgtgcacacgcatgcatgtccatccacatgcacaagggaaagagagacacttccgtgtaaatgcttaaggattcatcacatttttgcagcttcatagtattccatatagtatgattatatgccataatttatttaaccattcctcttttgatagatatttgttttctggtttgggctatttcaaataatgttgcactgaacaaacttgcacatgtgttcttgcaaacttgtgactgtaattctgtgtcaagggttaaggtttggttttggtagtcaccattgataaatttgagtacacaccttaggtctgagctatgaccagtcacacttcattatattttataatttttgagtcctcatctattttgatcaaattaaagatgtcttcagtttccgatcatatgggagcttattgtgccatggtaacaactttggcttgtagtccgagtgacgtgggaagccattggaggattattggcagaggactgatagaactgtttctaaagattgctctggctactctgtcaagaatggaagacagagatgcaaagataaaaggaaaaccagttaagaaactattctaatagttcaggcaagggataatcgtgacttgcactagaggaggattgatgcagttcaagaaaaatggtgggattctggacatgtcatagttaagagttgaaaggatttgttgatggattggatgtggagagagggcagggtgtggagattagctctaagattagagtggcatcatagatatccatgtggagttggtgaatagacaactgatagttgaggctacacatcagggtgcccaatactttattaatgaatgaatagctgatagataattcaagaaggaaatgtataaaatgaaagttttaaagagaacaagaattacagttaactcctttactatgactcacatggtccttttctctatgcttccaagcagatctcattttgactagaatacaactaaactggttaagagtttggacagggtgagagagagagtgtgtgtgagcatgctagaggaaatacatttgtatgtgtatatttatttctctcagaatctaagtgtctgtctctcagaatctaagacttgacgtcagaaaaattgttgctactaatctatgtagagatattacaactttatggaattgtgtttaattaaaattattatttttaaaacttcttcattttaacttccatataaaattagaaatgttttcccaaaatcaggcatggtggtgcatgcctgtagtcccagctactctggaggctaaggcaggagaatcgcttgagcccaggagttctaatccagcctgggcaacataatgagacaccccccctcccgccccgcctccatctcttttaaaaaagaaaaaaaaagaaagaaagaaagaaaagttttcccacaccaaaaaaatactaatagactgagttggaaaacttggtaaacaagcaattaggttgttactccttagctgtcttctggctgtggcaatttacccagtatttagactttttggcctttagaccctgacttggtttgcctttcgaatgcatcatttccttaaccccctcccatcctctctgatcttggctccctttctcactggccatagtctatctttccaaaccctgctccatattttcagctcctaaagtatcttttctaccttttttaatacttttttaattgatacatgatagatgtacatactttcagggtacatgtaataatatattcatataaattgtaaagatcacatttgtgtaattgggatatctgtcaccttaaatatttgtcttttctttatgctgaaaacatcctattataattattctcctccgactattttgaactgtacattggattattgtaaattatagtcaccccactgatctatccaacaccaggtctcatttcatctctcaaacggtgggtttgtgctcattaatcagcctctcttcatccctcctccctgctgccacttttgcgcctttaatctatgtgttatggggatgtccatatttgataaaactctgtcccattcatggcacaagctgcaacctaactatagtagtttaaaatactgtgaatgaaatatttgtcatacatctgcatgattaaattttcttcgtgaaacgtaaagccagaaactcagtgcatgtgagttataaatccgtggtggtactgatagcttaatcctgcatatttcaaagaatcaaatccaaagggattgacagatcactgggtttttccagcttgtctggttaatagacacccttatttatataaaagtttaatggtccgcaaaatatttgaatagcacatgaggtaaactgttgggaatattagtgcgtgatgaactttaaatttaaagtagagaaagttcagaatttctgcaaggcttgagctcctcttggatttatgcagttctaacaggactaagtatacaatcaaaattataaaagaatcataattttttcctttttgatggttggcagagctagctggggctttattttggaaaaaaataattgaactggtttttagttgggggcatgggcaagagtgggtaccccaggcaataaactcctccaaggggctgaaggctagggctgagcctcaggtgggtttccttttccttatgctcccctgcacagctgcctccctgacaggctctgggacagccacagaagggggtaggcagggaggggctgccatggctgttcacttggacgggacatcagaggacttagacatcagcttcccatcatggatcttgatcttcttcacaatcaggtccctggaggagctggggcagctgaaggagccggaacccccaccagaaccaaagctagagcccaggccatagttgagaccagagcttgtgagacccctataggcccagctcagcccacctgagtagccactggtggtcttcctatggatactcatattctgcatcccagactccagccagctttccttgccctgcagcagcttgcagtaggtagtgatctcgatgtccagggctaaattgatgttcatgagctcctggtactcatgcagctcccacaccatgtcctgattggcccattgcagggcggcctccagctccaccagcttggcattggtgtgcttaatggccagctccccacatactgctcagcatctgatggcagcctccagggaagccctcggtctctgaggccctttgctgatgttctgggtcatctctgagatctctgtctttgtgcaatgcaagtcatctcagtgctttccagatagctcctgcaactcctcatacttgatctggtacatgctctcagccttggcctggctgtgattggagatgtcctcatactgggcacagaccttggtgatgatgctgtccatgtccagggagcagctgttgtccatggacagaaccacagatgtgtccaagatctgggacagcagctcctggatctccttcatacagctgcttgaggaagttgatctcatcagtcaacccttccaggtgagactccagctctgctttgttcatgtaagcttcrtccacatccttcttgatgaagacaaattcgttttccttctctgtatgcttgttgatctcatcctcctactttttcttgaagtcctcaagctgcccctgcgtatcaccaagctccacctccagcttcagcttctctgacccagagtgtccagctgccaccaaagggtgttgatgtggctctcgaacatctcatccatgttgctcccagccatcttctgctgctgcaggaggctccacttggtctcaagtgccttgttctgctgctccaggaaccacaacttgttgatgaaggaggcaaacttcttgtcaagggtcttgatctgctccttctcctggttacacacggcctggatgttggggtccacttccagcttaaaagagcttagcaggctctggtttaccataatggctgtgatgcccccccataccactggcctcagcatagcctccactcagacctatgctggcacttaggccacccaggaagctgctgctgttgcccaccaggagaagctcaaggagctgatgcaggcaccaggcctgctcgtggaggagcagctgctgaaggccaaggggccagaggtggacaccttgtaggacttctgggtcaccctgatggacacagtggaggcaggagtggccaaaccagacagagatttgaggaggatcagagaagctacttctagattataatttacttttgattaacacctcataataattggatagttcaatagcaattagattaaacatgtcttaattcctagaaagcaaaatgaatttaccattaaattattttttttttccttccactagaagaggaaggaagatggtggaaaagattgattagaaaggtaggtcagagactgtcaagaagctgctgactaaacacctacaaggtagtcagaaaactcttactctgaaatctgtagaaacaacaccttcaagaggatacaaggacttttaatgtctttcaagtcctagaatgatgttttaactttggtaggtccagacctttgagcaaaggacgcagagtaagacactttctaaactctcttgattggaccactattcgtttaaaatctggctttaacaaaacttaagggttagtgagaaagataccaaactgtatttttgagtactatattttaaacttgcctttattttaaactttgtgcatcagcattacatggagtgtttggtttccctacgaataatgattggaaacccatgctaatctcttaactggttaactacacttgtggttcaagactaaccacttaaaccacctggagacatcattaaatgtaaatattgaatctgcaaacccaactctatgaagtcatgtctttttgctgaatatgaatcttttaaaggccacagaagaaaaccttgctcaagactacctgttcctctgttagtcagagtcattatcactaagttcttagaaccagcaagttttagaaccattgtcagtttcttttgctgttgttgaaagcaacatttattaaatagctacatggtcacaaggtttgatatccattctgtcatttgattgtatttctgcaactctgagtactcctgttttggcacattactgctagctttgtgaaatgtcaggtcttgttttctgaaactaccataggtggagatccaggctctcctgccttgttagatccctgaatactgcccaaactggagctgtttacctttgactttcctgtgggcctcttggatttgttctgttctggcgtctagcaatcagatattttctacttaggatgttgtcctttcagcctcactgctgaatgagaagcaatttcagagctgccattccatacatctaacttctctccagtcctaaaacaagtgccctcagaatttttgtactagaaattatagggtaagagattagataaaaataagccaaaagaatatttgaagtcacatttttatataaaactgataacctttgaaatattaatgttgaattaaaaagcatcctcagagaggctgggcgtggtggttcacacctgtaatcctagcatttgggaggccaaggcaggtggatcacctgaggtcaggagttcgagacaagcctggccaacattgtggaaccccatctctactaaaaatacaaaaattagccaggcgtggtggcacgcacctgtaatcccagctactcgggaggctgaggcaggagaatcacttgaacccgcgagacggaggttgcagtgagctgagatcgcaccgctgcactccaaactgggcgacagagcaagactccattaaaaaaaaaaagaaaaaaagaaaaaaaaaagcttagaggttatgtagttatatttagaaacaggcctacaaagactaaggtgatggcccaggagctgagaacagagcccagtgtttttaacgttagtccatgttgttgtggagctatcgtctttcttttattgctcccttgatttaggagttagccacaactaacccctctgtctcttttatctccctatgtttctggtattggatcatatgattcttcagaaccatgcctacacagttgtccccctttcccagtattgaacttggagataggaggcagtgggtaagtctggtgggtgaactggcttggaaaaagtgctcaagtgacttctttctgagaggaaacttgagactagtcttttctacatcatcttacttaatggggctaataattaatgtagtccgcatgaatagttcccaaccaaatgtttttcaaagccaatcaggttggtcttaatatctaaagatgtcatccagatgtgtaaaaataatgcatgtataatagttaaggaacataaaataccacaatcgtaaattgtgtagtgaaaatgttcaaaagatgtctttgtacaattgtgagttttatagctgagtaaacttgtttccaatattggaaattgtataccagtcatatttctactgtgataatttttttttttttttgagacggagtctcgttctgtcacccaggctggaatgcagtggtgcagtctcggctcactgcaacctccacctcccaggttcaagcgattctcctgcctcagcctcccaagtagctgggatcacaggcgcatgccacttcacccagctaatgtttgtatttttagctgagatgggttttcaccatgttagccaggctgatcttgaactcctgacctcaggtcatcatccacccacctcagcctcccaaagtgctgggactacaggtgtgagccaccacacccagcctctactgtgataatgttacataacaaacagcctctaaaatttagtggcttacatcaacagatattctttgtctatgagtcatttagggtgactccatttcaggctatataattgggttcagatctactcctcatgtccctcattctacatatgcttttctcatggtagatgatagaaacataggagatgaaatcaaagcacacacattctccatgaccaaaaccagaagcaaggcagggatatgcaccacctattctactgggaggcattacaaagtcacgtgacaaagggtatggataaatctcttacaggcagggagtgaagaaatgggaaaagtaatgtactacagcagtatttcaaccctgtcaattcatcactgaattcaccatcctctgtgatttctaggtgagcagatagttttggtttttgcagctggcccttccctttcactgttttctttcttttctctgacaagtgacttcacgatgtcattattacttactgtgtaggacctcagtaaacacatcatagtcaagccactagctaataaactagggcttgacttttcatgaacttgttttcccaagaactttgatttactagttagctaactgtattgaaaaagcttcattgaaaaattgttcctgcttagcacagcttaatctgtattcttgggttcccagtgccaatttttttctttcttccaatttttatgttaggttcaagcgagtacatgttcaggtttgttacatgggtaaattgtatgttcctggggtttggatatacaaattattttgtcagtcagctagtaagcatgtacctgttaggccatctttcaaccctcaccctcgtcccaccctccaccctcaagtagaccccattgtctttcttgccttctttgtgtccctgtgtactcaatgttactcagtgtttagctcctacttagaagtgagaacatgcagtttttggttttctgtttctgctttaattcacttaggataatggcttccagctgcatccatgttgctgcaaaggatagtatttcctcctttttatggctgtgtagtactccatcatgtgtatgtattatgttgtctttattcagaccaccatttatgggcgtctaggttgattccacacttctgctattgtgattagtgtgtaatgaatatacacatgcatatgtctttctggtagaatgatttacattcctttgggcatatacccagtcatgggattgctgggctgaacagcaattctgttttatcttctttgagaaatctccaaactgcttcccaccgcagctgaactagtttttattcccaccagcagtatataagcattcccatttctccacagccttgccagcatctcttctttatggactttctaataacaaccactctgactgttgtgagatggtctctcattgtggttttgatttgcatttctctaaggattagtgatgttgagcacatttctgaatgaaccatccagcttggcttcattgtttttttattgtttcacctgaagaacttaaagaaagaagtaaaagagatatatttgccctttgatttatgaatgaatgatgatgtcttagatctcaaatatttgctaaaaatgtagatacctttagagtacttctatacagaaaccaaaatattaaaattaacaaatctgcttccttcattagtatctcattctccaagtttgacatttgaatcctaattcctaaaaattgaatgttttggtaaatcatagtctgttctttagactacatttctttccttcttaagaaataattgcatatcaatatagctatctggatgtatttatctgtgtaaagaatgtgttagaagtgtaaccagattgcatttataaatattattataacactaccataaatagagtaaatagcacacaatatcagtagttcagcttagagtgactcatttgtcagtccagtcatagtcatcacttagaaataattcacaacagactttgaggtcctggagcgatgataaaaataggtgggatgaaagtacctatttggggaattgtctggaatgtttaataccatccagatgacatcatcataacctggtagtattaaatgtgactctggcactttcccaggctattcagtttttgtttttgtttttaattattgcctaaaaaaacagctctgggacagttaatgaaatgttactacatatattgaaatcagtaagaaaacccagctattgttctggaattatattaagagagttctgatgtttcagacagtatctcatcttgtctgtaagccagtattgcctcatgacatctcttctattattgtcttgaagtactgattaaagttgttttttgttttttgttttttttggagatggagtcttactctgccacccaggctggagtgcagtggcatggtctcagctcactgcaacctccgcctcccaggttcatgcgattctcctacttctgcctcctgagtagctgagattacaggcgtgtgccacaatgcccagctaaaatttttttttttttttttttttttggtatttttggtagagacagggtttcgccaggctagtctcgaacccctgacctccagtgttctgcccacctcagcctcccaaagtgctgggattacaggcttgagccaccacgcccagcctaaagtttttattatttaatcttcttatatgtacttgtttgcattggggactgaattttatttccttgtggttcccacattagcatttaggaccattgtcatagaggtgcttaaattttttgttttaatttctgcttaatgggactgtacagattattaacctgagtttacagtttcacattatttttcagtgctttttacaaatgtaaattagatcaagtctctcatctacttaaagtccttaagtggctatcaatattttaagatacagacccccttgttaggcctagaaatcctcgcttagtttgactttgacttcttcagtttcatcgtacgccttcctccttccctgttctttatgtgttagcctcattggtctcctttcagttttgtgaacgtgctgcacctttttttagaatgcttttctcccagttgaaatagtatcttcaaaaagaagcctttcatgatcaccctgtctacagtggcctcacccagatactttccagttgatcatccctgtacctctaacatttattgccccctgaaattgtaatgtttgtctccttattcattgtctttttctccactcaaatagaagtttcatgaggccaaagtgccaagcatcgtgagagacacaaataagtcactcaaatatttgtcaaatggagtttattcttcaaactcaagtagtgta

SEQ ID NO: 98112 - DNA, 18750 bp, Homo sapiens
aaatgctcccttatctatatctctgtttatggatgtcctctgcccaaaatgcacaccctacttgcctaacaattctcccttcacattcctgcccttgttttaagatccagctttcaaacgctaccttatacatgtaccaagcactactgaggatagaagaaagggataaatcacattacctgccatcagttagcaaaatagtcaatgtggagagctcagcaatagatgtgtctgtaagagatcccttgattctttatcccactccccaaacttactcgtatggcagtgtttccatccaagttaatgacacttccaatcttctaggtattcaggtcaaaaacctagtagtcttgcttaattcctttatttctctaaccccacacctctctcacccacacacaaatgtttaattcatcagcaagtccttccaaatattatccaacccaacattttaccaccttggtccaggtcattatctcatttgcattactgcaataacctcctaatttgtctctgtacttccattcttgccttcccaagtgcttttctctaagaataaataagacagtcatgtctctcacagaatataatcccaaatgtggagcctaactattaacaggagcatacattacttcacattagagtaccgcattctgcagaatcctaagctaattttccagtgtcccttagagatacttacaacagaaggccccaaaatccagagaggcaaagtttaatcacagttgaacgattactgttaaagactagggaagaagtaacagaaagtagcagaaagaacatgggctttagagtcaaacagacccaaatgttaaccctaaatctgacactttattcgttccatgactttcaaccacagaattaaaatggtgatgattataataataataccaaaattaatgtggaatatttgcaatttcccaagctaataaatgttagtctgatgccaaaaactactctcataaggtgatttaatgaaatgatacaacaaagttaagggaagagtaattgacagtgtggaaaacatatttatatttgatgagacacttaagttctactgcctgttcaacaatagagcatctaaagtacaagatgctgttttgtttattgttttagtcacttctcgggaccaaaatattacacaactccaaatgtcaccaatcacattataatctataagtttcagtaatagagtcaaggtatctttaagatcaactaacagtaggccgggcgcggtggctcacatctataatcccagcactttgggaggccgacgcaggcagatcacgaggccgggagattgagaccatcctggctaacacggtgaaacctcgtctctactaaaaatacaaaaaaaaaaattagccaggcgtggtggcaggtgcctgtagtcccagctactcgggaggctgaggcaggagaatggcatgaacctgggaggtggagcttatagtgagctgatatcatgccactgccactgcactcccgcctgggcggcagagcaagactccgtctcaaaaaaaaaaaaaaaaaaagatcaacgaacagtagctatggtcacaaagtaaaagattttacaaaaacaaaaatccagaaaggactactggttgcaagttggtaattttcctccacatcccccgcaatgaaggatcacactgcagaaaaggatttaccaaactaccgaggtataacatataggtgttgttgaatctccttcctaaactgggactgcattgatgctacttgctgctgggtgagggccttgtcacaggtctggtaggtcaatctatagcagagactgacctgttgagtctttggatgctggaaacggctaagaaactgtatggatataatagtgtcctgagacactgctcgggccacagtgtgaaactctagttcatcaaatcctttcttctgatctatccaaaaactaacatcatgcacataacatggaggatacagagaatgacttttaaagggttctattttgccagggacaaaatttttcaggaaacggttatcaaacgtccacaacattctccagtcagagatacaccagacaagcatggctaataagtccaagttcatagacacaaacacaaaacactggtctttatgtataacactagtggcagatgtgataacagacccaataattagatcctcagtacaatctgggctaaaattatgagtcttcacacgaatcatataatcctttccatttgactgaaggacaaatttgactaaactgctcagcttagagctctccggcaatgtctgggtcagcaggctatctagaatgcccttcagatgatccagcagtgattgaagacagccatccttcagattttgattaaccccaaggataaataaagtttcatgaaatgctggcattgtgaaaggcaaaatgtggcacttctgaaagacaggtccactgaggatgtgcagagaacctgagaggaagtctggtacttcgatgacatcctgaacatgcactaggagagaaggtctaaggcagatcttggcctggccacaggttccttcacaagcttcttctttaccatctcttccaggattcttgagaaggctaagttctgaaaatgacactagaaagtcttccacatcttgtgatgtcccaccagtcagggactcagaatttgagttatcttcatggagactaatccaaaaagcagctgacagaaagtcacaattccagaaaggaagaacactggtaccttcctgtggcagcaaagggtaggaacacttcagcctttttagcgggaaaactttgcctaattcagcaatgagtttctcatttatggttttgataggatgacatgaaggtgcttccaggaaacccctgtttaaacacacacaaaaataacttttctaacttaagatagtaaataattataatgtagctagaattaaaaatacaaatagctggacagaaaagaattatctttaaattgatcttgaaaggaaacaaagaaatcatctaccataaggagaaacagacgtgtatttcagaactctgacagccaccatccctacaatatatcagaaaatgtgaccatttataattctagagatgcttaaggaggccaggctgacaaataaacatagcaccaacatcactaacaatttatgcaccatccattcaatatatggttgccatcaagacaatcaggatacaactggagatggaagtgatttccagcaaaataactggttacctgttcaactttcctacaagtgcttctggttctggaaaggaaaaccactggttacccagtttgatcctgaagattctgggttgagaaccttcaaaaggtaagctcctggtgaagatatggttcaaagcaccttctacatgaaaggacttatcttgactcctggcaaaatagacaccaatatgaagtctgtcattattaaaataagcaagtatttttagagactgaatcaattaattggcagggcctattgagtctgtctatgagattttgttatcattagtgagagagatgaaaacgcagaaggcttaaacctatgctattacctacctatatccagtgcacttgtaccctgccacagccttacagctgaatggatacacgtcgcttaaaatgagcccccccagggctgccatggcaaccacttgccaactgttgtgccattctctctggggcttatccgcaggagttccaccttgtcctctacataatgccacgtggacttctccttcctctgcaagaacgtctgcacagctaatagggagaaaagaaacactaactaattatcataaacaagcagaaattaccacaggagttggcaacatacacatggtttgcctgtgaaataattaaaatccaatcatacctatgtgcaaaaatctattagacctcaaaaaatgcaaagaaagtagctggaagtaaatagaagcataaattaaatgttcaacccactcactgataagattggctgaccagggtctgctttgcatttgtgtcattcatgcatatgtcacagaaagatcaatatctgcacagttcctatatatgattcattgcttaggctgtttcttcccatttagaaagttcttttcactgccctcctgaaattcaaatactagtttaaaataccacctctgtcaaaactttattgacagctatgccccatcggacacctccaatagtatcatgtcttgtggtataatcatgtaaagcactgttttcagttcacaataattttatgaggctgttagttactttttttttttttttttttttgagatggagtcttgctctgtcgcccaggctggagtgcagtggcacgatctcagctcactgcaacctccacctcccaagttcaagcgattctcctgcctcagcctcccaagtacctgggactacaggcacgtgccagcacggccagctaatttttatatttttagtagaggcggggttttgccactttggccaggctggtctcaaactcctgacctcaggtgatctgctcacctcggcctcccaaactgctgggattacaggcatgagccaccacgcctggcccagttagttactattaatatccctagtttacagttgaggaaacggaagcatgtaaagattaagtaagcttgcttaaaataacaactgttggccgggcgtggtggctcatgcctgtaatcccagcactttaggaggccaaggcaggcggatcacaaggtcaggagatcgacaccatcctggctaacacggtgaaaccccatctctactaaaaatacaaaaaattagctgggcgtggtggcgggcgcctgtactcccagctacttgggaggctgaggcaggagaatggcgtgaacccagtaggcggagcttgcagtgagccgagattgcaccacaccactgcactccagcctgggcgacagggcgagactctgtctcaaaaaataaaaataaataaaaataaaaaaataacaactgttaagtggtgggctgggatttgaatccaggcagtctggcttctaagtgcacgttcttagccattagactatatggctctcattattttgcactgtcaaaaataaatgatcctcttttacacacccaagagtacattatttgtactttcatttagcatttagggtttatatatctgtctttccaactaaacttggggttcctttggggctttatagtctcttctaaacatatcatagtagcttgcacgtgtgccttatgtttgggtacagtaactatgttatggacatcttaaacattttccttgtgagggcgctcctttcctcacctttggaaaaatttggcaagcagttccctgttcttagctacgccagctttgcgtccacaatgcgggaagttgaaataaatttgatcaaattctctctcgtgcagttcaaagacatctgccagctgggtgcagtccacaccgaaacgtacatcgatacctggcaaagatagtttgggggcgcaaaatatagacaggaggatgcctcaagacatggaacagaaaaactcttcctaacttaaaccgtgcagaccagcccaagtctgggcacaaagccggctttatgtgaatatccgtgggacgatcaagaacaatctccacgtgggttacatccccacgcccccaccctttccactttgggacgcgccggccgctgggcggggtttcgcagaggggcgggctcgctacctcgctcgcgcaggcactgcagattctcccaggccagtggatcccgagccaactcggccgggcgctggaggcaggtggcggtaagttgagtgctctgatccagggtttcgctcagagcggcggcgaaggagaaattcccctccccaaccaacaggaggcgccgaggggccatggcctccacggactcccggctcgcgttctctgtggcgctcgttttacgtcacttccttcacggatctctctccgccccgtcttctcccgtcactagttgatgacgcacccatggcgcctggttgtctagacgagccggtgtaccgactccccggtggatgataactatgagtgcaaaagcaagacgcgcactttcctgtcacctcgccctttcaccccctcgggaagatcaaagtgtctttagcccaagcatggccttgagcgacttcatcacacctgcatgaggtcayaagcagtcactagcgcaggggggtgaggcgagttctgggtgaaagaaacggggcggggctgaggccaaggaagaggttggactgtgtctcgcatgctcctgacgcagaaggttttgaaccttttttcacctcgtctgaaatggctgcctcccagtgtctctgctgctcaaaatttctcttccaggtgcttaaatctcctatcttctattcgttcaagaaagagtattgagtgtctattgcgtgccaggccactgtgagggtggttacgatatgtggatgaacaaratgtggcctatgatttcaatgagcctgcagtctggtggggaatgcacagagcaaaacaggcaactctgatatggcagggtgtgtgctctgggagcacacagaagaacgttaccaagtttgggggcgaagagggtcagagagtccttggatgaagtaaacccgagttgaaagctaacagggtaaaagtgcatcttaactgagtcaagaggcgtgaagaggcagaaggaacaatatatgcaaaagcttgatggagaaacagaatagttgagtttggctgaaacacaattggagggagagtaacagatgagactgaagagttaggcaggggccaggtcatagggagcgttgtaagcctttaaaaaaaatcaacttttattttacaaatgggggtacaggtataggtttgttacgtggatatattgcacccaggtaggttgcaggtttgctacatgggtatattgcacctaatagtttttcaacccacaccacccgccctccccactctagttagtagcctggagtgtctgttgtttccatgtttaggtccatgtttgctcaatgtttagctcccacttataagtgagaatgtcagaggtatttataccagagcaactccgtcttgaataggggctaggtaaataaggctaagacctgggctgcattcccagtaagttaaggcattcttagtcacaggatgagatagctcagcacaagatacaggtcataaagaccttgctgataaaacgggttgcagtaaagaagccagctaaaatccaccaaaaccgagatggtgatgagagtgatctctggtcatcctcattgctacactcccaccagcgccatgacagtttacaaatgccatggcaaagtcaggaagttaccgtatatggtctaaaaagtggaggtatgaattaatccaccccttgtttagtatataatcaacaaccataaaaatgggcaaccagctgccctcagggttgctctgcatatggagtagccattctttattcctttactttcttaataaacttccttatgctttatagactcaccttgaattatttcttgtgtctcttggggtctggatcaggaccccttccggtaacaagaacatgctgtatttggttctctgttctgttgtaagccattttaacagactgaatcttactctgaaaacggtggaaagccactgaaagattttaaataagaagatgatacaattatactttcactttgaaaaattctcctttcctgtggagaaaggtttggagaggaacaaggctgatggcatggcaggataaaacaagaggcaactgcaataatggagacaaagctgacagtgatttgaattgaaatttggcaatgggaatggagggtggcagtctgattcaaaaatcaacaagacttagtgactggatgaaaattaaagacaagtcagagtcaaagataagccccaggcttctggcttggacaactgagtggatggtgatgtctgtcattccagccctagagacagttacacctagatctccagtatgagtaccaggcccattggactttgtggcaccagctactctggtcatcatgttgtttggtaacatcagtgcatgcrtctgtcttcacaaaggcagatggtatgagggtagttacctgggatgtcatccttcaatgctgcattattggctttgtttctgcctgtggaaaggcaagtgggtggtgactcccaaatcatggccacttgcccatggtaatctgggtgattctttctttgcttggagaactgggaaagccaggtttgttgacatctttaaagaacatggaacagccaagtaaggatttctgtgactctcataagaaatcttcaaagagctcaacctactcagcatcaagttactcttcttcaggaaaggtatcatcttcctaagtcagggggccagactcacattttggggaaaaagaaagattgagcttttatcttaccaaaaaaaatgaaatcagacattgatcatctggtatatgcaatccagattgattgggagaacaggcagaaggacagggtacaataatgaataaaacagatcctgtccttaaggggcatacagctctgtataggagatataatgcagacttaaagaactctaatgtatggtaaaaagttataaatacagggaaagataaagttttatgtgagttgaaagagaagctaacttcagggaaggcatcatttgagctagaaggaaggaaatgatcatttattactcatttattgtgttatctagttactcaactctcacttctttttgttctctttgactgtagcagtgcttttagtccctcaatgcctacatctcaaaattaccttaaaaatttagctaattctccatattgtattgggaatactgaagtttttcctgtctcttcacggggcctggggagcgggggtgtggatttaatccatgtagtcacccactgttgctgattgaaagaatggatcaaagggtcccaggacttagagaagaagaaacagaaccataacatagcctggatcattagtacggtgtgcttgtgttatacctggctatgtaaaacaagggcaggaaaagatgctttttctcttctctggtttatgcaataagcttttctattcttgtcttttcccagagacagaacctcgcctgtttcctcacaaacccacactgtggcagccttgttaatgcagatggccatggtgaagygtggacagattggaataatatgtccaagtttttccagtatggatggcgatgcaccactaatgagaatacctattcaaaccgtaccctgatgggcaactggaaccaggaaagatatgacctgaggaatatcgtgcascccaaacccttgccttcccaggtaatctaactttgtcttttttgtttgtttgtttccttctgttggcaaaagaaatgtagtggccatttgaaatgcagggatgtaataacttctggtgcagtgatctctcagttttcagtgaagtggttggggcagaggaacagtccgcagctgaaccacctatgctactttactgtcaagttgaatattttattatctgtaaggtttcaaaaggaagggcagtcctctttttctcttacttctgtttggactttatctcttagtctacagaaatttataatgtcttctgacttagactagcttttcccctggtccttgcctatctagacttgtcatttatctgagtcttgcacttaaatcgctcctaaacaaacaaacgtacaaaacatgtgaaagttagaaggatatagactaacaccatagaactcagtccatctaaaatatgacagtccgtgagaattcatgtcatattgatctttatttcctgatgttagctgtagacttccagattcttaatctgttaatttttctttccagtttggacactactttgaaacaacatatgatacaagctacaacaacaaaatgccactttcaacacatagtacgtggactgttttttcaaattcttacattttcagaacctaactcagtgaccggcacatagaaggaactcaaataaaagtaaactgaataggtgaataagtgaggctgggcgcagtggctcacacctgtaaccccagcactttgtgaggctgaggcaggcagatcacttgaggtcaggagtttgagaccagcctggccagcgtggtgaaaccccatctctactaaaaaaaatacaaaaattagctgggcttggtggcgcatgcctgtagtcccagctactcaggaggctgaggcaggagaatcacctgaacccgagaggtggaggtttcagtgagcagaaatcaagccactgcactcctgcctgggtgacagagtgagactctatctcaaaaaaaaaaaagaaaaaaaaggtgaataactacatgaatgagtaaacaggwttttttcttcaattttaacaggacttactgtctattccctagaaataagagcaagatcagttactaaaactccttagtgttgactgttttcatttgtctttccttcctttttttttcttccctcaggatttaagcgagagcctcactggttcccaggacatcaacctgaactggatcctccccgatacaaatgcacagaaaagtcmacttacatgaatagctattcaaagccttaaattgggcatcactcaggatgtgtataagatcttaatattgactagtttcacatccaggtttctaagaaatgataagatacttcacttttccagagtgaaatgtaggagggagcacattctaagtacagctaaaaatttagctcaytgtaacacagtttcactctctgaataaataaagcaaaaaacacagtaaatattctttatccctttttttgttgttgttttaaccaagatttaaatgtcaaatttaatacagcaactcagttctacatttggggtgttgtagaagggccttaaaaagaattattttaggccaggcacggtggctcatgcctgtaatcccagcactttgggaggccgaggcaggtggatcacgtgaggtcaggagttcgagaccagcctgaccaacatggtgaaacactgtctctactaaaaacacaaaaattagctgagcatggtggctcacgcctgtaatcccagctactcaggaggctgaggcaggggaatcgcttgaacctgagaagtggaggttgtggtgagctgagatcatgccactgcactttagcctgggtgacagagcgagactctgtctcaaaaaaaaaaaaaaaaaaaaagaattatttctctgaagtctacaaccactgtggtcttcccttccttctgtcgtagcaagacctcagaatctagcataacttaggctaggtttggctagatgctttctgggtataagccagagtcgtatagtgcaactttgctgtgaccttagtgaacatcccctcttgaggactacaaaaacaaacgtaactttttaaaattattatggagaattttaygtaaaacaaaagtagacaggctagtctaatgaactcccatgtatcattacccagcatcarctatttatgactaatcttacctacttctactttgtcttattgaattaattttggagcagatcttagaaatagaatttaatctataaaaatcttggtgggctgggtgcggtggctcatgcctgtaatcccagcactttgggaggctgaggtgggtggatcacctgaggtcaggagtccaagaccagcctggccaatgtggtgaaactccatctcttctaaaaatacaaaaattagctggtcttggtggcgggcgcctgtaatcccagctacttgggaggctgaggcaggagaattgcttgaacccaggaagcagaggttgcagtgagctgagacggtgccattgctctccagcctgggcgacaagagygaaactccgtctcaaaaaaaaaaaagaaaagaaaaagaaaaaaaaaatcttggtatactggctgggcacagtggctcacacctaatcccagcactttgggaggctgaggcaggaggatagcttgaggctgggagttcaaaaccagcctgggcaacatagcaagaccccatctctaccaaaaaaaatttttttaaagatttcagtatatttctcaaaaagataaggactgtcaattgtctactcccccccaacaaaggtcactaaggaaacctgttgactaaacaaagctcattaaacctattgtagtgtagcaaaggagaccatcaacttgacacagagtcttggtaatgattcaaagggaggatgttagagtaaggtatttataaggatttgagataagggtccaactggtttaaaatgagtyaaaatagggaactagtagagactgagaaagggttgtgaatagcttaggtttggtaaacttaggaaatcaacagtcttaattttaatatggttaaactgattagtatttcctatttttttatctactgtgtaagaagacactataatatatgggcattactgagagataytgcccatatgttgtcctcgtaagcaaggagatattttttatctcccatatattacctctcaaacctttgttactttagtttcgagatatagatccagaatttatgttgttactcagtagtgaggaagtttcttttttttttctaaatggctatcaagttgtcccaccattagttattgaaaagaccataattttttcactcctattcaatgccatttttattgtaaataaactatgtacatgtaggtctgtttctgggctactatgttctattagtttaattgtcattccttgtattatcttagttatgatgccttaattgcaccatcttaattatgataattttattacattattattattttatatcttaatacctaatagatcaaatgctttcgtcttgttttcttcaagaatattagctatgtttgaacttttgcatttccatataaaatttagaatcagcttgctccataaaatgacactgttaggatattgattgaaacggtattgcatcattaggtcagttttagaatttgagttctcattaattctaataatttatttgtatgttcttacaatacaaatattgttttatagacacatattttaagtttacatatcgtatgtcttattctatttcctatgtatctagcacatttttaaaattgaggtaaaatatacataacatggctgggcgcagtggctcatgcctgtactcccaacactttgggaggccgaggctggcggatcacttgaggtcacgagtttgagagcagtctggccaatgtggtgaaactttgtctctactaaaaatacaaaaattagctgggcgtggtggcaggcacctgtaatcccagctactccagaggctgaggcaggagaatctcttgaacccaggaggcagaggttgtagtgagtcagtatcatgctattgcactccagcctgggcgacagagcgagactgtctcaaaaaaaaaaacctatactatatatatatatatatatatatatatatatatatgtatgtatatgtatgtatatatatacacacacataacataaaatttaccattttagcttttttgttgttgttgttcatagagacagggtttcaccatattgcccaggctggactcaaactcctgacttcaagcagtccacctgcctcagcctcccaaagtgctgggattacaagcataagccaccatgtgtggcccattatagctatttttaagtgtgtaatttagtggcattaagtattttcacaatgttgtgcaatgttcacaatgttgtgcaaccatcaccactatcaatttccagaactttctcatcatcccgaactaaaactctgtacctataaaacaataatgtctcattccccgacccccactccctcagctcttggtaacctgtattctactttctgtctctatgaatttacctattctaggtacctcatttaagtggaattgtgtaatatttgtccttctgtgtctggcttattttacttagcgtaatattttcaaggctcatgtatgttataccatgtatcttcctttttgttttgagacagcctctgtcacccaggttggaatgcagtggtgtgatcatagctcactgcaacctcaaacttctacactccagggatcctcccacctcagcctcccaagtatctgggactacaggtgcattccaccacgctcagctaattttttaaaacaaatttggatacagggtctcgttttgtttcccacgatggtgtcaaattcctgggttcaagcgatcctcccacctcagcctcctcttctttaagattgaataggctgggcacagcggctcacacctgtaatcccaaaactctgggaggccaaggcgggcggatcgtgaggtcaagagattgagaccatcctggccaacatgatgaaaccctgtctcttaaaaaaatacaaaaattagctgggcatggtggtgtgcacctgtaatcccaggtactcaggaggctgaggcaggagaatcgcttgaacctgggaggaggtggttgcagtgagccgagattgcgccactgcactccagcctggtgacagagcgatactctgtctcaaaaaaaaaaaaaaagattgaataatattccatgcatatatataccacagtttgcttctccattatctgttaatggacacttgggttgttttcaccttttagctattgtgaaatatgctgtaatgaacattggtatacaagtatctgtttgtgccctgctttcaattctttgaggtatacattcagaaatggaattactggatcataccataatttctatatgtttttgttttttttttgtttttttttttttgagacagagtcttactctgtcacccaggctggagtgcagtggcgtgatcttggcttactgcaacctctgtttcatgggttcaagcggttcttctgcctcagccacccaagtagctgggactacaggcacacaccaccaagcctcaccaaattttgtacttttagtagagacaaagtttcgccatgttggccaactgatctcaaactcgtgactttaagtgatcggcctgcctcggcctcccgtagtgctgggattccaagcgtgagccaccacgcctagccaataattctaatttaacagtttgaaaatgccaaacttttccataatggctgtaccattttatattcctaccagcaatacacaagggtttcagtttctccatattctcatcaacgcttattttgtttttgtttatgtcttataatagccatattagtggatataaagtggtattccatggtggttttgattcatattttccctaatggctaatgattaaacacctctttttccttttttttttttttttttttttgagctggaatctcgctctattgccctctgtcgcccaggctggagtacagtggcaccatctcggctcgctgcaacctcttgcctcctgggttcgagcgattctcctgcctcagcttcccaagtagctgggactacaggcgcgtgccactgtgccctgctaattttcgtatttttagtacagacagggtttcaccatgttagctaggctggtcttgaactcctgacctcaggtgatccaaccgcctaggcctcccaaagtgctgggattacagacttgaccttgagcatctttctgtgttctttttggctatttgtgtatcttctttggagaaatgttttttcaagttccttgcccatttgtgaattggtttgttgatttatttgttgttgagttgtaggagttctttatacatccttacatgttccagatactaatttctaatcagatataagatttgcaaatattttctctgattgtgtagattgttgtttcactctctctctctttttttttttttaacataaattaacccatttgttataggccagagatgtctcaaagagtagaggagcatctactggtctttcaattccttcagtcttctgatggcagacttcaccatgacagccgaagtggtgttgtaggtccaggcactgccagccactgtcttcatgcaggaattacagtgcctgattttcacagctcgtctcttcatcttggttttgccacagaaagagcaagtgtacttggtgtgctggctgatttcaatttccttcaccattttccagagggaggccccatggtgggtcctgtatttactgactattccgactttcttttttttttttttttctgagattgagtcttactctgtcgcccaggctggagttcagtggcacgatctcggctcactgcaacctctgcatcccaggttcaagctattctcctgcctctgcctccccagtagctgggactacaggcgtgtgccatcatgcctggctaatttttgtattttgattagagatggggtttcgccatgttggccaggctggtctcgagctcctgatctcaagtgatccagccaccttggcctcccaaagtgctgggattacagacgtgagccaccgtgtccagcctcattccaactttcttggtgcatttggccatgtcaccacaaactaggtccaagcccagagaggaagatgttgtttcactctctagatactgtcccttgatgcacaaaagtttttaatgttgataagtccaatttatctattttttgttggtggtgcctgtgcttctggtgttatatccaagaaaccattgctaaatacagtgttaaaaagctttccccctattttcttctaagagttttatagttttagttcttacaaaagaggtctttggctgggcgcagtgactcatgcctgtaatcccagcactttgggaggtcgaggcaggtggatcacctgaggtcaggatttcaagaccagcctggccaacacggtgaaacccatctctactaaaaattcaaaattagccgggtgtggtggtgcatgcctgtaatcccagctacttgggaggctgaagcaggagaattgcttgaacctcggaggtggaggttgcagtgagctgagatcacaccatgcactccagccttggcaacaagagcaaaaccctgtctcaaaaaataataataataataaattaattaaaaataaataaaataggtctttgatacttttggaattaatttgtatctatagtataaggtatatataaggcatgggtccaacttcattcttttgcaagtgaatattcagttttcccagcaccatttgttgaaaagattgtcctttccccattaaatggtcatgtcacccttgttggaaatcatttgcccatatgcactaaggtttatttctggactctatattctattacattgatctacattctgcctttttgccaatatcacaccattttgattactgtagttttgtaataagttttgaaatcagaaagtctaagtcttcccactttgttctttttcaagattgtttcagctcttcagggtcccttgagattccatatgaattttaggatagattttttttttctgcaaagtcattggaattttgatagggattgcattgaatctgtaatcagtatggctaatattgatatcttaatattaagtcttccaattcatgagcacagatgtctttccatttatttatgtcttcttaatttctttcagcaatacattatagttttcagtgtataagtcttaccttcttggtttattcctaagtattttagtctttttgatgttattgtaaatagtattgttgtcttaatctttatttcaggttactaattgttaatgtatagaaatggaattgatttttgtttgttggttttgtgtcctgccactttgctgaatttgtatattagttctaatggtgtgtgtgtgtgtgtgtgtgtgtgtgtgtaatctttagggttttccacatgtaagatcatgtcatctgcaaacagataattttacttcttcctttccaatgtggatacttttatttctttttcttacctaattgctctgagcagaacatctaataatatactgagtagaagtggcaaaagtgggtatccttgtcttgatcctgatcttaaaggaagaccttttattttttttccaaggactggcaataggctaaaacttttagttttggtggaatttttgttttttgttttgttttttatttgttgagagagggtcaagtgctagagtgtagtggcacgatcttggctcactgcaacctctgcttcccagactcaagctatactctcacctcagcctcccgagtagctaggactacaggtgcatgccaccaggccatgctaatttttgtagtttttgtagagatgaggtttcgccatactgcccaggctggtctcgaactcctgggcccaagtgatcctccagcctcggcctcccaaagtgctgagattacaggtgtgagcccccacacctggccgaaacttttaatttttatcattgagtttggtgtttgctgtgggtttttcatatatggtctttattatgttgaggtagtttccttctactcctagtttgttgaatgtttttattgtataagggttttgaattctgtcaaatgctttttctgcattaactgagatgatcctgtgggattttttccctctattttgtaaatgcggtgtattgtattgattgattttaatatgttgactcaaacttgcatttcaggaatatatttataatccttttaatatcctgcgaatttggtttgctagtattttgttgaagat

SEQ ID NO: 98113 - DNA, 42817 bp, Homo sapiens
ttttattgattacttctcaaatctctcttatattaactagtgtatcaatttctagaaagaattctctattttttcctcaaagaaaatatctagttataggtccttttgagtacaaaggcaaactattccatataccatatagaccttcgatgtattttcttgatttccatcaactttaccttttatcttctctcttacttgctatcgctagttctggctactctgtggtattctgctggaaggcagctgtctcctttggctgcagtccctttccatggatattctaggctgctgcttcttcagtcaatatccttccaatttcttcaaaaatgtatgaaaaatcttccatactgaccatgctgatggtcaaccacacctcctactttttgtttttataaatatatacccttttaagtcttttaacaggtattttaataaaatttcaaaagaggggtcaaatgtgcatctttctttccttcttacctcctttcttttcttctctctttctctctctcaatctctctctttctttttttttggacaggattttgctctgtcacccaggctggagtgcagtggcacaatcaaggctcactgcagcctcaacctcttgggctcaagtgatcctcccacctcagcctcctgggtagctggaactacaggtgtgcactaccacacctggctaatttttattttttgtagagacagggtttcaccatgttgcccaagctggtctttaactcctgaacttaggcaatcaccctgcctcagcctcccaaattgctgggattataggcatgagccaccacacttggcccaaatgtgcatttttcttccatctttaatcacaattcctagttgattcctctctaatagatgcaaaattctcatgtctctctataaatgttaattatatttgttctaaactatttttctaacttgtcctttttaaatttttttttcctttttcctttacttaagagactttgtcacccagggcagagtgcactggtgtgatcatggctcactgcagcctcaacctccctggctcaagcgatcctcctgcttctgcttcccaaatgctaggataacaggtgtgagccactgtactcggccttgggttttgatgtttcttgaatattataccctttttttgtttgctgggttttttctttttcaaatgtagatcttttgagtgtgtgtccaccttggtaactgagattccctgttagcctatgcacaggcgggatctgcttattgcattccacctgcagggtttttgaagaagaaaatggtagatgtggagtttgacaaggtgtgtatcttagtccattttctgttgcttataacagaatacctaaaaatgggtaatttataaagaaaaaaattgatttcttacagttatgaagcctgggaagtccaaagtcaaagaggcatacctggtgagagccatcttgccggtgggactcccttgaggtggccctgggcagtgagcctgtggagagtaccctgacctgtcctctgaaactattctgtcctcctatgcctctgggcctgtgatgggaggggcaccctctaagatctttgaaatgcctttgggatctttcttcccttgtctaaaggaatggtatctgtctcccttttatccaaactaatctctttagcaaacagtcactgggctgcacccttggtttcctctgctgaacatgcttttttactcttcatgtggtcaggctgagagttatccaaatccttccactctgcttcccttttcatgataaattctacctttaaattattcctttgctcctgaatatcagcataagttgtcaaatgtaatcatgtagctccttctatatttggcttaggaatttcttttgctagataccctagttcattaatctcaagtttggccctccacaattccctcaggcatggacacagttcagccaagttctttgccaatttataacaaggatggcctttactccattttccaataccaccttcctcagttccatctcaaatctcagcagaatggcctttactgtccatatttctatccgtattctggttacaatcatttaacaaatctctaagaagttccaaatgttcccttgtctttttgttttctgagtctcgccagaatcacccttaatactccattcactgaaatacagtcactttatagcctgctccttcaaactcttccagcccctgctcattacctagttccaaagctgcttccccattttcaggtatttgtcatcagcaaaatcccacttcttggttccaattttctgtcttcgttcattctctgttgcttataacagaatgcctgaaacaggataagttataaagaaaaggaattcatttcttacagttgtggaggctgggaagcccaaggtcaagggggcatctcttaagaaccttcttgctgctggcaactctctgcagcatcccaaggcagcacagggcatcacatggtgaggaagctgagcgtgttaacttgctaactcaggtctctgttcctcttcttgtaaagccaccagttcctctctcatgacaacacattaatccattaacccgtgaatggattagtccattcatgaaggcagagacctcatgatcaaatcacctcttaaaggtcccacctctcaatactgcacattggggattaagttttgaaatgaattttggaggagacacgcaaacctagtagtgggctaggaccagtctcaacgtgtggggcctctctcttcctcctaaatgtcagaagccatccagggcactgtcctgccttttcagtaaaagtatacatggactgcctcccgccacccccaccaccacctttaggggaaaattcttctgctatccaccgcaagcacaagtagggataagcttgagaggctgacctggctcttcctacagtggtacttcaatcaataactcatagaattgtctaagggccactattgataacaaataccttctttctgtgtgcttagagcactccaagagtcacttccatttctgtataaggcctttattatgcaactgttgtttgtccaccttcaattccatcccatgtgccttctatttttcaagtattcttataatgtctggcccatgagagcacaccttcatgtatttcaattctgggcatgttcatgtatgcacaagtgtgtgtgtatctaagttttctgtaattttcagagatttttggaaaaggggggagaagtgggaaaaggacagaacttgttgtctgccatctcagtacaatctccttgctaaatttccaattacatattaaactcttttaatcccaaacacagacaactgctagtatcatatgatctaatttggaaatctctgcttctgagatgatattatatgatctcaatttaagacttggtccccatactaaacctgacatctgcatgacacatgtgaataaatttcattcttcatccacaaaattatctttcagattttaatactggatctcaaaagtattgagagttctatattacagagattcttacaaatacaaaacagcaatacatgccaggcacggtggctcatgcctgtaatcccaacacttcgggaggctgaggcaggcagatcacttgaggtcaggagtttgagaccagcttagccaacatggtgaaactccgtctctactacaaatgcaaaaattagctgggtgtggtgggtacacctgtagtcccagctactagggaggctgaggcaggaaagttgcttgaacctgggaggtggaggttgcagtgagccaagatggcgccactgcactccagcctgggtgacagggcaagactctctcaaataagttaattaattaattaattaaatcaataaataaaacaagtttaaaaaacagcaatacaaataatctttttgcttaactataacaaaagagaaaaaaataacttttctaaaaaaaagttgtgttaaaattcaaaaataagaaaaagcaactcaaaaagatccggaaacattacttccttatcactcatctctaaaattacttcaaccaacagtcttttgccaacgctaataaattcagaaataatttaacactatttgagagttgccatttaaattccaaactttgaaatctaaaatagtctctgatcagatgtacaatggaaattttatagaaagatcattacatggtaaattggttgcaaaaagaagaaattttatagaaagaaatacaatcctgaaataaaataaactaaaaatattcctaaggattaattctaaagagttcaacaaaacaatttttaatatatttttaaaatatttaatgcacatctaacatgtcccagacactgttctaggcatggggatatttcaatgaacaaaacagacaaaactcactatttttggaatttacattctagtatatacatatgatcatataatctgaataatatgaacttggccttttcctatagaaattactaataaggtaaataaatgttttaagaccaaacacatatctcccatagctgtctatcacacaacaacataaaaacatatttgaaaatatttataacacagagagacttttagctactgacttcaaaacattagaaaataaagatcttgtaagagaattcaagtaaagtcaaatgtcctaaaacttacctgagttaaatgattcacttgtaaagggaggtattgaccagattttaggtaagtgtactagattttagataactcttaacagatgttaatttatatactaaaactaaatatccaaaataatccagatgtcagaaccgtggacataggaaaatactgggtctaggaggagcaagattttgatcatctacagtcccactgtacaatatggtagctactcacgtctgtggttaactttgaattaattacaatttaaaaattaaaaattcaggccaggcacagcgactcacagctgtaatcccagcactttaggaggccaaggcgggagggtcacttgaggtcaggagttcgagaccagcctggacaacatggtgaaaccccatctctactaaaaataaaaataaaattagccgggcgtggtggcgcgtgcctgtcatcccagctactcaggaggctgaaacagaagaatcacctgaatcctagaggcagaggttgcagtgagctgagatcacaccactgcactccagcctgagcgacagagcgaaacaccgtctcaaaaaaaaaaaaaaaaaaaaaaaatcagctcctcagtcacgctagccacatttcaagcgcacaattgccacataaggccggtgactaccatgctggacagtgcagctacggtacatttccaataccgaaggaaagtcccatggcccgcgctgctgtggggaatcggaagaggcacgccattcccgggaagaacaaaaacctcctagagaggcttaaaaaatttgccattaacacggggaaaaaaatcttctatttccattcctccatcttattttctcacctcctagacaatgtttcttttttttattctttctctccctattttctcacatttttcctgcccttttttcttatttttctctcactgctttttctaacaacaaacatgcagtccatctttaatgatttgatgcatttctttagggttttcaaaatttctcaatgttaaaatgtaaggagctgaatgaacattatttctaatgtgttttttttttttaaaaaaagccatatttagaggagactgttttttaaggtatgtgaccttaggtgtgtttcccccacctgagaacattattcttccatagaaagggtttctcaccgttggaatccggggtgaaaaaaaatttgcaattctagttccggcctctggggtttccttgcaccggaggccgggctcagtcctctgggccgcgaagtgggcgcggaacctctcggtccgccgaactcctaccgccacctagcggaaggaaggcgcaagggcttcttcgtcactgacggttgccaggcaacggaggcacggcccggcccgcgttaaggaggagggcgcagaccgarggacactgaaagagctgtaacaaccccactttcgattggttgaagagctctcagccttctcatgagccaatgagaagaggcacgcggatggcgtcagacgctatgcgactcctcccacccacgctctggcaatgcgatkggagaccgcggaggcctacgtcggacccggaggccctgaatgccccatgcgcaccccacagctcgcrctcctgcaagtgttctttctggtgttccccgatggcgtccggcctcagccctcttcctccccatcaggggcagtgcccacgtctttggagctgcagcgagggacggatggcggaaccctccagtccccttcagaggcgactgcaactcgcccggccgtgcctggactccctmcagtggtccctactctcgtgactccctcggcccctgggaataggactgtggacctcttcccaggtgagggaaaacgttgtgggggtggaaacttacttctgagatctaaaattctgtgagcaaagttgagctgccacaaagcaggagtggggctgtcggaagaaggagggtgagcacctgggagagtttggggatcttcatcccactcactctgtgtcgtactttcatagtcttaccgatctgtgtctgtgacttgactcctggagcctgcgatataaattgctgctgcgacagggactgctatcttctccatccgaggacagttttctccttctgccttccaggcagcgtaaggtgagcttcgttgctcagactgaatcctaaaggggtttggggcctacaacgggtaacatttggatgtaagaagagttagtctttgtgcctcccacccgtacttccactcytaggacattcccttggtttttcctaggaattgccttttctgattctctagagcagggctggccagtagaataagaccttcgtgtcgtcctataggtgcccaaggagtcctctttggcatcatctggccgatattgctgggacactcttttttggacctgccccgccccttctaaatatatcttctccctcctctttcctcacaggtcttcaagctgggtttgtgtagacaactctgttatcttcaggagtaattccccgtttccttcaagagttttcatggattctaatggaatcaggcagttttgtgtccatgtgaacaactgtgagtagaaacatgttggttgttctcattttctaacacaggagtgttatattttgtcttccctggcccacattggaagaagaattgtcttgggccacacgtaaaatacactaacgatagctgatgagttaaaaacaacaacaaaaaaaaagcaaaaaaaatgtcaaatgttttaagaaagtttacaaatttgtgttgttgggctgcattcataagccgtcctgggctgcatgcggccggtgggttgcaggttggacaagcttggtctaacatttattgagaattggcttttattctggccttttttccatttcttttttttaaacttttttttttttgtcctttgaatctctacgcctctttctgcctcttctctcttattacggaatacatttgcatttttgtttttttttgagacggagcctccacctatcgccaggagtgcagtgcagtggcacgatctcagctcactgcaacctccacctcccggattaaagtgattctcctgccttagcttcccgagtagctgggactatgggtgtgtgccaccatgaccagctaatttttgtatttttagtagagacggggttttgcaatgttggccaggatggtcttgatctcttgacctcatgggccacccacctcgacccccaaagtgctgggattacaggtgtgagccaccgcgcctggccacatttgcaactttttatgttctgttggctatggatcagaaaactcataaagaactttaatttcaatcattttaatcattcctcttaactcagataatcacagatagactatattccccacttactacaatctccatgagggtactaactgaatccccagtgcctaacacatagtaagcaccaaataatgtttgaatgaacatctttgacaaatgagtctatgccaaccttattttcatttcatgaggcaacagtgtaggaggagcattagattaggatctcagtcctgccatttccttaccagctatacagacttgggcaaatcccttagcatttccaggctcgtttcttcaactgtaaagtgagaaataatatcattggctttgtatatgaaagcgctctacaactgtagagtacaataaagattagaggttattattattggggatggttagtggacttagaratttgctggtgatggctataacatttctaaagatatgaagctaatctatctttttaaaatgtctatgaagcaaaataatgttcctgcacaaaatggatttaaatgtctcttgcatcctggaagtcacctcatcctgatttcatctgactgttaataagaattgcaaaactatatttgtctcagaaaacaaccagtttttggttttgggggacttgaatttcaaagcagttatcagaagccttgtggttatttagatggtaatagggtaaagggaacaagatgaatacttcattttcagataaggttgtggcctgacgcggtggctcactcctgtaatcttagcacttgggaggctgaggtgggcagatcacttgaggtcaggagtttgagaccagcctaaccaacatggtgaaaccctgtctctactaaaaaaacaaaaaattatccaggcatggtagtgggcacctgtaatctcagctagttgggaggctgaggcaggagaatcatgtgagcctgggaggctgagattgcaccactgcactccaacctgggtaacagaacgagagtctgtctcaaaaaaagaaagttgtctcttcttttccaaacattttactgccttttaaatccagccttatgatcatgctccagggttattgcaatggcacctacctggtgctccctgcttttgatccccactcctgcccccgacaccatcctgcacactccttcgggatcagtggatctgaactttctttaaacacctgagggaggaatatggccacttccaatagtagttatggttcattacatcaatgaactttttcctgaacgagggtggggtgtacattcatgtttagtatgaaaaaggcaaaaatttccctttggttctgattatttacctaccttcctcacatatacacacatagcatctacacacagtatacacagttgtggagaatcatttcactagataaatctttccataacattgcattatgttgcttccttactgagaaacctccattacttcccactatccataaaataacatccagcttcttagccagcctgtcagatctcctatttgatccaacttagtgttcctggctcttttagcattactctgtacttgaccctctgctttggctgaactcatctactcgttgtcctcaagatatgccctgtatttttcccaagtttgtatttgcttttctttctgactctatagttcctttttctctttgcattttgaaatacctatattttccacgagtgttttcttgctcatcttttggaagtaagcccatcctcagaagttctaaagcatttattgtttgagtcaccgtcttagaacctataggatttattatattgttattagtttatgtaaacatcatgtctttccaggtaaattgtcaacaccatgaaaggatggaccatatctttgtttccccatggtgcttagtatctattggtacagccaggcatggtggctcatacctgtaatccagcactttgggaggtcagggcaggaggattgcatgagcccaggagttcgagaacaatcctggcaacatagcaagacccagtctttacaaaaaataggaaaattagctgggtgtggtggtgcatgcctgtagtgccagctacttgggaggctgaggtaggattgcttgagcccaggagttcgaggcatgcagtgatcatgctactatactgcagcctgggcaacagagtgagatcctatctcaaaataaaataaaattcaaaaaaatatgtatctacgataatgatcatcagtaaattacgtttttagtcaaagtctgtacagcatgatggagtggggaaaaaacaccaggaataggagatctgcaatctactcttggctctgcaagctggccctctggctttttgctacccttttacctctgaggatccaaatttcctcatgggattaggtcagatggtctgtaggcttcctttgacatctgaaattgtaatagaaatctaaatacctttaagctcttttaggtgtaatatatcatctgtgatggtagaaattttaggcaaaaattctacttagcctatgtttaccatcactaccgccaatatctttgcactgaagtgagagacaaaatgtaaactttctcttattcatttaagccatgaaaaaatagccagatagatattttgccatctcagttcaccttctttcttagcttaactttaacttttatttcatgtrtaaagatacaaataactgcattttacatgaggtaaatatctcctccatgtggttttcagggtatgagttccgaaggaaatgtttaaatagctcttggaagcgttagggtttgaagatttcagatcagaggtggaaagtggcccacagaacagcagcatcaacatcacctgtttcagagcaatgcttttcaaattctaatatgcatacacattacctggagatcttgttaacatgaagatgttgactgaggtctgcggagtggcctgagagtctacatttctgagaagctctcaggtgatgctggagctactaatgtgtgtaccccactttgaataagaaggatctaggagatgtgtggagagtgagtagtctgaaaggccccagaattgagagccccattcatgctgacttttcagcaagctgaaaagtcaggtaattaagatgttatccattatcacagagggtaaaggtcaggttcatttaacgtggaatcctcatttgctttcaatgatgcaggtattgtaacctcttttactctgtacaaatgaccattacttatatgaagaatgaaactggcaaggggcatgtttccctatgttcttttttcaatttagcagacttggagtagtaaagcagacagagtgttgtcaatcacctgccatcttctgggcaggggacagcatcacagcccttttcctacatctctctactggttctgaagtgccataaagagatgactgcaagagtttcggtagatttatacattgctatcatagaaattagagaattcttccagaaaatacccttttgaagtatctaaaatcttgaatggaggaattataaggcttaaggaataaaatgcaacaaatctctaaacttgagagatggcaacattgttaggactcgtcagttgttgttaggacttgtcagttgaagtgtagaggaaacaggaagatttggaaaggacagatcaaataattatcataattgtctctaattgtcccatgttcctatggaaatagtgcgattctgttagagactcatctggtatggggcagacatgagcattatcgagcttcctattttctttttttttctttttttttttttttttttttcttttttttgacagagtttcgctcttgttgcccaggctggagtgcagtggtgcgacctcggctcactgcaacctctgcctcccaggttcaagcaattcttctgccttagcctcctgagtagctgggattacaggcgcctgccaccatgtccggctaattttttgtatttttagtagagatggggtttcagtatgttggccaggctggtctcgaactcctgacctcaggtgatccacctgcctcgrcctcccaaagtgctgggattataggcctgagccaccatgcctggctgagcttcctattttcattacaaattgctgatcatacacattcttgaccatcaatgacttgaaactgactggcattcatgaccatattcttatctcagatctgcatattaaaacaataattcagttaatagattgtgaataagaagtgatggaaatcagaattgttatttctggagatggagtattgattgggagccttctggggaaatattctgtaacttgatctggatagtggtaatacaagtatataaatttgtaaaaattctttgagtttacacttaagatttgcaccctgtatattatgcttcaataaaaatattttttaaaattagttacttggcatgtttttcttttatctaaacrctttttcttttaaawaacattttagcaaacttaaactatttccagaagcttcaaaaggtcaatgcaaccaacttccaggccctggctgcagagtttggaggcgaatcattcacttcaacattccaaacwcaatcaccaccatctttttacagggtgagcctggggaaggggatgggattgtttggtttagtttttactctcacagcagacagctgacaaggtaactttgcagcactaccctgcagctagctaaaccattgtcagctctttggagggcagtactgtccacgtaatcatgcccttgagttaaccttgtttctactctttcttttctgttgtagtttagtccagtctcactgtgaacaaagtttcttttatattttattcaggctggggaccccattcttacttacttccccaagtggtctgtaataagcttgctgagacaacctgcaggagttggagctgggggactctgtgctgaaagcaatcctgcaggtgaatccagagcaaaagtaccaaccttttcattcaatttaaaacaggctttctcatttaccactctcttaattatttgtgtttaaggtttcctagagagtaaaagtacaacttgcactcgttttttcaagaacctggctagtagctgtaccttggattcagccctcaatgctgcctcttactataacttcacagtcttaaaggtaggtgtcctttctctccctacactgtcactactatgaagttgaagtgaacatgcttctcactgttgtgggttgtggaaagagcattgaataaaagtcagaatccccaggagccacgtaaaagacagagggcctggaaaccacatctgaagacaaatgaaataattggggatatatatgcaggataagagatcatcacccttctcactaatgggattggcttgcgagggtggaagggggaaaacacccatctcaccaaacttcttgcttttgctattcagtagagccctgtcagagtaaataggcatcacagtctgtcaccctcctgcctggctccacttcctggcattttagtgtaaagaagagtcaggtggaatagaggaagtaaatcattctaatatattgactcccctgcccgccaaaccaaagcctattggtagtaatatgaaaccacaagctcctggtgatttttggtaaggtatatgcacattcatgtccctgctgttctcctaggttccaagaagcatgactgatccacagaatatggaggtatgatgctgttgtaccaggaaaaaagaaaaagaatatttggctyctctgcatctgaggcaattttagtctaagttgtactgttgaaagataaatgtaagcgtgatgtagcaaacaattaagtagggatctaaaacggtgcctttgcaagtacgtcctatacagttaatagcctcgtatgaaaccaggatccataaggtgttagataagtttgtaaacattgggttaaataaactatatttagggtgggcttcttaatttttttgagagacagggtcttgctctgtcacccaggctgaagtgcagtggcacggtcacagttcactgcagcctaaacctcctgggctcaactaatccttctacctcagcctcccaagtagctgggactatagacgtgtgccaccatgcccagctaattttttaatattttgtagagatggggatcttgctatgttgtccaggctggtcttgaactcctgacctcaagcaattctcctgacttggcttcccaaagtattgggattataggcgtgagccatctcacccctcctggagtctttaatttgctagagggccttattaatctctaaggggaatactgaatatagtatttctaacaattatttgactatggaacccttgttttatatttaatagaactagtgttctgagaaataagttttgagaagtgctcgtttagaaagacttgaatttaagttgttggctggcactggaagaagagagagagagggtggtcaaggggaaggaaaaatactcatcttagcatgatatctattaatagatacaagacaaaataccgccttcagttttagttaatttgcttcttttcgttgctagttccaggttcctgtaatacttacctcacaggctaatkctcctctgttggctggaaacacttgtcagaatgtagtttctcaggtagggatactgacctcagattctggactgatgtgtgttaatcaacactgccagaggtgcctcatcttccattaagtatcagactgacccaactgaattttgtttgcattctctaacaatgttgggaatgcaaacttgttgtattggtagattcttggttgcaatccttggtaaaagtagcatattgtgaatttcaacaattcccaacaagtttgaaattaaacttgtcaataattgagcccattatcctccctaccacgtttcagttatttccatcaccaccatcctccagtatttcaggtccaggacattaaaattatttctgacacctcttctgttgcccacttgcagtctgttactgattcttactgactgaccacattttattctcttgacacagtatcatctgaaactctgaagtagattaatcaacttgtattcctctgttctctaaacaatctaaccttaaaaagtaagaattatcttaaagcatcttcttaaagactatgctcagaaatttaaggttactttcaattgcctgcaacttgtatccccagcaatgatctttattaattctcaaacattgtgagagccaagtaaaccagatttctgttccatgctcacctctgcctgtttctacttgccctcctctgtccgtaatcaacttatttttcttccctttcagttcctaccaaaaactcacctacccrtgaacccttttaaagagctctatccagtttctttttcatatacaaatataatatgaaatcatctttatctttcatagtatttgtgtttggcatttttaacattactgtktcagtctgcctcatttagttataataacacccttgaagacagaaaatcttctgtcctaaacatattcggcccaataactactttttattaattgattctttttgcatttcaggtcacctatgagatagagaccaatgggacttttggaatccagaaagtttctgtcagtttgggacaaaccaacctgactgttgagccaggcgcttccttacagcaacacttcatccttcgcttcagggttagggcccttctcttataggggatttagaggggaagaaatattgggttagaaataatttctttgcttctgtaatacatgtgaaatagaataagaatatgaaggcctagttcagtctgtcgattgaggcctcaacatttaatattccataattttactacaagttgtggttattctacaagtctttactcattaaaattttctccaattctctgtctggcccccaacaaagcaggacttcaatctaaaatcaaaactttttttatagtcattttgaatcataaattcagccaacacctacaaaaattctttaactagctgttctcatatttctgggcagtcagcattttactcatttcccacttaatctgagtgttcactcttaatcactgccatttggctttctgctacttctttcctctttttgaacccagcatagattttctcaactctaccctcaggtgatcaaccaactgctgtgtctctcagagctcatctctggaacatctgtagttaattaaaatatatatttttttaattacatttaaatttttcagattttaaccaggctgtgttattattgctaaattgctagtaatttttaagggatccttagtagattcttggttgtaatccttggtaaaagtagcgtattatgaatttcaatattcagatcatgaaggatttattttagtaaatttaaaaaagtgaaagaagcaaaatgctacactgtggaaagaagccagattgttcagtgtagctcacttattgcatttccttgccttaaggaagggtacggtgaagccaagcagtgggaggtgggaaagtatgcttatctccataattgacttctcttccctctttctgcaggcttttcaacagagcacagctgcttctctcaccagtcctagaagtgggaatcctggctatatagttgggaagccactcttggctctgactgatgatataagttactcagtatcctttttagagctgggtggcctgttgcagcctaatgagaaaagctgcaaaggctttcaaacttatgttagactagccaaaggtgaggaattttttgttcattataatgaggtacttatatactaatatatggttaatcatttttggaatctagttgtctctctgtggttttctgaggaaaaaaatcacaaatttgtgactcgaacattatgatagtaatacaaaataaatagcattaaaggagaatgagaacataaattttgcaatgctgcctccttttyttttctgttatgatgtccttgatcatcacttttccaccttggatgaccctcttacagagccagggtaatggaagttgctctgttaaaagacatgaagtgcagtttggagtgaatgcaatatctggatgcaagctcaggtagttctttgcttccgcatcatttcctgcaatttcgggaatatgtagggaatatgttgatatggtaacttttatatttttaatgacagttcggaaaatgctagtcaggaatagtcttttagtctaaatagtgttgatattgctaagagttttctggcaattgttaatacctactaaggattataccctctggtctattttatattatttccaatgtttggtttaacataccgtactaatataggtatattattatgttagcattggactgcagcctccatggtgtttaattataggttgaagaaggcagactgyagccacttgcagcaggagatttatcagactcttcatggaaggcccagaccagagtatgttgccatctttggtaatgctgacccagcccagaaaggagggtggaccaggatcctcaacaggcactgcagcatttcagtaaggagagaaatatactttctgatgaagactcatttttacccctttgtaaatcttggatagtaagtttaaaaccagccttgtctccatagataatgcrtttgtcatagaaggaagagtataagaaatcatgcccacttgaagcctttttttttttgagatggagtctcactgygttgccctggctcgagtgtggtggcatgatctcggttcactgcaacctccaccccccgggttcaagggattctcctgcctcactcagcctcccgagtagctgggactgcaggcacccgccaccacacccggctaatttttgtatttttagtagagatgaggtttcactatattgaccaggctggtcttgaactcctgaccttgtgatccgcctgcctcggcctcccaaagtgctgggattacaggcatgagccaccgcgcctggcctttttttttttttctaagtcaagatcttgaactcttacctaggctggagtgcagtggcacaatcatggctcattgcattctcaaccttctgggcccaggctatcctcccacctcagcccctcgagtagctgggaccacaggcacatgccagcatgcctagataattttttgatttttttgtagagacaaggtctcagtatgttgtccagatggtctcaaactcctgggctcaagtgatcctcctgccttggcctcccaaagtgctgggattacaggcataagccactgttcccagcctgaagtagttatttcaggttaggtttaaaatacctaatgtattttccttacttagaaaaaaatttgaaggcagataatctacagatttctgttgttcaaaaatctcatatatttcaaatattttatattcttgaatatttggtcagcacagagtttcatgaggttaaaattgtgctctttctattgtaattataaaaatttacatttttacaattatttacatgaaaatgcattatctggttaaaaatcaaaaccatatagaatgatatgcctttctgcattttgcaattaatcctcctggagtactgcattaggtataccatatttctattctggaaactttcgaggctctctgatggcttccagactacttggatgcacttcataatctaacccttaggtatcatcttctttgactttacactgctcctgtattcaaatcctttactttagccacatgatctgctcaagccagtgcctactaagcagctcacacataggagatactcagtaactgttatttagattaatcaaggaagccaggtgccatggcttacacctgtaatcccagcactttggaaggccgaggcgggcagatcacttgagatcaggagtttaagaccagactgaccaacatggtgaaactctgtctctactaaaaatacaaaaattagccaggtgtagtggtgggcatctgtaatcccagctactggggaggctgaggcaggagaatcgcttgagtccaggaggcagaggttgcagtgaactgaaatcacaccactgtactccagcctgggcaacagagcgagactccatctcaaaaaaaaaaagatcagaggtcgggtgtggtgggtctcrcctgtaatcccagcactttgggaggccaaggcaggcaaatcacaaggtcaggagttcaagaccagcctggccaacatggtgaaaccctgtctgtactaaaaatacaaaaataaaaattaggtgtggtgggcacctgtaatcccagctacttgagaggctgaggcaggagaatcgcttgaacctgggaggcaaaggttgcagtgagccgagatcgtgcccctgcactccagcctgggtgasagtgcgagacttcgtctcaaaaaaaaaaaaaaaaaagatcaggaataataacatagtcttattgtgaacttttgtgttcttccactaagctacattgccttccttattactgaataatgcttaagaaacaatggcttagtacttggtgattgactataggcaaccatcaggcaattcragcagatgcttctttacccttctgcaggctataaactgtacttcctgctgtctcataccagtttccctggagatccaggtattgtgggcatatgtaggtctcctgtccaacccgcaagctcatgtatcaggagttcgattcctataccagtgccagtctatacaggtaagtcatggctcataaaggatcactaaaccttgcaaagcctagattgtcttatcagtcatttgttaaycaaataattttttaccttccaagagctaatttatgttagcaaccaatgtttgyttmmartgagctgacataatttgtcaagtctattcaccctgcctgattactgaaattaacatgatgtcatgaataccgcttatatccttttttaaaaaaaatctgaccccagattatagtacaggttaatttcttttcagtaatcctaccattattactattctgattgattcaaccacagaaaacaccttccataattgttcaatctgtcagccacacagttatatgtgagtccctgagcctgttgattgtgattaaagttaccgctgtgactagtttatagttaccagctcttggttgtatctgctccattaaatgaacacttttaatctgtagcaaacatatacctattgtttattatgcgccttaggagagctttagcatctgccttggtgtttaaaccaatctttagctatagaagtttaaaaacatggtattttcattttacttagaaatgacggccgggcgcggtggctcacgcctgtaatcccagcactttgggaggccgaggcgggcggatcacgaggtcaggagatcgagaccatcccggctaaaatggtgaaaccccgtctctactaaaactacaaaaaatagccgggcgtagtggcgggcgcctgtagtcctagctacttgggaggctgaggcaggagaatggcgtgaacccgagaggcggagcttgcagtgagccgagatcccgccactgcactccagcctgggcgacagagcgagactccgtctcaaaaaaaaaaaaaaaaaaaaaaaaaagaaatgactaggtcctagtgaaattattcacatataaactggcatgccaatttagtaacttataatgaaaatcaaacagatttaaattcttacctgttgcactgtacttacatcccagaaataaagtaaacttgagactacatttaggtcagaagtaaaatacctttgggtctccctcacaacagggttgggcaagttatttctctttgcctagaaatggggtcaacactcaggttaccagaaactgtattaatgagaacattcaattatattttttagttactgtgttgtttggaaagatacccacaggactgttcactgtgtatttccacatctctggttcctttaggcattgaagtcactcagtgccttttttttgtctgggtattttaactgatagctttttctagtatttagcaaaagttagcttttcaggttagtttgtccccgctacaaaaccacactacagtcattcactttaactggcctaagtgggcgagagttgagaattttagctatgcttcattcatacataattgaagaaacattatctgttccaattattaagtaaaaattaattgtttgaatgtattaatatgtggtatgatatacacaaaaccacgttcctttactaagtgtgatttgagggatttgcaaaggtaattttgtgtaaaaattttcactttatgggctaaccagctcatccccatgaaagacgctatgctcctataaaagtataaggagttataaaatgatacttatatcttatagtgcttacaataagcttataataaaacatcttaaaagtatcatttcatacttatatgaaacttatatcataaaagtttatcaaatgcaagcatttccttctataataaattttttttacttcttcaatcttgaatgcaaattttctccagaagtcagataaacatactcactttttctttatgcatttatgattatttgtccttaacttgaaatcacttctccgtccacacaggcttttgtctaggacatcttgtgaaattttttttttttttttttttgagacagtgtttcactcttgtttcccagcctggagtacagtggtgtgatctcggctcactgcaaccttcgcctcccaggttcaagtgattctcctgcctcagccttccgagtagctgggactacaggcacctgcaaccacgcccagctaattttttgtatttttagtaaagacggagtttcaccatgttggccaggctagtctcgaactcctgacctcaggtgatccacccgcctcaacctcccaaagtgctgggattacaggtgtgagccaccacgcccagcctcttgtgaaatttttttctcagaatagcaatagcttatccaaagaaagctagtgtacatcttccaaagcttttaaaataaaaaagaggaggagttacacttgcagaatgtatatcttctgggatgcttctccctactccactggacactgtttgaaagtttgtagtttataatattcttacctaggctgtgttggtcagcttagaatatctaagtgataggataaaactaaagctgagtggcaaactgccagtctatatactgcatttagtctataggcttgttttgtttggcccacaaagcattttattatttaagtttatgccaacatttaagaatcaagaatttcccagacattcagatttctgacttcaattgaaaatctgacagtataaaccctattatattcctgcatggcataaaatcttcagttgctgaatggtgatatccacttttagaaagagtactctaccctgttctgcattcatacaacctaagccaacccgcccttcaccatcccacttctctttcaggttatctgcttaggctggtaggcatttgtgtttataaaccttgaactcaagctgctagatggtcagttgcattgtgaactgaactatctgaatgatttttcattgtaaatatatagctatagaaacactttaaattcctctttctataaaaagtgaagtagcaaaatttttggaccattcccaaggacaaacaataaaatagagggaaaatacagcaaaaaaaaaaaaaaaaaaaaaaaaaaaaactgtgtagacttcactatcttcttgtatgattattataatatataaacatttattgaacatttactgtgtgaccgatactagtggtatttttaatcagtgttttttgtaagtgttgaattctcacaacaaacccatgaggtaaacagcatttgtttatatggtattctgccacttacaattttatactatttagggttctaaagggatctttaaatttgagaattaataaaacacatcatatgtcatgtctacatataaaccctttaaattaaaaaatatatctctaggaagaaacaactagttttaaggaatatgcagtatcaattgaaaccaaaacaataagtgaatttaaaagacaatgtagcatcacaggatcatggctctaaacctttctaaaattataatatttaatttgtgtttatcaccaagtgaatcatctactctttagattatctaggagatccattgtctgcagtttatatggtaagcatgggctttgagtcagacagacctaggtctaaatcaagttattttacttctctaaatctgttttctcttctataaaatggaaattaataatactcattgggttgtacagattaagtgagatcattaaagtaaaacagcacagttcctggtacgtagtatatattcagtaaatattactcttgatatcattattatcaattttatcatcattaacttttttggttccaagcttctatagaagtagcgtatcaagaagttttgaggcaaaacagaaaagagaaaagcaggtattaaagcaatgtttttcaacctttgttgactatcacccatggtaagaaaatatattttatatcatgaccgagtttgcaacacacatgtacataaaatagacacaaaagttttatgaaacaatgcccttactatacccagtgcacccacaatttgtgattttcagtatcacaacagaaaatgtgatattttctggccgggcgcggtgactcacacctgtaatcctagcactttgggaggccaaggtgggcagatcccttaagttcaggagttcaagaccaagtctggccaacatggtgaaaccctgtctctactaaaaatacaaaaattacctggaaattactcaaacccgtgagacggaggttgcagtgagcaaagatcctgccactgcactccagcctgggtgacagagcaagactttttctcaaaaaaaaaaaaaaaaaagatattttctattctggtttattctggtttgtttttgtattttaaatgctagacaaaacccactagtgggtcacaatttgcaatttgaaaaacactttcagaggatacatctctgactatatttcataactaattgttttatttaataagcatcttttatttattataattgaaagttggctatgttttataccacagtcaaataacatatgctagaaaaattgccaatctagctgtctgtcttagtggttctgaatcttatggaccccactgagagaatctatttaacactattgacttactagaagaatgcagacatgcaacattccttatattgttccagggattattgatttttcgaagccaggctaagaacctctgccacaatcttgtaattaaacaggcagcatactaggaaagataaggaacaataattaagagtaattcaacattagattttagaaataattgctacagtagaaggggctaggaagtgacaggattagtaagaagggattctctttctcctttttgttaatgtcttggagaatactaactgacttctctttcaataagggacagttgcagcaccaccagtagacttaataactatgactcagtagtttctgtcactgaaatctttctttcacaaggatcagtcaaccactatttgcttttatctcttaatgaactattagactatagaagtactttgcctccttctgtggtttcctaatagctagcattgaagaaactgacctagttcattcagctggggtttattttttaattattttattaccttttttttaaaagaacttttcaaagtttgcttaatgtttcctatgttaaaatatataaccggccaggcatggtggctcacacctgtaatcccagcactttggaagccgagacagatggatcacttaaggtcaggagtttgagaccggtctggccaaaacggcaaaacsctgtctctattgaaaatacaaaaattagctgggcatggtggcacacgcgtgtaatcccagctactccagaggctgagacaggagaattgcttgaacccgagaggcggaggttgcagtgagccgagatcgcgccactgaactccaacatgggtaaaagagcgagaccctgtttcaaataaaataaaacatataaccacttgaaatctctccctgatacatgacatttaaccacctttatcctgtaacatattcattctcaatgactcctttgaaaatttggataacttcattgacatctttaaaataagttagggaatttaaagattttcagtagcttctctctcaaatatgtttatccctaaggaaaaaaaaatggagatatttaaagaaaaattacctttacatggacatttacaacacactttatttattcattcattcattcattcattcattcattcattctagagatggggtctcgctctgtcactctggctggagkcaaatatgctttattaaataaagtctaacattcataatagaaatcaccatatctgattgtgttaaattaaaagagacttgtagatataacatacagatacagtttatgtttttggataggagtctgatttggacaaagaaatgtaaagcaccttttgggatagttaaggaaacttgaatatggactatattttagataggaaaaaaatgttattgacatgaaaaggtagacactattttttttaaagtagattacaaaacagcctgtacagtatgatctcgtggttaaaaatatacatatggatatccgtgtgtatagataaaatatagatattaataatggtattcttagcggtagaaatatggttttattatttttatttatattctttaactttattatttactgcttttgtaaaattaaacttaaagtcactaggaaactctaaaaataactagatgttatttaaaaatgaatttattcagtttcatttacaatatcatggaaaaattacttaggaacaatttagcaaaaagatgcaagacctcttcactataaaacattactgagataaaggagatctaaataaatggttcatgaagaggacttaacattaagatttctatcctcaaatggatctatagatttaatgcagacccaataaaatcctagaaggtatttttgtagaaattgatgagctgattctaaaatttaaatggaaatgctaagggcttagaatagccaaaacaattttgaaaaagaacaaagttggagggcttacagtacttgatttaaagacttactctaaatctcagacagagtggtactctagtataaagatagacagaccaatgggacagaagagagttcaaaaataggttcataaatcacatcaattcaatgggaaaaattttaaaaagtatgtatctatttacttcttagagacagggtcttaaattgtgttacagcccaggctggagtgaagtggtgccatcatagttcactgcagcctcgaattcctaggctcaagtgatcctcctgcctcagcctcccgaggtagctaggactacaggcacatgccaccatgcccaactatttaatattttgttgagatgaagtctcactatgttgcccaggatggtctcaaactcctggtctcaagtgttcctccaaccttagcctctcaaagttctgggattacaggcatgagccacctgccctgaaaaaaaaaaagtttctttttttttaacaattggtgctgctgaaatctcagaattcactattaaagagctcatccctgtaaccaaaaaccatctgtacctcaaaaactattgaaattttttaaaagttggtgctgggacaactggatgaatctggaattactgggtaaacatatgggggaaaaatgaactctaacttgtatctcagtccatacatagagtacttatgtctggatcatagaccaatacataaaatccagaattataaagcttctaaaagaaacataagagactgtaagtttgaagaaagcaaagatttcttagacaagaaacaaaaaaatcattgaccataaactttaaaattgataaattagactttagcaaaattaaaaatctctgctcaccaaaagataccattatgaaaatgagaaaacaggctagtttgggagaaaaagtttctcaatagtttatctgacaaaagactcatatctagaatataaaaagaccttttacaaataaacaatacaatgacaaactaaaaatgggcaaaagatttgaacagatacttcagcctggtgcagtggctcacacctgtaatcccagcactttgagaagctgagatragcggatcacttgaggtcaagagtttgacaccagcctggccaacatggtgaaactccatctctactaaaaacacaaaaatttgctgggcatggcgacgcatgcctgtagtcccaactacttcagaggctgaggcacgagaattgcttgaacctgggaggcagagattgcagtgagccgagatcatgccactgcgctccagcctgggcgacagagcaagactccatcttaaaaaaaaaaaaaaaaaaaaaaaaagatttgaacagatacttcacaaatggagataaacaattgatcattaaacatagaaaggtattcaacatcattatcattagagatatgcaaattaaaaccgtgcgctactacttcatgctcacaagaatggctaaaacaaaaaagactgacaatcatgttccaagaatgtagaacaactggaattctcatacattgctagtagataagaaaattggtctaaacttttacaaatgcatcttccttatgaatccacaattttactcctaggtgtttacccaagagacattaaaacatatgccccaaaaaaggcttgtgcaaggaagtttataacagccctattcataatcactcaaaactggaaacaacccaaatatccatcttgaggagaatgggcaaattatgatatattcgcacaatggaatactacttagcagtaaaacagaatgaattactgatacacaaaacaacatagatgaacgtcagaaacatttatctttagtgaaagaagccagacacacacacacacacacacacacacacacacacaataataataattaatttttaatgataaaagtcagaaagtggttacttctgggaaagggacagagaatagactggaaagrgacatgaaggagctctgaaatgatggacatactccagaccttgctttgcgtattggctataaagcatatataattggcaaaactcattgaactaaatatttaaaatgtatatattttattgtttataaattatacctcaacaaaaatattaaaaccaaacaaaaaaacatttaaaaaaacatgagaggccaggcacagtggctcacgcctgtaatcccagcactttgggagaccaaggcgggcggatcacctgagattgggagtttgagaccagcctgaccaacatggtgaaaccgtgtctctactaaaaaaaaatacaaaaaattagctgggcaaggtggcacacgcctgagtctgtaatatatgtgtctgataaagttcttatatatgtaaaataaggaactcttacagctcattaatgagttagacacttgtaccaaagatgaatttgttctagttgatagtctgartgcagctacaaaaacacacctaaaagttagtatccacaattttttctttaatagtttttatttgtactgattttacgtagggtattaacatataatggtttaaaaatcgtgatcatacagatgtaatgtatagggtgtacttcttattaccaaagcctaacgtaacctaatccaagtcttcatgttgttacaaagtaaatcttattttgggacaaaggattttattgtactgtaaattgaattgaagcaaataaccccccaaactttacaaagtgttaaaacaaaattgctggtggtaatttcttaagtaaacatcatgaaatatagcttaaagtagaaataaattaagtcaaccatacataacagaactggacccacagtaaatgaagtgtgctgactgggctatgtatcttttgtctgtcttgataaaagaaatgaggtgaccagattttgagggagttatttttccccagtgctcttcctgttgcacacactaaataaacagtgaattctctaattttgcctatctataacttttaaaacacaaatggaaaaatttagacttgagaatcaaaataaaacactgaatatactcaaagaaccttgttcttcatgtgatactaaaactcaaattctaaaatgggtcaataggctggtgcagtggtgcacacctgtaatctcagcactttggcaggctgaggtgggaggatcacttgagcctaggaattcgagaccagcccaggcaacayagtgagaccccatctctacaaaacatcaaaaaattagctgggcatggtggcatgcacctgtattcctagctactcaggaggctgaggtgggaggattgcttgattctaagaggtcgagggtgcagtgagccgtgtttgtaccactgcactccagcttgggtgacagagtgagaccctgtttcaaaaaataaaataggccaggcatgatggctcatacttgtaattccagcattttgggaggcggaggcggatggattgcctgagtccaggaatttgagaccaggctgggtaacatggcaaaaccccatctctactaaaaaaaaaaatatacaaaaaattagatgtgcaaggtggcacacgcctgagcctcagctacttgggaggctgaggtgggagaatcacctgagccagaagaggtcaaggctgcagtgagccaagattgtaccactgcactccagcctgggcaatcagagtgagaccctgtcttaataaataaataaaaataaaaataaaataaagtaggtcaataacatttggtattatctggttacctagtaagtgcaatgtaagctccttttaattggagtatctactaggctgcatttactccaaacttctatacaattatggaggcaattttaaaaataaatgcagaataaacatttcatttgaaacatttgttaataaatacatgaattaattaagcacaaccattaagatcctaattaccatgtgatgggaaggaaaaagggtcaaatagatctgtaactgctaactctttttttttttttttttttttttgagacggagtctcgctgtcgcccaggctggagtgcagtggcgcaatctcggctcactgcaggctccgccccctggggttcacgccattctcctgcctcagcctcccgagtagctgggactacaggcgcccgccacctcgcccggctaattttttgtatttttagtagagacggggtttcaccgtgttagccaggatggtctcgatctcctgacctcgtgatccgcccgcctcggcctcccaaagtgctgggattacaggcgtgagccaccgcgcccggcctgctaactcttaaatagctgtgacatactttctactttgtgatttattaatctcttattatgttagttccctacctccaaaagaaatctcccctcatttgtttaaaaaaaaaaatctttattgagtgcttactctgtgccaagtactatgcctggaactagttatagagaggtgaagcagatagacrtcatccatggaaggtctgagacacccctgaggtgaacagttctaatctgtgtagaaattcaccagcagatactgaaggcctgaacttgggtgggagtttggagggctttgagaagtgacagaattcagatttagagatgccacaggtaagacttggctatgtagatgtggaggttgagggggaaggagtcaaggatccatgtgttattttgataaattcatacactatgtgatgatcaaatcggtatttaggatacccatcaccttgaacatttgtcatttctttgtggttgggaacatttaaaatctgctcttctagctattttgaaatacacaatatattgttattaatacagtcgccctactatgctgttgaacacttagttatccttgacttacctgtttcacagataatgtattgactttctatttttgtaggtcggttattttcctcctacccccccactactctgccagtgtatttgcatcagattattaaatcagtattcaatgtttcatcatgatgtttatgtgaatatgcatgctgcggcaagtattcaatttttgtggaactttttatttttctgaaattaataattacctatttcactcttagttttctttgagctaatagctaaggcttctcacactcttcaacagctctgtaaaatttctgtcaatgcagtttttcaaacagttgaacttgccatattatctatcagttccacattttcctgcatattttcttcatggagacctccataaccccataacctgatgtagtgtggactagttgctgccccgcagtggtcgtgggactttcttgtactgccatctagggaattattcttacttgtcttagattcactgtttactggacactacttcgtcctttttcttggtttattctcttgtatttatggagcttagagtctaataatttggggggggaagatgcatgtaaagtattttttttctttagttcacattgtctgaaaatatctttattcaatcatcatcatccatcatcattatgcttaaatgatcatttggttagatagaacattctagattgaaaattattttcactcacaattttgaaggcattctttcattgtcttctagtttccaatattgctgttcagaagccattttaagatctttttattcttaatagtctgaagttttcaaaagtttatgccttgagtagatcttttcttcattcattataccaaattttttactctgaaactcagttctgagaattttctattattattacatgattaacaatttccttcccactcttttctctgatatctctttttttttttttttttttggcactcctattaatctgttagggtgtcgctagattgaatctctatttttcttttctctcgttgtctatctccttatctttttgttcttcctaaaaaagattctcaactttatcttttaacttttttactgaattttttattttggccatcagatttttaatacctaaggtctgtcttattctgtttcttttcataatatcttttttcatgtatctctgaagatactaacaactttgcatcttcatctttcattgtctgtgtttcctcagagttgtttattctgttcatttggtacagtttttctctttattgtgagaaactttccgcatgtttgtcaatcttcaactctcaatccaaaataagagtaagctgttaagctgactgaaagctctgtgattgtgggtgacactgactgacttgtggccttcactgtggagcagttagtatctttatgtctttgctggaactgttaattttttccagagaaaactctagtctcctgactgaagggtatgggtgtaaaaccatcttcatctaaaatgaagtaagcattttagagctaaattagagaagggataattccccatttttcattccatgcctcactctgtccttctttatgcccaatgtccctgaatccagaatttctctggcttaagtggtttagtctcttgttgagggggagaaggaatagttgcctgattgcattgaagggatatcattcagtaatgattttccatctgcccctcatcccttcctctgttacctcctgtcactgagtctttagagttccacagagaaaatctgcttgtatctagtctctgaaaactttcaggtttggccttctttctctctgttaaaccttgctgccatctgctttctgtttttgcatattatgatgtctccccattccagtgaacatggagtttttgtatctgtttcttgttggattggagtggttttaagatatagagggagaagacatgtctttatgctgctgtcttcaaatctagtagtagctcttaatgagcacatattctgggtgactccgaaagaacaactcagttcgaacaatttttgtcatgtggggtttctcagccactgaaacaccactagaaagatattaatatatatacttgagcagacattggcctaaggtttgccttcttgggttaatagttatattagagttcaattctgggtatgggatgacctcaaggatacagaaattccctgatttgggagtttgaggaggctaatgatactctttttccctgcctaagtttgaaaccaattaaaaggagtcagataaagataatcaaatatcagttttattactaattaatgctaggtggatatgatttgggtgtatagcagtgttcaataccacactcttccatcatgagaccactatcccaattccaaccacagctcctttgggaattctcctgggactgctagtgggcagtttcaaatctgcccccctcctaaaagctctgaaataacttagaataacacattgattcaatcaacttctagacgacactgacccatagctgaaaaatcattccctattccgtttcccatcccaaagtatttctcaccatttcagccagtataggtcaccaggcattttgcagtgagtttacataacaatattaacatgcttcaataatgtcagctataaagatttgctccaaaaattgaatatatgtcctctccccattataaaattcctgaaggaaaactaaagtcctaatagtaaatccttttrtaagtttaagtcaaaagaaagtttattatttattcataggtaatatgttcttatccattttctttctctgattagtctcagccagtcttcgatgcctggctggagttaggaatccctcggcagcttcagcccaggctggccatccttgtaaygtatgtggttctttcagtgcctcagaagttatatttatcctatgccaagtccctcatgagcctcactatgttaaaaaaaaaaaaaaaaggctgggcatggtggctcacacctgtaatcccagcactttgggaggccgaggcgggcggatcactaggtcaggagatcgagaccatcctggctggacactgtgaaatcctgtctctaccaaaaatacaaaaaattagccaggtgtgatggtgggcacatgtagtcccagctactcgggaggctgaggcaggagaatggcgtgaacctgggaggcagagcttgcagtgagccgagatcacgccactgcactccagcctgggcgacagagcaagactccatctcaaaaaaaaaaaaactacagaattaatttgaatgcaagattagcacaggactgactcaatacccatttaaaaacaaactttgggaagctgaggcaggaggatcacttgaggccaggtgtttgagatcagcctgggcaacatagcaagattaacatggaaattttcctaggactataaacagctattttgttaaacttgaagattttcttcattcaccctccttcattctgatgcacatattatgcatcagagagggcagtttcaaataagccctcctaaaggctctgaaatgagttagaatagcacatttattaaatcaacttatagacaacactaacaactgcctctacaaaaaaatataataataaaaattagccaggccgggtgcagtggctcacacctgtaatcccagcactttgggaggctgaactgggcagatcacttgaggtcaggagttcgagaccagcccagccaacatggtgaaaccccgtctctactaaaaatacaaaaaaattagctaggcatggtgatgggtgcctataatcccagctacttgggaggctgaggcatgagaatcacttgaacccgggaggcagaggttgcagtgagccaagattgtgtcactgcacttcagcctgggtgacagagtgagactccatctcacacacacacaaaaaaaaaatttagccaggtgtggttgtgcactcgtatagtcttagttactcaggaggctgaggcaggaggatcacttgagcccaggaggtcaaggctgcagtgagtgatgattgcaccactccactccagtctgggtgtcagagcaagaccctgtctctaaaaacaaacaatcaagtgacagtccctaggagagttattccaggcaaaactatgttcccagagcttggtacttactgttgccaaagaccacagcaaatgcataatatgttcatcagagtgaaggagggtgawtgaagaaaatcttcaagtttaacaaaataattatttactgtccaaaaattataatcaaaagtttgcttgttgagctgagtcaaaacaaagggaattcattttagataaacatgattccagacatcatcaggctgcagccatatctaccaaagctacatctgttaggtcagatacttgagtcagtctgacaagatcccttcttctaggaacatctgttttatttggcatgaattggtgggtggtggaaggatccttccaaccctgagagtctgtgagtgacctttctttctgccattggagaaggaatagaattgctactactactttcacttgtacatatgtactgtttcagagcctggagccttctgatagagtagagctgctaagcacctaagagcagcagttttgccatgtggcctctctgatatcaggcagctccccagctaggggaagctagagtcagggtttaggtaggtgtaactgttcagttctgctatcattgactattgctaagatattcattccttgtgtctcactgaaagagaactacataggaccaatatgagataaaggtatatcttgcttagaataattcatttctctcttcagggaaagtaataataacagccaagttagagtgctatatgaatgggtaccaagcgctgacctgtcattgactttcttcccgtaggattctcagcaagttacagaagtatctttgacaactcttgtgaactttgtggacattacccagaagccacagcctccaaggggccaacccaaaatggactggaaatggccattcgacttctttcccttcaaagtggcattcagcagaggagtattctctcaaaaatgctcagtctctcccatccttatcctgtgcctcttactacttggagttctcaacctagagactatgtgaagaaaagaaaataatcagatttcagttttccctatgagaaactctgaggcagccacttatcttggctaaatagaacctcacctgctcatgaccagagagcatttaggataatagakgacctaactgaaggaatccttgtatatgaaaggagttattttagaaaagcaataaaaatattttattcatcatagctctctgctttgggctctgcaggccaccagatacacatgaggcccctacttctcaagctgggaaggccaagagccttccttcagcctttctggttatgttacacctagctgaatgtttacaaggtctggatccatcagccctcaggcacagttgggccaagcagaaagagagaaacacttctgctgtcaccttgaatgaactcaggaatagcttccctctggactgtagaggagctaactgtttggaacagaaaactgctggctgttgattttgtctggttcctttgccaacatctgggcacaccctttscccagacacgagtggggaaagcagttctttctcctcagtttccaaagtaaatggggaatcccagctttyttttytactagcaaatgaccctaccatttatttctgcctttttcttccgttcattgtgaggaaaaataaaactggttgagagctttgttgtactaattccagcagcatggtagaaggcagctgacctgtggtctgcctcctgattatgcttctatgtttgtgaggtttggggaaaaaaagtccgggtagagtggctcattcctgtaatcccagcactttgggaggctgaggcaagaggattgcttgaggtcaggagttcgagaccagcctgagcaatgtagcaagactccacctctacaaaaaatgaaaagctggcgggccacagtggctcatgcctgtaatcccagcactttgggaggctgaggcaagaggattgcttgaagtcaggagttcgagaccagcctgagcaatgtagcaagactccatctctacaaaaaatgaaaagctggctgggcacagtggctcacgcctgtaatcccagcactttgggaggtcaaggtggatggatcatgaggtcaggagttcaacaccagcctggccaacatggtgaaaccccatctctaataaaaatacaaaaattagccaggcatggtggtgggtgcctgtaatcccagctactcaggaagctgaggcaggagaatcgcttgaaccagggaggcggaggttgcagtgagccgagattgcgccattgcactccagcttgggcaacaagagcgaaactccatctaaaaaaaagaaaagcttagccaggcatggtggcacacacttgtggtcccagctactcaggaagctgaggtgggaggatcacttgagcccagggagtcaaggctgcaggaagccatgatcatgccactgtactccagcctgggcaacagagcaagactgtctcaaaaaaagggtggggggtatgcagggagggatgaaacttccataaatacaccatagcatttaaatcaggggacttggattcttttccttggagatatactctgaagaccccagttttgtgactgacattagtgagttcagcataaaattattttttttagcagcaggcagtggcagcttacaaagggccttgcctgccctgccaattcagagattctggcttgcagagaaaacaaggtaatttcctattattcttgggcgggtaggaattggttgggaactatgatagaaaacattaaaaggtttagccctggagcagaattatgctagccttgtaattaaggcaaatttttggtggacgatatcaaatctacttgttttaaactttaaatccattttacaaagaattgaatctaaagaatagaatgtactagaacaacttcagtgaaactctgaaatgtggaattgtaaagtgcagctcctcagtgacccaacaactcagtgggggaagattgacgtaacacaggagactacatttgttcagaaaagcaaacaatcagtgtggcctacatttgttcagaaaagcaaacaatcagtgtggcctagactagtgaggggcaagtttggaactaacatggcaggatgtagaggattgggagagtgagtgggagggaggtgatcccaggagcctagaacaaccctcatgaaggcccagggtttttcatgggcaggagggttcagggcctgaagtgactgtagtagaaacactgaatgggccaaacagccaagatgagcaggatggcagctccttttgtggggacttgaaagtcagacagaattgggagatagtttggttttcttcacagcatattaatgctctgaaattaaaattgccttttaatacagcatatacttagttataatcctgcttcatgagaagaaaatgctcatttgtaaagtcatctctgactggtttatcattttgcccttttccaaaacacttggaaagtaaccagtttccctgaaagaaaaggcaaagttttgagcagttgttattaaattagaggaggtgcttctgtacaaggggaagtcggtagctgggaagctgatagcacagatcccaccatagtccatttcatagacatttaattcagtaaccctgcctccgaggagacctgtagtgaaactgaccacaaagctaatggaatatttaagtttgggcttcttaaaggaaaaaatatgtgacaactcattctcatctatggggcagcagacatccagtccactgctgacagactacctgcccctttcagaatccggtctctcttactccctgattcagatccttagcctcattccgaagtgctttgagaccactctgtgcctttagacaaattacatgtcaactataattcacataccataaaattcatcctcttaaagtgtacaattcagtggttttaaatgtattcacagagttacacaaccatcaccagaacatttgcagtcccagctatttgtgagatggaagtaggaagatcgcttgagcccaggaggttgaggctgcagtgaaccatgatcatgccactgcactccagcctgggtaacagagtgagaccctgtttcaaaaacaaacaaacaaacaaataaaaaactcaacttcttgtgtattgtatgtaatactctatgagtaacttcccttttttatcattgtatttgtttgttcagtattctgggtcttttaaagcagtggttcccaaaggttagtcacaaagtaatcttttagggtgctttataaaaatactgattcctgggccctacccctagagattctgatcactggtggaagaggcaggtctaggaagtggggactccaagatctgtattttgtaaagttttctaggtgcttctgatgtgcagcttggtttgtgaaagtatgtgatgttgcatagtgtggctgaaactggtttcatttaagggtcccatcattgccaactcctgaatatgtccactatttctctgagaattccaactgctcagaactttgcttaaggaggggaggggacagcctccatctttccattacatgcatgactggaccaagaatggagtcctgaaccagtctaggccagtacaattttctctcccaggaacttggaatttagaccaagacttgaaatgagtcatgagtgggcactaactggaaagattttttagagctagggaagccattttccaccaaatgttcactaatggagactctatcttaaaggaaaagtggagagaaggaaacagatgggcaaagaaaagtgtcagcaagagacttagagatggagaaccatcttgattacttactttccagttttcttgtccctgccccttgtgagacccaattttacctcctgcctttggagactataagttactgcttctagtaaattgtcttgtttgaatgagtttctgtttttacaattaaataacttgagattaaggtaatttaagcctaaaacaatttagatggcatctaaagaagcacttctaaatcctgcattcttatagaccaatactaaatgtcccacttcctatgtgactgtctggtcatgtccagccttatttctaattgctgagacagaagttaaacccctccagtcaaaaaaagaatcagtctttttatcatacacaggaaaaatatcatagctgaattacttccttgacttctatggagggaaaaactagctcatatgtctggaatttaatttttcctaatccatagttacatatcccactactttctccttattgatggaatagaatattagtaataaaatagtaataaaaatgagtgataaataaaatagaaaatgtctgtacaatgttaaaggattttcattttttatactcttcacaaccctatgggatagacaaggatggtgtcattagcccaatttcttaatttgagaaaactaaaccaaaagtagttcattttatttatcaaatatctattgaatatttcttatgttccatgaatatacttccctgttctcaggagcttatcttttagcagggaaggcagataagctattaccataaggtaatctgtgagttaagagaagaaccagaacaggccttctaaagtgaaggcccctatcccttggctctagctatacccacagtcatctaattcattctaagtacatgatgagaatcttaaaagatgaggtaccagatataacttacttgagggaaatttaatttcttttgtttttttctaccctactgcaaattcaaaatgctccacatttaacacatttcgtattctcattccccacccaaaagaactgttgttccccgttcacagttccacatggctggggaggtctcaggaaacttacaatcatggtggaaggggaagaggcatgtcttacatggtggcaggcatgagagagcaaacaagtgaagggggaagagttccttataaaaccatcagatctcatgagaactcacctcatagatttcctgattcatggtattgcagcaccatcagattcccaagcactgctcttcttctctcactctcccactttgaataagtgctgtcagctctccctcctttttgttccccattcctctgctggagccttttttgtgccaccatttcttacctgggcctttgcaataggctaaccaacattccagctctaggcgtctttactgatttctggcacaaaaatcggatcataccattccagcacttaaaaagtcatgtttctctgtttttaaggattataaaattcaaaatctttagcataccacaaaaaaccctttgtaagtttaggataccagccagacccctctcctgtcatgtcctactgcaagtagcctcttttcacggggtgtctcacacctctgcatatatcattcccttattccctcttcctcatatgatcctgtactcctctcctcttttaggtaaactccttacttctagtgcttcaaagcacaatttgaatatcaactctttttaaagccattgtattagtctgttttcacactgttacaaagacatacccaagactgggtaatttataaagaaaagagatttagatgattcacagtttcacatggctggggaggtttcaggaaacttacaatcatggtggaaggggaagaggcaagtcttacatggtggcaggcaggagaaagcaaaccagtgaagggggaagagtcccttataaaaccaccagatctcataagaactcactatcacgagaacagcatgggggaaacagtcccatgatccaatcacctcccatcaggtcccaccctccataggtggggattatgggaattacaattcaaggtgagatttgggtggggacacaaagtcaaaccatttcagccatccctgaatgtctggccatcccattctttagtattcatcacatggtattgtaattatttgctcatatatctctctcttccataaggctgtgaactcagctatgtcttcttccacacccagggaatgcttggctgtctcagtccattttgtgctgctaaaacacaataacacagactggataatttttaaataatagaaatttatttctcacagttctagaggctaggaagtccaagatcaaggtgccagcatctggtgagggctttcttgctgtatcctcacgtggtggaagggcagaagagcagaagagaacacccacctccacaaaccttttgatagcagcattaatctattcatgagggtcactctattcataaaggtggagcactcttgacccaaatgcctcccattaggccccacctcccaatattcttgcattgggaattaagtttccaacatatgaattttgggggacatattcagaccatagcagtagccagtgtttaataaacaagaaaatgaataaataggcttagtagtgttatcagggacgacagaagggcatgatgcctttctgtgcccaacctcctatcaagtgctgccctcccaccacccagcactatgtgcctatgcaggaatgtgtcctttgagcaaaatacagcaaggaaagagggagaaaaatctgtgttttcactttttttctttttctttttaagaggtggggtcttgctgtgttgtccaggctggatttgaactcctgggctcaggtggttctcctgcctccacctacgagtagctgggactacaggcacacaccacagtgccaggtttttgtggtctctctttaaaggtga

SEQ ID NO: 98114 - DNA, 19398 bp, Homo sapiens
gagctgggaaagctaacctggagctggcagagggtcctagcccacctcaagctgctagcccgcgcctagcatccatcagccggaattccgctcataaatggggtccccctccctgtccagccgtcgcctcctgcccccaccttcttgcgctgcttgtgcgaggagtcgtgcaggttagagaggcagccagatcccagaatggtgcgcaccgacgctggccagtggaccgacaccagccggtgctctccgagcaagatgcgccgcacattgtccgcgcccatcacccgtacggtgggccgcccgaacagatgcgtcttgtagatgaagccgtatttcctgcgcttcatctgcaggaacttcctccgctgtgggaggaaggcggaggagagaagtgggcatgagggggcgccggggagcgccgcgctcccgccagccctgctcctagccgcaatagcatgcctcccgggggcgcctaccccgacttcagcagaagcccagagccgcgccgggctccggggaagcagcctgtcccgccccaccctcccttacctgcagtaccatctgcaaggtttccccaaagaaggggaagcccatagtcccggggggcaatgggagggcacaactgcggtcgcggccgctcacgcagtacaggtcccagagcttgatcgcagccaggaagagcagcagcggcagcacgaaggtgcagagcgcactggccagcagcgccgggagccccatggcgcgccgcgacctcccgcgccacctgccgccgccgccagcgcttcaaaccccacggcgctgccgctttataggcggcccaggttgctgcccacgttaccttggtcagacaattagttcacccaaagttcatctttaattgcggattgggcccctggctcctccccccgcgaggcgctgcccaaaatctttaaccgtttgttccgcgccgaggcagaggcggcgcggtggcggcttccctccgagcgcgcctcctggggtgcggggctaggagctgcccgcctcccccatccaaggtgtgctgagctccgaggcggcggtgggggagggccaggactccgaggagccggaattccaagctctagccttcccggcggtctctttggaatccctcccgcccggtcccacccgctgccccggcccaaagcagccttcactggctttccatttccaggtgccgggtgggctctcttccacgtgatgaggaagcaagggaaagtcctttcaggaatcgtccagctgcctcctcccacgtgtggggaaactgaggtccaagagagatgcataaagcaggcctccagacgtctccgaaggatcgcgcagaagaactcagggccagagtccaagagagagcctcggggcatcgggcgcaataggcagatctgggatccccagctccccaacccctgcaagggggccaggactcatgaagtcttagaaggtcctacttcaggatacaagaaggcctccaggtccctcaggtccccaggtgctaccctgcacaagcctgatccccgaccctggggcacttcgtctggggctcggcagtcggtgcccgtctctgagatccaagcacagctcgcctattcggagggccctgctgcttggcgccccagctggacagcagggaagggggtccttagccctggcaggataaagagacggtataagaggaaggggagcccaggagtcctggctccgaggcccggctccatctgtactgcgtgtgaccttgggcaagtcaccacacatcactgtgcctgtttcctcctccttaaccgggaggcgatcattcccgacctgtctaagcctcagggtagtgagttcccaaaagggggctccggttgcaactactcttcccagctccaggcacggtagactgcgttacctgggtgtccggtacaccgggcactggagtcctcctcctctctcccaagtcccacccagagtaaagccactgtcctcatccaggtgagggggtgctcggccctaaactcagggctctaccgacccctaatgggaggggtgaagggatccgtactgggaagtcttctgtactttgcccatctacaatcagctgctactgagctgccaatgcccggagctcagacgctgcgggacgcgcacctgctctctctgctctccacctgccggagcttcccggctcgggaccagtcagggtcacacgctacctgggtttgggcgctgaacgcacctgcggcgccgaaaatgaaacagaatgacctgcatttgtttaaaactgaacactgtctctggcagaagcacgccgcacgccttggaaggcgtcccttggaggtggaaaactctgctcctgagagtttaaatgcgttgcccttctcgcggtagtccccaaacccggaggtatcaggaaatatctgcagaggtcggagggacccgcacaatcctagcgactctccaagccagagtcgccgccacagggagtgtttcggggggtcagcgtttccccataacctgcccagtgtttcagaggctctgggcagggtttcagtctccggcaaacgatttggtggctgtaaacacggcgaaccaacctctggccactgcaggaagccaggccaatcgcgctggaggtaattctcagaaatcccgggtccgcccctttctggacagcgcctccggccggtgtgcaaagccgacgaatggggacgtgacctggggcccattcccaatcctcgggcctgacccgcctgtgacccctgcaggccggaccgtgacatccgagtgaactctgcggggccacctcgccaagttcagctcaagccgggtcacaagatgagcggggcctgcacgctggaaattgccgcagggaaaaaaacgttttaatctatctgtacatcgaggccggcgggggcgtccggcaggaaaggattaaatgtgagagtgaacgatcattaaagaacatcttgtaggggggcagggcggggggtggggggtcaataaattaccaggccaataggaactttgatctaggaatctcgccaagctttcgtgggtggtggtgggcggggaggggggtgggttcactgaaaaacaactcgtttccaagatgtttacaaaacagcctccctattgctaagaggcggggatggggagtcgggttttttgtttttttgtttttttgttttttttgctggtggggtggggtgagggtacagggactagactggagtcacagcaaaggagtccacctccgcttttctcctttcagcccccggtctcatttctgaacgtgcgttcctgtctcacagttctatacctgctgttccctctgcatgtggcacccctcccccaggccaccgctggctggttccttccaaagtcaaatgtcacctcctccaaggttccccccacccatccagcctaatttagccccagacactatcacaggcctgttttatttccatgacggcgattatcaccactggacatattcttacccttttgtttgctagtttatttcttgtctgcctccctccagagcatatcaagtgcaggagggaaggaacctcctctgctccttccccagagaatctgcagctactaaaacaggagctaagatatccctcaaaattactgagcatgatgtacccatggaaaattaaaactggagccatccctacagaggcttatagttagtccagaccccaatgcaggtcaaccaggtcttcttggaaccagctcaactagccttgcttctgagggtccccaccccattcttctctcctctctctaaatcacaatcaaccctgaagcctgcatccttctcctcgcccaaacccacgcttctcaggccaggctgtcctctgcatttgcaagagcactcttagggcaggcccacgtcctgccacctttgctgcccctggtgtctcccaagctcagggcctggcaccaggcccttggctgacaatgggtgatgaattgccctgtgtgggggttatggcagtgtcagcccaggttggaagggcttgctgtactgtggagctaccaaccctgtaagtgcctgctgtgtcccccttccttctggccctgggatccaccttaagcatgaggtcaggagggcactggctttcttctggttcactaaggggtcagctcaggcctaggcagctacttccctggctcaccccttatgtccagctgccccggtctgttggaagctgggtggcagattgaagtgggctgttgggaatgatgacatggaggcttttggctttgatttaaacactggttggaacctctgtaccggaatggttgagagagtcctcaagtctagctagggcttatcatgaaaaggaggccaaagtgttcagccctacctgatggccacaggaacagaggttggggcagaagagtgaagggatgggggtggaggagagcactggctggggagtccaggagcctattgctgggcttctcaggtgagtcattcacctagattgctcctcaatttcttctctgtgatagagaggatggtgaagccgtaaaaccagaaggccctgaaatggcagggaggggtgagggcgcagggactagactggagtcactggaaaggagtgactccagggtgtggtgggtcacacctctaaccccagcactttgggaagccaaggcagatggttcgcttaagcccaagagtttgagaccagcctgggtgacatggtgaaaccccccgtctctattaaaaatagaaaaaaaaatagctaggcgttgtggcacgtgcctgtagtcccagctacttgggaggctgagatgggaggatggcttgagcacgagaggcagaggtggcagtgagctggttgtgccactacactccagcctgggccacagaggaagaccctgtctcaaaaaaataaaaataaaaataaggtccctgaaacctggagacaattcacagcccagcttccggggttatactcagagagaagtctgggcagcccaggccctaggctgcccagctcccagctcctctctgggtgtactgtggggtgggtccttccctggcctccccaaccctgcaccccagtgccttccccccagggagcagctgcccagataaaccctagcctcctcactcaaccgctcccaagacactttatttcttggccttcctatttttggtacaaatatctcaaacctctctaattatgtctcaacctcccatgaaaataatccagcgttggagacgtgttggtgtgcctattctcctctgtatacatgacaagagtaaatgccttcttaaggtaggaatttttccttttaagaagtggccagcagaatccggtgaccttgagccctttcgagcctggaagtgcccacagttgctagtttccgccgagaccggcagagtggccaaggcgcacgaagccagacgccagctgccagagggccttccgtcaggcatcctctgcgtgttttttctatggcccaaagccaggccagggttgcgcccacggcgtgcccgcttccttacaagggttgcaggtcccaccgcgtgcgtcgggtctctgcaatgtccccgagttgcaatattcccactcccctgccacccctacctcgccttcccccatccatgcaccctccctggattggctcgggaaggggaagccaagcagcacctcgtggggatctatctattccctccattcctgcttggcccacgacattttccttcctctgggcgcggagcgcagaaggcatcttcccatgggcttagatgcttctctggcgcggcagcggtggctcgccctcctccttcctcgagtccggcacacatccgcgtttggcgaacatttgttgaaagattgttgaacgagtgaaagagtgggcgcgcgacgctacaatggggagcggcagatgggtggcgctgcgtgcgcgccatagccaccggccaagccgtgtcctagagcgcaagcatgtcagaggcatagcccattccccgcaaccgaaggcgtgagggggtggaaaaagagccgcagcccgtccactgggtgcacgatgggcaccgtctgcatggcggggaaggcgggtgtggccagttcccagcgcgcggtgcgcactagctccacagctagcagctggagcacsgcttgcgccagctcctggccgaggcagctgcgcgcaccgccgccgaacgggatgtaatggaagcggctggaggcgccccgggaatcttcgcgcgctgcgccgaagcgctctggatcgaagccttcgggagggctgcggtacaccgcagccgtctcgtgcgtgtcccggatgctatacatcacgctccagcccttggggatctggtagccctgcagagaggcgaggagatcagcctgaccacgaggcacctggaaacgggggggccctgaactgaccctccaccctggtgcttccatcaggcttccgaaaaccaggaggaatccgcgattaacccggaaaccaggagaaagctctgtgttccaatctcaactccttcactggtgaaatgtatgaccttgggctagatgcgcagcctctctgagcttcagtttcctctttgaaaaaatgaggggaaaaatggcccctttgttggtgaggattcaaattaaggacttggcacatatgagtgttcagtaaacggtaactattagttatgttcccgtttggttttgtctttttttcttctgaccttagatgaggagacctaaattctagtgctacacctcccagctgctagagtgggaaaaatgcacatgacaattcctcgaggtcagttccatggtagagctcttctttgcattgaactgaaaacttgccatccttcccatccatcagctggacgataatgttcagatttggtaccacactttaagaaggcgcacatgagaatcaaactggccatccttaaaatgctgaaaggcagttttcatgttccctctgcccacccctagctttttcaaccatttggctttttgatacgtcttccaaccccctgactacactgctaccctcatatcaagttccagggtgaatactcaaagtttctaactggagaacagaacatcttggaatcatcccaggagctctctttcctctctagacatcagtgttctcatctgtgaactggaggtggctaagaccctttcctgtcctctgctcaccaccctggttctgtgcttccctaaggtcttgtagggcactccagcgcctgcagaatgaagctkgcattccaagactgattccgcattcaagacacttctcaacatccacctttgtctgagtctgctctctctgtaataggctctcccgtccaaacctttcactgctccagttcaaactccagctctcagaatgtgttggtgtcatccagcactagagatcactctcttcacactacaagtgggatgaggctgtcacactacaagtgggatgaggctgtcagtcccggcccccttcctctccaagtggagcccctccagggtagaatcccagtccctttgatgcctcctgaaccctggcacgcaatgtgccacaaatgttcactgtggaatgcccatttttatctggagccacccagccaccaagcatggtgctcaggggactgcaacgacagcctttcaggcaaacacccacagtttggcacagccagagcaccactgcctgaggccaccactgtacccccacagcccggacccacctggatggagtgtcagagctggaaaggaccaagacagcttccttgcagagagtaaactgaggcccagagtgaagagggaactgcccaaggtcatacggagatggagtcagttctagacctcaaccttgctcagcccaaaccggcctgatcagagatgaagcgtctacccggtattttaatccccccctcccctggaatctggccccagccagaaccctggaccggtcgcaatgaggggttccttcatcttgtgagggagccagaggggtggagcacaggacatactgaggggttctctttgttctccatccacactcactggctgggagggggtgctgcacggatagaagagtatttttattctaaaactccgctctcattgaattgaccgttccgaaccgctgccaaaagctgaagggtacgagatccctaaccttgcagtctcgccaggctttgcgtccctcagcgggggatccggggaggtggaacaaggctcagcccattttataggacggaaggctgaggctctgagggcaaaagaggtgaccgcgccgtccgaatccctccgccctcctcccacctgggcgccgccgcggcaggcggcaggcggcaggcggcaggcggcaggaggcaggaggctggccatgggctggcacggcgcacttacgtcgagctcgaaggtgcgcagggcggtgcggtagcccccggacactggcggcaggaggcgcagcacctccttgaccacgcagtcgacgtagcgcagacggcccagcgccgcgaggctgaggtcgggctcgcagccgcagtcgggcgggggcccctcgctgcccccagcggccccgggcgcgcagccgcacgcgcgccccagcccctgcgccaccagctcctcccgaatcttggcgatggccgccggatgctgcagtagcagcaggacgagcgaggtgctggcactggccgtggtgaagaaggcggcgaagaggagctccacagccgactcctgcaagacagccccgggctgcactgagtctcgggcggtggagtcgcccggggcgctgacccgacggccccgtggagatgaaaagcacccaaatttactattgcgaaaagccagggggcagggaagtgctattaccgccgcgactgtgtgtacggttttgaagtcgattaaatctcaagtccaccatttgggaaagtcagctgtagcaacaggcaacattaggatctatccacccgccttgcgatggttcccagagagaatgcgggaacttactctaagcactcttcttggtgctttaagcatattcactcattcggttctcacctcccctctgtgaggcacaattgctgctcttgttttatggagttgaaaacggagactccagagtagtgctcaaggtccctacagctagcactcccggcaggagtccagtgctcttcaccacctggtggtgcggccgccaaccccagtggaacagcctgacaatggctgcagtgcaacaaaggcacctgcagcagcagtgccagcctcgtaccaatgccggcatcatggcttcatcctctccctaccggaatggtcccagggagtcactaaatgtcttcttggtctgctctgcgcaagaagagcccattgctcatgctcttattagttccaatctcagaaaagaagctaaagctgaggcctacccttcagggatgtctctggtagaaagtgggaaactgaggcccagagaaaggatgcgtaagagttgcttatggaagattgaggtctccctatttctaacttcccctccccctaacttctccactcctttttgggtgctcaagcaagtcctggggccattccaaagcttaccacctcccctccactgtatgtgcgatgtgtgtacaaggggaggggtcctaattctccaggagatccacagcaacaagacagacggatagaggtaccaggtgccaaggtagctcatagaaggagagaggtgattttggaaggaagaagggagctttgaggatgtggagtttgatcctgagccccttagagtttctagaaaaaatgaataatgagggctttgtaggcagggggacagcagaggcaaaggcatggagtggcagagaagggcagtgggggaaggaaaggagagagagccatttgtggccagaaacctgcaaagatgggcctaggattcttgccttcagttctcctactgacaaggctggctggwggctgaaggctgcagaggtagtgagtgtggctgagtcattactggaacccaggtctcctcttgcccctcatcttgaggactgcctgtgcctcaaagtggggccacacaagatgtggctctggggatgcascattggtgtagggacctgctgggaatgcaaaagaggggagaaggagcggcctgtcagcacctaccttcagctcctgcatggagggctcatggcccagctcccttgcactgtgaatgattaggtcgagggcatcacccggctctgcagccttgtcctcgtgaagcttctcagaaatggccccctccaggtgcygatgcagctggtcccttgccyggatgccctgatgttcagggagagaagaaagatggggcaggaaggctaagggggccaagcccggccacttacccagaaaaccttctcagcactggctctgccaacatccttgtgttaacakcttcccagcttagctcctggcctggcatatggctgggctcagtaaatggtcggggatatgtccactgtccacaaacatcattctgtcttgattatcacaatccccctctgagccacagcagagttactgtcatcctgaggagaggatgctgaagttcagagaggtcaagcaattgcccagagtcacacagctgtccatgtccatgcctggcacagagcccagtgcggctagggtcagcccattgccctttccctgtactaggctcaggctggggtaccttgatgcacccagcaaagctctgacttagaggacactattggatttgtaagcattagcctctgtaagagcgtgggcaataggggatgcctctccagagttcagggaatagccgcagcaaaagcattcccccggggaaagcactgtaattsagcacttgagttccatagtcggaggagatgaggttaaagtcctgttcgtgcccctactaacggtgtgatcttgggtaagtcaataaaataagtttggccaataaaatgagaatcataacactttgcaggctgcgaggattagatcagaaaacgtatccacggtgatcagcctatagcatgatyctttacacatattatttttatgcaggtgactgaaaaccagggaatcaaacagtgggaagtcccagaatagggggaccaaaaggcgggatggggcatcctagctgctctccgggtcctgcccattgttctgaagtctggagaagcagcagttctctgatcccgaaacctagcgggtccagggctggtggagctgacgcccacacccctgggtccggggctggcgctgggctggaccggggctcatctgcagccctcacgctctcctcggttccgcagccatctgggcttccgaagaggtgatggaggccggccccaggggcgccgctgtgggaaggagtccgaccgactggcaggacgcctgccaccgagaccccaaactctggcggcccgcgcttgctcaggctggagcgcgtcgcggcaggcgcgtcccacggaggtcgtgtggccagccccaggtcacaccagcgaaccagcacagaggccaggcccagagcccaccgccacgccaccgccacaacgcctcccacccccgggccctgccgccgttcccagcagaggtgacggacgcgcggggtgcgccgagggcgtcccgtctgggtctgggaggcccgcccgcgccgcggagcctcggaggaaggtctggagccggggcggccgtaccttgcgtaggccactgaagggaacgtccagaggcagtgagaagaggttctccacgagctgctcgaaggtccgggccagcgtggcgcactgcgcctcgtccagccgcaaccccagcaggatgcgcgcggccatgcggaaggtgagcgctttggaggcgtcgtagactgagaccggcccgcccgccgcgcaccaggagcgcacctcatgccgcagcgccccctgcaggcgcggcacgtagcgctccagcgcggcgcggctgaacacgcgcgccaggacctgtgggagcgcgcgtgatcagcgctggcggcggtctggcctcatctgcttggcgattccggagtagccagaaggccagttccggtcctttctccctcttccaagcggcccagacctaaacttcctrgcttttgctttcgccatttcccccagttctgctctgatgcacacagtccctcccaaccatccaggctccagctgccatctcctctaagaagtcttccctggcccctttctaggtctgagtctccagcgcttctgctatcacagccacggaagatgggagatgaaagaatcttttagcgcagtcctaactttataaaccgaagctgaaggtaacggacccgcccaaggccacccgctagttaccagggaccttggtcgggttcacagtgtatccaacaccggggccccggcctggcccatggcagatgccggggaccgcggatccgacgtatctacggtccattcccgtttccactcaccttgcgccgccgccggtgcggctcgccgaccgcacctagcagtgtgtgcgagcccagcaggatgtgcgcactctgcggccactggctgcgcaccaggcggtgctcgcccagcaggatggtgcgcacgttctccgcgccgctcacgcggatcactggcctgcccagcaggtgcgtcttgaacactgtcccatagcgctctcggcgagaactgtggaagcgcgagccctgcgggcgaggcggagggtggagagctggaacttctgggcctgggctgggatctgacccagaccttccagctgccttttgatcacaacttcctgtccctggctggcgcgtttacaaaacaagatccccagtgggcctggtatctactctacgggaatgtacatgctcctgttcctattggtgagatgaggaaacagactcagagtgaagaagtgagggcccaagggctcacagctgggccaagctccaggctccttttctacccttgcaggacgtgctcctcagaccccttcctaaaaccccttatgtttaccccctgcgttgtgtctgggagttgctctggggggaattccagtgacttgaggtcccttcgagggaacggagtakctaggyaaaggcgagagttgtgcgcgcttcccggggtcgtgggcgatgggcagggactggctacaaatcccatgggcattgagactgaggagggtccagtgggagccgggggaagaagggaccgtattagcgctcggggtcgaaggactgctcacctgaactaaccagtgcagcgtttcgccgaagaagggccaccccatggagcccttgggcagaggcagggtggaggcccggtcccggctcagcatccagcggagggtccagaggtgctgggccaggctgagcagcaggcccgcgcacaggagagcagtgcccgccgcccccagcactgacaggcagctcagcccccaagggaacatgatgagcccgcgggggccaggccgctcagagcgcagggagagcaggggacgcaagaaccggggcgcgagcagtgcgcagtgctcacctgttccgtccgcaaaaggcctggggtttgggggcaaagcccgagatttataagctcaggccagaactctgttctaaaaacagacggacggtgaaagactgcagtgaccgtgcgcccttagggaacgtgccttcctcgaggccggcacgctcaggactttttcctggctcctgggcccaaatgccagtccctctcgaaggtgcctgctgcctcgggaacgctcactcccggctccgcggggcacctcccacctcctcccgggctcagcaccctttggatagaagaagggaaggagggcgaaagaagagcaactcaccagtgttgccaacctggtctgcagacccccgccccacctgtccctcctccagtcgtttaacccttcttggcccacgctggacacgtttatatagatattggctccccccctacggaccgatcccggttcacacaacgtgacgtgtctttgcatatttaaagcgctccacgcagagtggtgattggaggcggtgggcagcggcgcgctcacggaggggctctgagtagggagtggcaggcgccggggcggctcgagctgggctgggggctcgccccgcgagcgtcctcgggcggggcctgcgggttcgcgccagagcttccccgctcttcgcaggcgctcagaaagtgggcgaacccaacgcgcagaactgacccgggcttgcgccccgcagtgctcctggcccacccccggccgctggctccctctgccgtccccgccctcgagcttctaggtgcctttctctcgccactccaaggtgaaagaactgggcttttctctcctttgctccgactatttcagggaaactgcagtcgtcgacgcctgcgttggcatcgcaaaagcccaggagggatagcgcagccgagattctccgacagctccccacctctcccggctctctgatctaccacgtcaggtatccttccaaagatggcagttccactactgccctaggcttcataaagacgtcctaagcctccagaagcggatacccacgagcacctttccggtctcaaggaccgaattcatccttccctgcacatccttccctccctcccccgagtttgcccgacgactcttgtcaatctacattgttgcgttttgggctttgtgcgtcccattcaagggttccaaatgcctcaggactcactcgttcttgtccctacagtgcaacctggggtgtgtgtggaggggtgcagggtgtttatattattggtaagagtaaagaggtcccacagtggtctcctccaggcagtgcaaaggcagtatctctctgaatcccgggacgtctcagtcaaagcagggaagacaccccaagtacgctggaaggctgggtaaggcgcgaagggcagccccattccagtcttcaaagagagctagctgttcaccgctcctctcctccagatttcaccgtgcctgaagaactaccatgcttttcatgtaatatttttaaaaacattaaatactttggattaagagatgatcgagagaacaagtgcgcatatgtatatatatgtgtgtgtgtgtgtgtgtgtgtgtatgtatatatactgttttggtgccactcccattccagtaactaggaaataatatgccttttctccaggaagcacttgttttaaatcagtaagctctgaatagacaaaatagtaatgcattttcaacaacttgctcaatatttttaatatttcatcacaaaatccagagatgtacatataattctttacacttattttacagaatcaggcatagtttcttacaggcctaaatcctgaaaaggcaaagggaagattcagcataaatacaacaaagggagaataaagactggatttatattgccatttggaccacagaaacatacacaaaggaaaatgtacatttgttttaggttttccagagttcatttggtttggcttgtttccacaatgaggataaagtactgaaatctgctatttgaagaaagtaacctgacccctgtggtaacttctgtgtgcaggaaccatctaccctcgcacaagctgcacctgaagtggttagccccatttagttcctgtcctctcttttaactggaaccaaaccaaaccaaacaaatccagaatggggtcacctacaagcaatatagttagaaatattaaccctgatgaacagaaacaacactgcatctttagaaaatccaaaaccttttgttcatattcagaacgattaaattaaaccacccaagtagaacaaataattcacattcttactgagttaaatcaagtttgatttcaggcagcttttaagatttgtctatttccccttcagaattagcagaattagaaattttggtctgcttaaatcacattgaggtgaaaataaaagctaaaagtcagaaaatggtagtgaaatactaccatatcagacatgattgaattccaaagccatatactgatcaaaaaacagattatcattcaagtctaaatagaaaaaaatacttatgagtagaggcatatgtttttcaaatgtatttgtaatcaatttcaggtataatttgtgacaatttatgtattacacttttgcattttcccctaaaagtgaaaaaatggtcatttttttccatatataaaatagtattcgattatttaaaaatccatacaaatgatatttattactatttcttgtttaagccctcatgtatcttctctattgtatttttggattctgtaaacaaattactgtatcatgaccaatacttgctcaagatcaacattgaatcatggatttggtgtcactgagtgcaagccatgtgaggtctacatgtgctgggacataccattcaccaaacttctcagctgtttcacgactgtctctatcaacttctgtttgtctcgatcattcttcctgaactgagcaaatatattgttctttttgctagtatccttcatcctagaaacatatgtgaatgaagaagcttggtaaaagaaaattaaaagctaagctgtcacaagtaaaatatcttggcatgctctgaattatcccacactaatcctatgcttgaaaaatatagttcaaagaaagtagatactaaataaacatacagatatagtaaccatgcaaaaaattagaagctttattttacattctatgttaagtggtatttttgcattagtatgtacatctaaaatatgctaggtttactactatcatactattttctaatattattccacaaagtatgctaaaatacataccctgtatagactctgctaatcatattcatagcaagataaggtgaaaggaaaataacattagaaaatgtaaaatagcgatgtttttgcctcagttgcatttcatggcattgtaaaataaatttacatttattttaaacacttcctcttgtcctttcaaatcaaatacaccacaaatattttgaaatataggaaaataataacaattttaatttaaaattgaaaattttaatagtgatacttttttatttttcttatccagcagcccccagaatcacagcagattcagagagtctcccaatagtgacattttaaatgaaatatgattgagtaaagaaaaagtctgtcacataatgagagggaaaagttaacacctaaatttatgtttagttggacaagatgcatcagtaaatcctattacctcagtttttactgtattttttttttcaaatcacatatttctctacctgcaaagaatccaagtccataatgctaagatttaggtaacactggtggcaaacattccaattcctggtcacatttgacaaaataccttctttcctgagttatagacttttttttttaaagaaagctccaattgtcacatccccagtaaacatatttctaaggtcaattaagcttgcaattcaggatacaaaaggaaagatgttttgttcacatcaatataaacagcagttgcttatgaaactacaccaactctgaagggcaagaaagaaaagcttattttttggtcattaaactagagtgagcttttaagctccatctagacttttcttttttgacagaaatctctagttcttcagtttatcactgaatcaaaaggtgctaaaatgttatacaaaaaagttttcagaatatactcacttctccaaaagagtaagggctgtgtttggattcacccgaaggtacttagaagctggctgcccataatcagctaggtaagtagaccaatcccaaaccataaacaggtcaaggagctgcgaaagatgggggaaatgttaaatcaacttttgattatttacccagttaatacttaaattatatgctatccttggtccattttaatatggcttgcttcttagatggaacagaatacggaaattcatttttaaaacttcattaactgtactttacaatcaaaatagatctttttactttgaaattactaaaaatgccaggggttgttttctagtaaaatacttcatgttttcaaataattgtaaaataatgaaaacaatgttaatatattaacccttgtactgatgtatagaaattttatctttatgcattagtcagtacccagatttaattaataaaggttggtgctactaacctgtatgaagaattttaaagaacttaaattgaacctttttttcttagaggtaagtatgtttacctttcaaggacgctgtttgcacctaagactttttccaaagtaatttaaaccaaaagctcagataatctcaattaagtgcattaaacaacctctgctagattctctctggtgatagatcctctgtagtattatgaaatgagggcttcaggattcagcctgttaactctaggctaccattttgtataaacaaacaacaacaaaaaagaaaccctcttgtttcccgtggtgtcttaaaattgactatttactttataatctccagttagaatcattgtcaaatatggaagtaatcttttaaaagcaatgccatgcctaaacctaagcaccaaactctttatccaactttaaaaccctaatcccctttaagccatttaaaaccaacttcctatccccatttgaattgtttcagaaagctaaatgctttacttactaccttcctttagtttttatattctttctttttgttttaactcactttataagtaaggggtcttactggttttgctttcaaatggaggaaacatttgcatttactcatgggatacaagagccgaccactgactctgagagggataaaactctggggtgattaaaacctcataaagaaaggtcaccagaaactagcttttcttgatgaaggtaaagaacttgcttgactatttccccatccaatttacaggtattaatagagattttcttgcaacaggcagaaaattctataatgaaaatattaactatggaaagccactctattttctttcggacaagataccattctgggccataccaacagttgaacagttgaaacactaggatagaaactatactgagacaatgttaaagaatatactgtctgaaaaagaaaagggaacttatttaaagttctgtgtaatttttaactgttgtttggccacatttttccctcctttcacaaagaggaaaagttactttcatacactcagatggtaagagtgtaaattagtataacgtctccggaatgtgattctgcaatgtgtttaagaaccttataaaagtggccattccctttgattcagcaatcctacttcttggaatgcaacttcgagaaacagaaaaaaatttatgcacaaagatattaatctcaaaaatgttatttgtgttatcaaaaactgaaaatagcctaaatctcaatattaagagactggttgagtagtgaggtctatctgtatgatgactatcatgtggt

SEQ ID NO: 98115 - DNA, 46148 bp, Homo sapiens
tgtcttttatgtaatagtttttttttttctttgagactgagtctcactctgtcacccaggctggagtgcagtggtgcaatcttggctcactgcaacctccacctaccatgttcaagtgtttctcgggcctcagtctcccaggtagctgggattacaggtgtgtgccacaatgcctggctgatttttgtatttttagtagagacagcgtttcaccatgttggccagggtggtctcatggaactcctgacctcaaatgatccacccaccttggcctcccaaagtgctggaattacaggcatgagcaaacgcgcctcttgggctgtcttttacgtaatgatttttgaagatttgtatatattctgataatttgttggatatacatattgtagatattttctcccatcctatgtcttaacttttcattttcttaataaagtattttaagtgaacagaagttctttattgtgttttcattatggttagctccctgtgtgtcctatttaagaaaatttttcttgccctaaggaagttatcatatcatgaagatattttcctacattttctttgaaattgacttttgtatacagtgtgaggtagaaatcaatattttttactgtattattcaattgacttgggtctatttattgaaaagactatacttaaccctataccattaatcataggactatattatatatataggtctgtttctggactgtatttgagaagcagttaattgttaaacttttctaattattttctcaagtaggatttattacatacttactatgaactaggcatcacattatgctaagcatttcaactgtatcatttcatttcaaatttcatcaaccctctgtgagataggaactattattatccccgtttatagatgtgaaaatcaaacaagttgcccaagttctcctagctagtacatagcagaatgcaggtctagttgactttaaagtatggttctttaccgtttcgcagagcagcctttgagggggaaaggaacgataacattttgggggttgatgggggagaagtgacggacaagagtgaggacctataaaaagatgaacaggtgaagaatgaagaggtagagtatgctaaaaacgatgtctgcaagcatcacacttttgcttggaagaggtattctaattgtttgtgtgttttgttgtagtgccaaatccccatttgaagccaacttatcatttccccaagacaatgtcatttttagtcaccccctccattttcatcaggggcacctatgttatttcagtgtcttcagctttggaggtacctttcacttctgtatcctttgtgccctatgcccaatgactcatatcttttaccacttatttcttcaactcactcttaaatgaaattttccgtttccattcccaccacttcctgtactctatctatattgcctcccctttaaaacaatagtgaacatttaagtgaacatttagtgaacatttaagtcttaccatgtgccaggcagtagcctaaacactttaaatgcaacgtttaattgattctcacaagaatactgtgaagtagttactgtcattattcccattttacagaagacgatgaaaatttgaagaacattaagtgatgctcaacgccacatagctggtaaatggcagagccaggatttatatataaatttgatttcagatatctaccagtccaaaccaccactgtattatgtacaatacttccctagctctaaactaatctctgcaccctagcatttaagaatgccccaaatctagctctaatctctctttctgatctttctttcactaatccttttcaaaaattcttctccagctcaagtgagctactcaaattcctctaaagaacctgtggatatttccacctctaatcctttaccgaaactcccttgccttgactgccccctcctctcctctcctctcctctcctctcctctcctctcaagagctacctttaagtcatagcttaagtcccacttcctctacaaagcctttcctgcctcttactaatccctctgtctcaatgtatctggtacctttcctccataaaaaaagtttctaattcttttaagtatcacaaaccaccatgggccttattgaaaggcaatatgtatggtggtcaatagcgtgagctttgggctaggtgctgtggctcacacctgtaatcccagcactttggaaggccgaggtgggagtatagcttgagctcagtagtgtgagaccagcctgagaaacatagtgagaccctgtatctacaaaaatcttttttcaaatagccaggtgtggtggcagcagcctatggaccagctactaagcaggctgaggtgggaagattgcttgagcctgggagttgaggctgcagtgagccatgactgtgccactgcactctagcctgggcaacagagagataacactctctctctacctatctctctctatatatacatatatgtgtgtgtgtatatatatatgtatatatttagtattagtactcacattgctataaagaactacctgggactgggtaatttgtaaagaaaagaggtttaattcactcgcagttctacaggctgcacaagaagcacggctggggaggcttcaggaaatttacaatcgtagtggaaggtgaagaggaagcagacatgtcttacatggcaggagtaggagaaagagagcaaagagggaggtgttacacacttttaaacaaccagatttcttgaaaattctatcacaagacagcactagggagatggtggtaaaccattagaaaccacccccatgatccaatcacctcccattaggccccacctctaacattggggattacaattcaacataagatttggctggggacacagagccaaaccatatcacacacacacacacatatatatggtgtgagctttgaagtcacttatatttgtgccccatttgcttactcatgactctggaagtgttatataatttttttaaaaaaatctgttttcttattgtaaaatagggataataatagtacccacttcatttgttcaataaatattctgagcaactatcatgtgtctggcactgtgctgagcactggggattccacactgaaaaagagaggtatgcttcctgccattgtggagcttgcatctcagtgagggaaacagggctaaattattactacgtatgtagctaagtgcaatggaaagtaatgtgcatattatcagtaatcctatctagtctgtgggagagatgctcatgaaaggcctttccttcacctaagttgagttttgaaggataaagaggagttagggaggcaaacagaaagggtttaagaccattccgggtagaggaaatggtaaatttgcagaggcatgcatgttgaagaaacaaagaaagcccagcgtggctccataacatcaaatgttatggaggttaagtgagacagcagatggttctggatatttatcggtatataacaaacaacctcaaagtcttagtggcttgaaacaattatacttattctgattattagtctgcaatctgggtgaggctcagtgaagttacttcatctctgctccactccatgtcagctaaagaagtagagtgacaaacccaggcagaagctctaacaccttttgcaacttagcatcagaagtgtcttagcattacttctgctatagtcactgacatgcccagattcaaagctgtggccataggtattagcttatgttagagaagtgtcagcatcatattataaaaagaacatggaaaatgcaatcttctcaaagacacacagtattagtagaatgcatattcagccaggcgcagtggctcacccctgtaatcccagcactttaggaggccaaggcgggatcacttgaggtcaggagttcgagaccagcctggccaacatggtgaaaccctgcctctactaaaaatacaaaaattagccaggcatggtggctcacacctgtagtcccagctactgggaaggctgaagcaggagaatggcttgaacccgggaggtggaggttgagctgagatggcaccactatacttcagcctgggtgatgaagtgagaccctgtctcaaaaaaaaaaaaagaaaagaaaagaaagaatgcacatttgttgggcgtggtggcttacgcctgtaagtccagcactttgggagaccaaggtgggtggatcacctgaggtcaggagttcgagaccagcctgaccaacatggtgaaaccccatctctagtaaaaaaatacaaaaattagccgggcgtattgtgcgcctctagtcccagctactcgggaggctgagacaggagaattgctcgaacccaggaggcgggggttggagtgagctgagatcacgccactacactccagcctgggtgacagagtgagactcggtcttgaataaaaaagaatgcacagtcatagtttatatcagaattattacttggtattatcaccaccatcatcacccaacttccctcatcctgaccacatacttaatatagtattttgttgctttgagttacatagcattggtgcacatttaaattttcatatccattgaaataacatattttataaattaggaacaacaggttcatgcatgtactagacacttggtatatgatagaatatattgttgtagttattccacacattgtctgtcttactagtcaaccttcaaggataaggagttgctgttacatacctgtaaccctgatgtctagggcagtgtcctgcccagagtaggcactgaataaatgtttgtgttttttattgttgttgagctataattgttaacttgagatttcctaagcaggtgggttttctatcctgtattatttctagttcagatcatgcaatctatgcctaatatatattttctatttactctttttcagtaactgctgtctcaaagtaaaaaatggaaatctttgcctgaatggactggtagcaacagatctgaaattcttagaaatgttggaaccagaagctacttcccacacaatccatgaagtgggggagagagagacagagagagagagagaaaagagagaaagagagagagagaaactgggtcttatagagagacagacacaagtactacccagttctcgaccctcaccaggtttgtggctttaggttctgtgcctctcttccttatgtgtaaaatgaggctaataacacagcagcacagggttgttggaagagtaaaatgaagcaacaaacaagaagatgctagggatggtagaaaaatgctaataaatgtcaaatatggatagaaaggaaattggatatgaggtataggtctgtttagttttattaacaataaaataattatatatttaatatatttaccaaaaaagaaactgcttgacaaaataattccatatactataacgtcaaattgtaaggcttcctattgctttcactttttttagtaaaagtttttattgaagtataatctgattgcattttggaataagttaatttacaataatttaatttatcttatagccttttaagatcacattcagtgcaatggataaagcagaatgtatctataatttattgtcagggttagagacttgaactgataaggatatcgttatctactgtttagggcaaaagatgtaaaatgactgtgcattaagtgccaaggttttctctaaaaagggcccactgtaaacgccagaagcgtgccagttcaattcaacaaatatttaattagcacttgtgatttccaaggcaccgttttgggtactgaggaggaagcaaaaaatgaatagctgctaatgccagcgagagacaagacatgaaccaaacaactagagtggaaagagtggggcgtcgtgatgtagaaaaggcaaagcacaggaagaacctagtggcgcttaaaataatccaacttttcctgccttttttcttcttctttttaagattctattttggatcccttttcgcatgtgccaggtcgcttgtcggcagagaatcctcaaccctgagaaatctctcctcctattctttctttcctcacaaattcgatgagctcttctgccatcagcactgcttttggaatggtatctattgtgtgggtggcgaaacgatggagagatatttttgttctaattatgagaactgttttactgggggaaggagggagaggctgatctgaagcgctgatgagctgctctgagaggatcctccgaggaggcgttactaaggttactagagagaggacggcaggtgataggcacggtaaaacaaaatatattttcaaatgagaggcgtgggctaagcagcaagcagtgccagcggtactagatgccggattccctagaggggaaaggaaggaggcccagggaaaaactgggagccgcgacttggcgaaagctggaagcctcttcgtccctttccgggccgtttctcccgctgcccttgtttcccggagctgttctggctgtagcacaaggtcggcgcactcgggggacggtgccatttagatgtaacacgtggccgtgtcggaccggaagtggtgcccagtcgggacccgtagggagaggcgggttgcgggcggcggcggcggcggcggcggyggtggtggttgtggcgaggctgtgcggcagggcgcacgggacctgtcctgcagcggctctctcaggccgtgggtcgtcgctgcagctgccgggaaagaaggaaacgacgactccgggggcgaacttggcacacagggaggaagggaaagggtgtgtgaggagggctgtgggtatatttggcatcagggagaaggacctcaaaacttgtttttcatatagtactagctgatcgtcgggtttttttttgttttggtttggtttttttttttttggatgacagattctggagacacctggcatctccgtttttgagtttctccccgctcttgtcagttgattcgtaggcctgaagtgagtgagagctttttagttcaaccagtgagttaagataggtatgggtcggatggagcggccagcgaataaagaaatgggagagtgggagcaagaataggaagtcgtgtcctggggcgagggaaaagatgatgatgatgatgtaacatttactgggtttcactgtacaagacaccgttaaaaccctttagatgaggcaactcttttaatctccattcgtatgaggtcagccatcttactagcctctttttataaatgaggacactgaggcttggagaggttaaggaacaggcccaaagaaagacaaatggaaagtgcagagccaagcagtgaaatctagtaggctgatcctagaatatatctctaaacacactacagctgtcccccatcaagatgtaaagaacgtgaggacataggacaaagagtgagaggacaatatggcttgaacagatgtgrtaagacagctggagttgacctaaaaaagggtgtaaaatccaggtgtgtaaggcaataacagatgtaagggagggtagagttggaactcgggctttcaaaccttcatctccaaccttaactagcatcttcctatctaggattttagtggggcagagaagagaggtatatacccacacacctatgtttgaaaatggaattacagactttaaaggttatttaaagatttaaacaacttaaagattatttcatgtagctatcttatttaatagatgaagtccagggagatgaaatgacttattcaaggtagccaggactagaaacatgtcgtttaccctagatccaatgcaatgaagtttagagagttctttcctctttttccagctgcacttgctgtcgttatattagttttaacaatttgatatatcatttaacctggactgttccttccagccatgtaaattagttatgtatgacatcaaatagtccatccttccttcttagtgtgtgttccaaattcagtgcaaagctggaactaggagcttcttccaatacaattgagtggcaactgaggtcttccagcatttctaagaatttcagttctaaaatgaagtcccagcattttgggatgctgaggtggrcggattgctcaagcccaggagtttgagaccggcgtgggcaacatggcgaaaccccttatctacaaaaaaaaaatttttttaagtttgccaggtgtgattatgcactcctgtagtctcagctacttggagaggctgaggtgggaggattgattgagcccaggaggttgaggatgtgagccatcatggcgccacagcactccagcctgagcaatagagcgagactctccaaaaataactggataaataaaatgaaacaagagaaagctgactaatccaaagggcaaggtggtttaccttaaagaaactcaaaagaaaatggaaatctctacatatattgaaaaagattacaggaaaattttcatcaattgatgatgtactgttcacaaatactgtaattctcctggaatatagtaaatcatattccagagaggaaatttggagtaattgaaattgtgggcgcaggmatcaagtacagcagattagccacttactggatttgtaaatagatttacttaactttgattacttcattcctaaatgaagataactttctaacttgcagaattagaagtgttgtttgtaaagtatttaacacaatgtctagaacaaagttggtgataaacacacagtgattattactactctgaatcaaaagtgaaggattgctaaaccttgtaagcagtcactgcagcttttargcctggtttttcagtgaaaagatcaaagagtagccttctttgttcacctaatgataattaagggtgaaaaatgttgatgcatttcctgaaaggtatgtctcttatttaaaagcgaatgaaagttttagatggctagatggcctgtgaataggaatctgcccacaatgatcctttaaaactattgtggctgtttaagataacttatttttgaattattgtttcctggacaattggcaacatagattctaaatagctgactttgtactcctttacagatgcatggtcatggaggctatgattctgattttagtgatgatgaacrctgtggagaatccagcaaaaggaaaaaaaggtaagtaatttttttttattgatctatttttcacatcctttctagattaatatgaagtataaataaacaagagtgaaatttttgaattstgtttacatgtgaagacaattgctctagtgaatgaatttttgttcattaagctaatacattgattaaaaattggagaacaattgtgggaaaaataaaaattaattctgcaaaggggtttattgaaagggaaagaagagtttcagatttctggaatcttttcagaaatcagtgaaaccttttcattacatatatttttcattcaactgtcaaggactgtttatttgtaaatgttgtagctcagaaggggcttgaatggtggtctcttgccattacttgccttcaaagtgaagttartatggaggatgaaagtataatgcagcacagttcttacgcatacgtgaatgagcagactaaggtcacgggaagaaactcaaggaaggtttttttgaattgcaagagacaaaaactcttagcacataaagcctgtgcrttataagcaggatacgtcttggtggagctgctgtgcgtaggagcattgttcttagctttcagtgcatagaaactcagttttatactttgactcaggagtggttgactgatgtatactaaccaaacttacacggctgttgactgatttttttaagcaaatgtatagaaattggcttattatttcacactgagagcaatatattaggcatactaacaggttctgaacatttttataggatactcagtctctgcaataaaggatagtactaattataataaattacatttttgatgctttacattttctagatttttcattcaaaaatactactttgtaagaatagaatttgagcaaatctagttggatactytgctccaggattatattcatcactrtaactagggctgacagtctatggcagggtgtccagtcttttggctttcctgggccacatyggaagaagaattgtcttgggccacgtactacagtggagcacacacaattgtgaatctgttggttcacattgttggcctgaagcagtgctgggcctgcgtaaaatacactaatgatagccaatgaggtttaaaaaaatgtgaaaaagtgtcttaatgttttaagaaagtttacaaatttgtgttgggccacattcaaagccatcctgggccacatgaggcccatgggttgggcgagctggatctgtggtttgtgttctctataatcagccttgctttttgcgtatcattaattaccaaaaacttccttatcactatgttacagatagagaaatgaagaaacaaagagataaataattgaatcttattaagattaaggtagtaattgacagaattaggatttgaatcaggaagctaggtgatatgacactagagtccatgcttttgttagttccatcttccccgtgttataggtattaaataatgttaaggtattaattaagctatttaaggaaatgtaaaatatctcattaaagatcagtgagtcttcttaaagttaagacttacattctttaaagtatattccagttatgaaaatataaagaattagaaaataacctttgaaaaaagtgaactcttattttcttcttaatatatcaggacagttgaagacgacttactgctccaaaaaccatttcagaaagaaaaacatggaaaggtggcccataaacaagttgcagcagaattgctggataggtatggtatttcagtgtcaattctatttcttggtttaagttgcttcggattaggggatttgattatgttaatttgaatataaacattttgaattttcttaaaaaaatttgttttaacagggaagaagcaagaaatagaaggtttcatctcatagctatggatgctgtatcctttttttatttccagatttttataactagtagaatattttaaaatctgcttttttgttttataaaatcttgtgaagtcaaataggcttttttatttttaaagataagtatttagtgatgtaggattttgccatttatacttttgggtacaattctcttttactaatatataggaaagatttagagacaaaaataataaaacatattactagtactctataaataggtttataaagtacatgaatctgcaaatatattttccaaattgttttttcaagctttcaacatttccttttcctatacttatctttagtctcattttaatttattctcttcctacctggttctttgctatttaaggtctctataaaacttgtatttaaaattaggtctatccagtctgtccctggatctaaggaaaaaataaaaataaaatgaggcctgcctgtggactgtcctcaggcctgccatggctttaatttttaggcatgacttaaagctatctttaagataaaccctgcttcctggttatagccatttgtcaactcagtttcttaataagactggctgatgacactaactgctacgctggccatccatactgctgttgagaatattggagaatttaagagataccaagcaaaaactgaagtatttttgggtatttattgctgtgatcagaattgggagaaggagacagtgtcaatttgatacgccccctacctgtaatcatctgtttcactgtgctattccaatatttttcttttaagttatagaagtaccattgtgtcactaattgatttattcttcttatctcctaacccaatagctagcttttccatggatctcatctgccatttgttcctttagcatttaaacatttgctctgccttctctgacacctactgcattgggggcacctagttatagcctggtgagagtgaaagtatgggtactcttttttctggcataggaggagttggagccacagttttttttgtttgtttgttttttgttttgtgtgtgaggatttattttattttatttttctttattttattttattactttaaattctgggatacatgtgcagaacgtgcaggattgttacatagggtatacatgtrccatggtggtttgctgcacctatcaacccatcaccctcacccttccccgcccaccggctccagtgtgtgatgttcccctccctgtgtccatgtgttctcattgttcagctcccatttatgggtgacaacatgtggtgtttggttttctgttcctgtgttagtttgctgaggatggtggcttccagcttcatccatgtccctgcaaaggacatgatctcattcctttttgtggttgcatagtattccatggtgtatatgtaccacattttctttatctggtctatcattgatggacatttggattggttccatgtctttgctattgtgaatagtgctgcaataaacatacatgtgcatgtatctttataatagaatgatttatattccttttggtatatacccagtaatgggattgctggatcagatgttatttctggttctaggtccttgaggaattgccacattgtcttcaataatggttgaaccattttacattcccaccaacagtgtaaaagtgttcgtatttctccacagccttgctagcatctgttgtttcctgactttttaataattgcgattctgactgggagccacagttttctctgtgttgtttgacaagagtagagtagttattgtctcaaagttgtcttgctaggctgactcttggtcatttggttagagagaacagcttttgttgacgattttttagtccgtgcctgttggtgtttccrggttgtcaccttctttacctccaattctaggatacatgagacaaaaagaaaacctagggaactcgctatcatgtcataccataggtcttcaggaggtccctagcggggcgccttcttccttccaccttttagagtctttttatgtttgatatataatgtataaggattttagttgttattagtatgaggaatagggagaagtacatctttgcctactccatcttcccggaagcaaaagttacacccaccacctgttcttgtacataaaattatattggaatacagccatgcttcatttatatgttgtctttggctgctttcatgctaaaatggcagaactgagcatttgcaacagagaccatatggcttgcaaagcctgaaatatttaccatctggccgtttgcagaaaatgtttgctgaccccagctctaataggttacatgacttgccatggtcatgtgaccagttagtggtagatcaagagctagaatccagatctccaggtatttggtttttctgtctctctcttttttttttttcctgaaatattaactggtttgttacaatatggaaataccataatctgattaaattgtctrttagtacacattatgatcagttaaatcactatacatgtttaatagtcacagagaatattgtagaaggtgaggttagctattatgtgcatgtttggctctagagagagtgctgttgagctttttaaaacaaaaagtaaaatgctcatatattttgttacaatgctttgaaaaaacatggcattttattctttgaatttaaaagactataaaaattgattttttatatttgcttttttgaaagtttaatgttgggatttaattataaattataaatataattataaaagttgcatcttctatttagaggctttatcattactaaaatagataaattatattttatgataatgaaagataaattctctacttttagaaactataatttttaaatttttcatattgtgattattagaatgagtggtggtaggaggctatatgcagttcagcaatagaataagaagctctatttctccccagatggagrtatatttttatcacaagagtagtatatgcttgaaaaatagtcamaagaragcctgtactttacartcttcactttcaacaatttaatatatacccttctagattttctgaatgtgtaagcatgtatagtgtgtgaatatttttaaaaagctaaatagactcatattgtgctttttttaccaccaatcagcaatatattatgacaccaaacagctcctaagagaataaaatccttaattttttgcatttcagtatcaaagacatasaaagttcgtaaatgactatattttatactatggtggcaaaaaagaagacttcaagcgtttggggtaagtatcaggaagtttacatagaagggaatgtgggttatgggaaactttaaagacccacagctactgtgccttctgattctgtcattcttccctgctttctattccggtgtgccttttttttttttttttttttttaagatggagtctcactctgtcrcccaggctggagaacagtggcttgatctcggctcactgcaacctgtgccgctgtggttcaagcgattctcctacctcaggctcccgagtagctgggattacaggctcctgccaccatgcctggctaatttttgtatttttagtagagacggggtttcaccatcttggccaggctggtcttgaactcgtgaccttgtgatccacctgtcttggcctcccaaactgctgggattacaggcgtgagccactgcacctggccccagtttcttttttatattataaggtagagataccatccacagctcctgagtagctcttcatgaatcccatttttttggacaggcctcaggtagactctttacctgctgagccgggcacaaccctggtgataaaagaatatctgaagaatactcatgtgtcttcttggcaaagatctttgaaataaggaaatttttataccttgatgtttgggattgctttttaaaagataggtaaacaagaactctcagtctagcatttcttgcacatcaaagtccttcccatgtttaaggctcttctatcagaacttgttttttgttttgttttgtttttgtttttttaaatttttatttttatttcaatagtttttgaggtacaggtggtttttggttgcctggataagttctttagtggtgatttctgagattttagtgcacccatcacccaagcactgtatgctatacctaaaatgtagtcttttatccctcacctcccttctggccttcccccacattgagtccctaaagtccattatatcagtcttttgcctttgcatcctcatagcttagctcccacatataaatgagaacatatgatatttgattttccattcctgagttacttcacttagaataatggcctccagctccatccaagttgctgcaaaaagacatcatttcattcctttctatggctgagtagtattccatggtatatataaatggtgtgtgtatatatatatggtatatatatatatatatatatatatatatggtgtatatatatatggtatatatatatggtgtatatatatggtgtgtatatatatatggtgtgtatatatatggtgtgtatatatatatggtgtgtatatatatatggtgtatgtatgtgtgtatatatatatatatatggtgtgtatatatatatatgatatatatatatatatatatatatatatacacacacaccacattttctttatccactcattggttgatgggcactttggtcagttccatagctttgcaattgcgaattgtgctgctatagtgtgtgtgtgtcttagaacttcttagttttatgtgaggttttttttttccctctaacaattttctgagttggtaggactctgagaaaatttagtaccacctcatttacccccaatttatctcacctatcaatttatcctatatctcccaacaatcacttttttttttcctttttttttttacccccagactgttagcattttattttgaaaggtcaatccctttggctttcttcctcctttactcagtcttctacctaggaaactagtaaaatgagatacggaaaacttttcatattttttaaaattaaatctcagcagagtggttggttagaatgaaacttattttcattcactttattcatttagtgtttagtcaggtttctcattctagctttggtaacttagcaccatttgtataattgaaaccaatgctacagacagattccttatccatttaacttgcttctgtagtagtatttttataagtgccttttgaaaatactgaaatatttttataaatatgtgaacaaatttatactcaccaaaaaactatcttcatgtattatatttttaataaaattttccaaaactcacagagctatttaacctaaatttgactacttttgtttttgtattaaattgaaaaagttctgttttccagggaaaatgacaagacagacttggatgttatacgagaaaatcatagattcctatggaatgaggaggacgaaatggacatgacttggtaattagccatcagaggcgtaatgcatcaaatgctttagtcctgtttctcctgttttctgagtggttttttagtcaaggtgttcagccccttcatagaacagttctgaatcaaggacataaaatcaagcctaggattatttggttcttttggtaatttttggcagttttaactgacttctcattgtttgacttagtcttcaaaaaaataacattcttttttacagtattgtgtgttatcttgtaatatgttattatatgctgctgttttagaaaaaagtcatacctgaaaatgtttttttaaatccaaacattacaaagggtaaacagtgaagagtgattctccttcttatttgtgactgtcagttctccaatttccctccctgagtgaaccacttttaatagttaatatccagatattccatgcacatgtaagtaatagttctcttaaaacattaatatttatgtagtatgtattctktgacatcacttgaaagtagcaaaccatggttgagtttctaaatgtataatatttatattttcatgggtctagggagaagagacttgctaagaaatactatgataaattatttaaggaatactgcatagcagatctcagtaaatataaagaaaataaggtatgctttccacatatttatggaaagaggttcttattcaagtaaaatattaacttttattatactgtcatgccccacattattcttttaaagatgctaattctagactcagttgtcctgcgtttatgatgtgtcatttggaccatttaacctctgcagctgtggagtttacaaaaggcctatggaaatttatgaaggacaaggatgcttttttttgtttgtgagctgaggcatgaaaagtctaaaattaaacgcaagtgggtattggatcctgtttcatcctgactctagtctagagcctctagtgattgtaatgaatgacttaactctacagaataatgtcttatttcacagatgatgtttgaaactgatagattttaaaaattgattaccatttatagagatccagatgcacatcttctattacataaatgtctattctagtaaaattaacatttcaatcagtgctaattagtaatgacagatttcctttcccactttacatcttactttagttaatatttttatttttggttgggcgtgatggctcatgcctgtaatctcagcactttgggaggctgaggcaggaagattgcttgaggccaggagttcaagaccagcctgggcaatatagtgagactttgtctccacaaaaactaaaaaaaattagccrggtgcagtgrtgcatgcctatagttctagctacttgggaggctgaggttagaaggttgcttgagtccaggagtttgaggctgcagtgagctatgatcgtgccactgcatttcagtgtgggtgacagtgagactctaaaaaatagaaagttacttttatttctatctcaaacatcaaattatagctggaaaaggtgacccaggagcagatctcagttagaaatgtgagaggagggaatgttgcataaatatgtgttatagatactgtatatttgtattaagaaaaaaacctatttaaaaagctatcttgtatttatctatcatgaagatttatttgtcatttaaatcatttgatctcattagaaccagggttgatttaataattttttcagtagtgcctttaatatgtgtgttgcttcacagtttcttatagaaaatagtaataaygttcattttgtataccctatttataaacccgtgcacttaatttatccccagaactgctgtttcttatgaactagttatggactctggttcacagctgtcttctctgtaccacatctggttcaaaaagcaccacagtaattggagttacttaaagttactgtattgtaaatcaagtgtgaaaattatgtctttctaggagcatgtaacaaaggagatttttcagccctggcttattcatggattgttcttaagttgttgttttttttctttttttcatttatttttccccacctcctaataccatcataattcttcagtattttgttgttgttgtcagtatctattgaaactggactaggtactgtgggttaatacatggtgactacttttcagaaaaagctagtctagttgaggggagaaaatatacataaataaaaattaaatatttgagttctcaatttttcaaaaatggataccactagaaatcgtactttaaagaaaataatcttgaaaaaatgtgtattttcctgctagaacatgatgagtgattgtacatgagagtaaatgcagcaagaaatccgatatgactcgcagattctgaccatggatgctgagaaaaatacagaatttggaggaggattttttttgtggggggaagataatgagtttggttttggcataccatgtttgaggtgttggagaaagagtaatgcctttggttccctcactaggatgcattttctcttctctttatttatacaaagacaatgtattattcagttaattaaaaccagctcctaatatatatagtagatacttttagagcatttttagtgaatttccacctttgcctcttactcctattcctttctttattgcatttcccctttttagttggatcaatgtatcagttaggattaggtccagctgcaaggacagagaagactccccgaaaaaaaccactggcttaaatgagctggaaagtttatttttcttatacataaaagttcaagtcgatggtcataaagtcagaatccttcttgtttactgcttgcgtacgtgacctcattgtgatgagtgcagagtgagaagaaaaggaggctcagcaccaaatcctgaataacttcagctttaatccaaactaggacatttatgtcaggaaataatatacagtctttaactagtaggatataatgtaatttgttttgttacatttattatttcctcataagattataatcttggtgacacactattttaataatcactttttatcctcagtggaatgccaagcccaataggtagttgcttaataagttgtctgttgaatagattaatgaatgaagaagaaagtttggaaactattgctgttacacttggctgtgcttcagtagacatcctaacatatgttggatggcaagcaatctccacatacatatataggctgaaaaatagaattaaacagagttatcctgaaattttattttttcccctagatttggaggattttatttttgttgggttttaatcagagtattttgaaatattttgagcctttatttgcatttaaaatacaaaattgccaaattcaagtaatagattaatgattttttaaaaaaaataattgaaattgccaggcacggtggctcttgcctgtaatcccagtactttgggaggctgaggtgggaggatagcttgaggccaggagttcaaaaccagcctaggcaatatagtgagaccttgtctctataaaaaataaaattagccaggcagggtagcacatgcctgaagtcctagctattcggaaggctgaaaaaaaaaaaaaaaaccccacaacaaactgaagttagcaaggcattgaacactttatatgaatcctctgtcttactataacaatccggtgaacttaaggttgttactatttccatttttatacatgaagaggaagtagagaagttaagtaactttcccaaggttaagacctaatgagtgacaagagcttcttgagttgggtacaggtatgcatgtttctagactggagtggttttttatttgttgttattttttgttgttgtagtttttgtttgtttgttttgagacaggctcttgttcagttgcccagggtggatggaatgcagtggcatgatcatggctcactgcagcctccacctcccaggttcaagtaatcttcccaagtgtattttttgtttgcttttaatttttagagcatttttaggtttacaacaaaattgagcagaaagcacagaattcccatataccccctgctctcatacatgcataacatcccctactgtcagcatcccacaccagaggggtacatttgttacaatcagtgaacctacgttgatacatcattatttgaagtccatagcttacattagggttcactcttggtattgtacattcaactgctttgacaaatgtgtaatgacgtgtgtctaccattatagtaccatagagaatacttgcactgccctaaaaatcctctgtgctccacctgttcatcccaccctccttcctaatccctggcaactactgatcttgctacttcctccatagttttgccttttctggaatatcatacagttgaaatcatatatatgtagtcttttcagattgggttttttcactttgtaatatgtacttaagtttctccatgtcttcatggtttgatatttcttcttaccactgaataatattaattgtctggatgtaccacagttgtttatccattcacttaatgaagaacatcttggttgcttccaagtttcagcaattagaaataaagttgctgtaaacatctatatttaggttttcatgtggacattagttttcagcttatttgagtaaataccaagaagcatgattgttggagtatactagttactattctaagtgtttcatatgtattatctcatttaaacctctttaaacctcagtaccaaggaagtaggtactcatatttctactttacatatatgaggaagctgaggcaaaaaagagattaatttgcccagtactatacaactgttaagtggtagagctaaaatgcaaatgtaaataatctgactccaaaggctgtacttttttgtactagaatatactacctctttactataccataacctctttttttcttgtcactcttacagaacaggatatattatttgttaacttaggtatcttgtggcctggcacctataacttttaagctatcttaaagtagattgttcttaacagataaattggtgattgttcaatgtattttcttcaaatcctataagaagagaaaaatctgtcatgatgggaattacatttattttttaggttggtgaatgtcattgttggctccatgtttagatttctgtataatttaaatttacattggcataaatgtaatttttttattatcagtttggatttaggtggcgagtagaaaaagaagtaatttcaggaaaaggtaattctttaaaatttttactttttaataggataaacttattttgttaagttactgaattggagtcattaagatcattcctaacatatacaagaaattattagctacaaaagtaaaattagagaaggtgtattcatgatacattrttagcaaaggtctgaatataatgctttaatgattattacctttatacttttgcctttagaacattcagttgaatgttctgcatatttctaagtatgtagaaaatattttacaaattaaagatttcatagcaagacaactttcaacaaaaaagaaaggtttatttttttcctttctttattaatttttggaataatgaattggtrttactgtttttcagccaaatccacatttcaaaagtagaagttaaatatcactttaatcccaatagaattttggggcaggctagtactcatttttggaagtcccttatattgagcccaaatacttagtctaatagcaaaagaccagacatttggtaggcaatcagtaaatgctttttctatgcattattgtaaatctattcattaaatttttcctggaaattgtgtatctccatactgtctcttgctataaaattagctccttactgagtaattgcattttaagtgttaaagtactgaaaactatatagtagcactaaggaaataattttaaacttactttaaaaaaccttttaaatggaaagattacatttttaaatgattaaatatttatgctatcattgtggctcatatatatcttccataagttggctatgttaggtgtgaaattgcatatgccataaaacaacattaaggaaaaagaataaatttaaagctattttaacttttcttagggttatattttagtttatgtttttatctaaaataatgagaaatcctgaaatgtctatcacaattttaagatgtacttttattgaatgagattttcaggtgagtttataatgctaccttttaaaaaaattgatgggtagtctctaaattcatataactgaataaaagactagttaggaaagggaaagaaagctgctaatgtgatttatgtgatttcttttataaagttataattttgttgctgttttaacaacaaagccttacctactaaacatatagatttaataaaatattcatttggaatgagtttaaaaggctgatttagaaataagtctttttaggatataattttctaaattcattttgataatttcttaatttttatgaaaaagatttgctggttacagatttgcttctgttagtgcaaattattgtgatataaattaataagagtttgatcttgtctttttgccaaagtaaattactgttgagttgtttctctttttttctctcaggttatcagttagtctttttttggaggttttaatatattgtggacatggtaatgtgtgtgatgttaataatagtgtcaagttattctaaaatttagagtatcaggtttgactgcgtattgtacttcacctcaaagtgctagaatttttaaaggtgttttcaaggccatctatgctagtatttaaaataaatgtcattatgctaatacttaaaactattaactattattaccattaaatattgaaaggtttcacccagctataagtgtgtgtactttggaaagtgcgtttttttttkgggggggtatttgtgagtatgttgttttttttgtttttgtttttttatttgtttttccttaaaccaactttctgagaaatatgtccattctttaatactgtctttccaaagtgtaagattccctaatagggagtcgctaaaatgtctatctaaatacagtctatcaagcaagaattctgtgactgattttttttggtaacagtactttgatttgatacttgtatacaagttggttgaacatattactctggtcagtttttaaaggctgactatggttaatttgcatattttagaagtacattttaggggtaatactagatcrtatagataaatattatcaccaactaccatagctaatattcctttcctttctgcaggtcaatttttctgtggaaataaatattgtgataaaaaagaaggcttaaagagttgggaagttaattttggttatattgagcatggtgagaagagaaatgcacttgttaaattaagtaagttgattttagggggtatatgattgattcttccaagtttgtctttaatttaaaaatatatagactttmaaattcaaatgcaatttttaacatatctttctggaagtgctcttttttcttggagcttcccaaagtctcaaagaacttttcagcctcagttttttacatttttagyattacagtggtgtttcagtaaaaagaattctaatgtcaaatgtaaactggtaatttgtagagtggggctccgtccccattaacttgagaatgccaccacattacatagctaagaggcacagtatcagaaaaggcagtgtaatctcacattagctgattactcagtgatatcgttgtagcacagataataaacaaattcactctgtttcacagtattaataaagaaaaactttaggaaggcataattgttcttgacctcagtcttaaaaccatagggaataaatactccagaatacagcagtttcccttaggatgcatgttttagagtctgtcattcttttatttattttttaagttagtcttcatgtgtcagctgttcctctagccttctctgggtcctaagtaaatgtgccttcagagttttctgctcatacctaataaaagtcaagaatgtccccacatgctacgtatgcatgtcaatacagactgatttctgagttccttctggaagtgctcaagaggaaaagtcagccagtgtgaactgagattaaggcaaaaaaaaaaaaaaaagagaccacaattatggaactatttgaaaagctcctttgcatttgaaagttcttagagcacttcagaggaaatgactatactcacattattattagatatctttgatgtgagacacatgttaatgtgcctgtggaacacagtttgtttttggaacaaattgacaacmcatttttctaaaatagtgttattttcarttcctcaagctaatatttttattatatgtatgtgtgtatatatttgcatttttgaggtgatgaaggtcagattgttttctttggattgtttgtttaccctcttatagtaatggaatataaagaaagtgcgaatttatgatattaaaagtagattagcagtgtggttattcaaaatcagccattcagtggtgtcttttctttttagggttatgccaagaatgttccattaaattaaatttccatcacaggtamtgtcttttaaaatgccattcttaatgtttagtaatccaggatatagtcatttacctgcactaagtatctaaatgtagacttaggtggttgatggttgaattggttgatcatgtagaaaatstggcattgtcgtatggctacataaacgaggggtttagaagtccgctatgccctattcttgccaagcagttttaaatgtaaaggcctatgtgaggtggtagatggatgttagaatttttagtttggagccaatgttctgacactttaatattagaaattatgttgtaaagcagacttcataaagcagttcttgtgtctcatttagacagtgttttagctggagtttgccattcttacaaaggattagacacctctatactcattttaaatgttaaaatcaagaacaggcgcggtggctcatgcctgtaatcctagcacttggggaggccagtttgggtggatcacttgaggtcagaagttcgagaccagcctggccaacatggtaaaaccctgtctctactgaaaatacagaaattaactgggcgtggtggcaggtgcctgtaatcccagctactggggaggctgaggcaggagaattgcttgaacctgggaggcagaggttgcagtgagccaagattgagccactgcattccagcctagcaacagagcaaaactctgtctcaaaaaaaaaaaaagttaaaatcaggcttttattgaatgagctttaatgtatctgccacattgaatgtgtgggaataccagtgtcctgcagttatggggtttgaaatcagacctcagtttttaatctcagcttctccgcttactaggcttcttcttgggcaaactgcttaacctctgtaaggcttaattttatcacctgtaaaaatgaggctactcaggctattgtggggaataaatgaaagtgcatgtaargtgcttgccacagtacctggcattaaagatgttcacactgattcttcgcaacttgcctttgtgatggtcaggttttatgcgctggataacagttaaaagttcagcttttgcaactttataaaatgtatacataagcatattaattttaaaatagctttcttttttttcaatcacatgggttgtcaaaaaataacagctttgttataaatgtgcctatatagtattttagctgttaaaaataaatgttaaataatatttttaattcttaaaattagcaggattatttttattattttcattattctttatttttttgagacaaggtctcactctgttgcctaggctgaagcacagtggtgtgatcatggctcattgcagcctcagcctcctgggctcaagtgatcctcacacctcagcctccagaatagctgagactacaggagtacatcaccaaacctggataatttttttttaaagtttttgtagagatggtgtttccctatgttgcccaggctggtctcaaactcctggactcaagcagtcctcctgcctcagccgcccaaggtgctgggatgataggcataagcctccacacttggccagaacttttttggattactggaatagcctaaacctttatttccccttcccatcagtgatactgaaagaaagcagggatttgttttgaccttgacttttgagcttcatttcaaaatggaaatgattcttacaaaatatgcaaaagtggttaatgcattaaatactattatagcatttagtagatgtactttaacttggaaaatctactgaacaagttttttgaaagtaatcttttcctttgtctctattctccttgccagtcccaatttcagcattatcactttttcccatttagtatttcttttcttaacctattaaaattaattaattgtttgccaaccttgtaaacctgctctagaagagataaagctgcaacaataagagtataaattataagtggcctgatgttgatatatgaattaacaataagccctttccattttcattccattatgcttctactatattcctttattcttaagagtagaaatttctatttactggtggcttagagctgttcagcagtttcttcttmtttgtgtttttttaacatgtaggtggatatggattatgtgaagggaaatgaggcttttttttgtaatttagttttaaatggctaagtgatagaatatagaaagaaagaaacaaatacaattataatttgtatttactatggtcgtatacagaacttatagaaagtaattatttgtgtcagtgttaagacttcattatcttayagaatgattttaattaatatacaagcataaaatatttacagtctcacttaacgttccttattatataaatcacatttaaaaaataagtattttaactgattttggttttttgttcatatgatggttatttttgaaaaggtcagttggaaaagttaactttaattttatattgtttaacacaaaggagaaaagaaatcaagtcaaaaaaaagaaaagataaaaccaaaaaagactgtgaagagtcatcacataaaaaatccagattatyttctgcagaagaggcctccaagaaaaaagataaaggtaaaaggaaattaagataaggcatctactcacatttgtgagcatgaaatataatctgccatatttcattcatctaattggtgaatgcattgagaatttcattttatggtagttgagaggaaactggctgagaatttagatatgaacttaaagtgacttacaggagttttaagaactcctctaaattaattaagggttaattttagttcatttttggcagatagtataatattgccaacagttttctaattcctggctttgtcacctacagacttgttactttgcatcagtcactgaactgctttatttttcttatgtgtataggggtgaggtgcatacctggccttcatactggtcaagcttattgtggaaactcaaataagaatgtgaaagggactttgatcagtgcctttaaacagtctataatctataaatcaatataaaattgtaacactgattttatttataatggcctgtgtgactttttttactagtttatgagtttctagaaatgagaaagattgtcatatatctgtgttctcagagcctagcatggtgctgtgcacctatacttagaactgcctgctttttctttagcagtccttaagctcgctaagactcaatttcttcatgtgtaaaatggtcttgattccttttagaattgttcagaagttgaaacgagataattcattaagcagtttgcatagtacttggcacatattagctattatgaaggttacttctagttgctttttttagcccataataaagtagagtcaatcggctgtaatttatagtgaatcagactaatctagataggtaattgaattagattcaagccaatgttaatataatatttggacaggagagggctctcttgctccagctatgaagatcattagctatgttgcatgcttagaagcatttacttcttcttgcacatggtaatatattcattatgtagcagagtttaaatctgtgtgcccttgtgatactgtctactcccatagcttcaagtatatggtgtcaccaacctttagacttcgtaaaattgatagatggtgagaggaagatattgttattttattgcttattgagagatggcatttgtagcagaatgccttttttgtctctatcttaattattttccactctaaggtaaattttaaccaataaatgttaaaaatatgttttgagttttaaaaacttatttatccttatatgctagtaaaacatttaatatgtcacttaagaaatttgttgccctcattgtattatatgttcattcttatcacaactgtgataccatgttaatcactgygtattccaaatgaaagaactagtctctactttataaaatgttactcagtacaatcaaagtagatcaggtagatgaatgctcaggttcagggctraggttggacccttcgtattatgcgtacatatgcacatgatcttccttatagacatttttcccttagtgttctgtcagtagatgacacctatgttgacctaaaaactaatatcagaaatctgsggattatccttgatactttctttccccttattatttatgtttaatttgtcaccaagtcctgtgaattttacccccagagtatatatttctcaagttctctccaccctactacaaaccactatattttctcttataggctactgttatattctccttacgggttccgcctctgtcttgccatcccaccttccctcctcttaatccattctccataaatcagtgatttcctgttgtttttaggctgataagcaaaatcctggacaaagctaaaaggttctctgtgatccagaacttgtgtactatacaaggcttgtttcttaccactccgtacctcacgttcacactccccccatgtagcctttcagtttctggaaaatgtcaagcctctttcaattttaggggttacatggatgctgtgtcttctcttcctaaaactctcagttctatcccagctcatccttcaggtctaagctcttaaatgtcatttccaaggatcctttcctgatttcatcccccaccttgaatctaaattaggactctcatttgtaatgctgtcatggctcctgacactttctattattacacatatgacgatgtaaaagccaaagaggcagagattctgcctgctttgttcattgctatatccccagcaccccactagctcatgttcagcataaataataatcagtaaaggactttgaagattcttcagggatagaagaccaaagcaaggtggaattgagacatctctttcttatgtattctctatttagaatgcctttgaaagcaaagtctctagaaatatagcttttttacccccaacttctatggtatataacagaaaataacaaaattttagcaaacttttaggaaaaccatgtggaactctttaatatcttatctgggatcatctagaattagctttatcattgatttgattctttcttgccagaccaccttaatttggaccagacttgaagagtaattaataaacgcttaacatctcagctgcgtttggactgttgacaacttcctttaattttatttctatctttctggcctctctttagctaatgctttttttttttttgtaagacagggtcttgttctgtcacccaggccccaggctggagtgctggaatacagtggcatgatcttggctcactgcagcaggcttaacctcrgaggcccatgtgatcctcctttctcagcctcccaggtaactgggactacaggcctgcactaccatactcagctaattttgttgttgttgttgttgcagagacagggtcttgctgtttcccagactggtctcaaactcctggcctcaagcaattctctcaccttggccccccaaagtgctgggattaccagcatgagtcatcacacccgacctccttagctgcttttaactgaagttccttctcagtcttacatttagctgttagagttcctcggggctcttacctagatttctctagtttctctctgtactcccagtgtaatcccatcaactctcatagctttaggttaccgtcttagaaaatgttaaataagtaatagatggatgaactagatagctgaatgaatggatagagagaaaaaataagaaagatcagtagctgactttaaggaccagtctgctttggcaggtatgaggagaacaagatatttaggtagactgtcttggcaaaatgttcagaatcttatctgtctcaccatcacccctttcccaaaagctacgtcatccttcaggtttctgcttagctcaattccttggaaaggcccttcctgacacccttctcctcacttctccaaataagattatgttcctcttacatattccaataatacctgtcacttctcctttagaaatacatagtatccttggaataaattgtttattttctgtaagggaagggactgtgtgacatgtttacttcgttatctctaattcctaatagtgcttgctcccataggaggcattcaataagtgtaggtgagtgaatcagtgaattcaaccacattttctgaaagttgaaaggaacttcagagatcagtcctggaatcatgactgaaaggatattctttaattttgcttttcaaagtaaagtcctctgggcagcatttaggaacttgttagcaactcacaatctcagacccttccagatctactaacaagttcccagggcgaatcatatgcactaaagtttgagagaggcactgytgtatattatgtgattgttctgcattggttcaacatttccagggaaaaggaacccactactatcaaaaataaagctttacattttcaggtagttgtatttgctagcacgtttctcttaacattcagccaaaatctacagcttcctccctttggttctaattatgttcttgggcctccaaattaagcctaacgtcttttttacctatggacctttggatattgggaagcaggtatcatgttcctcattagaggatgacaggaaagaatacatttcctgtttccttaccctgtagttcttatactcttcatctggtctaaaggggccaaaaactttgggttacraggcctcctatccaggaacattggaggaattgttactgtccatstgtcacctgcccttttttactttatcatccttcagaaatattttccctgaggtcttattgcaggaagctctgtatcgtggtgattttttttttaaattacactgaccgatcttcagtgcctttctctctctctttctctcactggatgaccattgtagagctgagaatttttgttttatgacataattgtgttgtgttcttatcagtttctgagaactaatacttacctgcatatatgactttagaaaagatactgtaaaaagcaagtatttatttgtaaactgctttcaaatgttgaacatctctatagataataaattattgcttatattgcagctaattatctgtgaggttttctttttagcaatatgagattttttttgcaggtattcattattttttgttttgtgctggctattacagaccatatgagcacataagatatgatctctgcctaaaagaacgtaacattttaatgagggasataagrctaaggaacatgaaagattagaaaacagtgaagtgcttatctgtaagactataagcaaactagaatattgctaagaattctggttatagctacaatgattgcactattacaagatgatagttaataaatcaatgatgtttccttttcaggacattcatcttcaaagaaatctgaagattctctacttagtaagtaacaagtgtttatttaataaaaatatgcatttgaggtatttgcaatttagatttcccatgaatcgtatcttgctgtgatgtgaattattttttgtttttgttaattatttttgtacatgagaaaaactgtagaaaaaaggccaaaagtgtataggatttattccccaattaagggcattaagaagtttcttattttaagtatagagagcattaaaaatttttccagtaaatacaatggatatatctttcaatttcatgttataaaatgtgaaggaagaaagataaagggatgaggttgaaatggatttaaattaggcctatggttttcactagtttggatcaaaacagattggatttcgttgagtatttgctgcaaattttattattttttccctgcaatattccaaaaagtattcacaatgacttataaaaacatacacaataagtttttttaaggttaaaaaagtcagaataatggaaaaataaggtagaatagcaatgtaaarctacaggtgaaatttatacacacaaatgtattccaaaaagtcctgcataattgcagagatagatcacagatttgtcagtgttcttcctaacaaccaaacctaagagtgaaaccagcaatagaaagattaattgtacccataagataataatgagaactcctggagtgttcagctttttgctggcagttttgagagaagagtcttctatgggtttataaaagggtacatccatttgtgtcataacaaacagtagctttgaatctaaacagtaatataatgttgaattttttaaagacttgtagtaggctcaaggcctaataataaggtgtagttcaatagcatatctaattcattttatactctctggacttatctcatagaaatttagaaacttgagatttctaggcttacttagttattttattttatttttttggagatggagtcatgctctttcacccaggttggagtgcagtggcgcgatctcagctgactgcagcccctgcttcccaggttcaagtgattctcctgcctcagcctcccaagtcgccgggactgcagacacccatcactatgcccagctaatttttgtgtatttagtagagatggggtttcaccatgttggccaggctggtcttgaactcctgaccttgtgatctgcctgcctcggcctcccaaagtgctgggattacaggcrtgagccaccacgcctggtcacttggttatttataaacctaagaattaagaaaaaattttttatgactttaaaataatatttattgtggcaaactcagggaaaaaagtttgatgattattctaaatttcaaaactcaaatataaacattatttgcatttagtataattcttaacaagaaattttaaatattcaatgatcagaaattttgcactgagaaaaatagaaatgttaagatatttgttgtttaaaaatttagcagagagggagatgttgatggaggtattcctctcttaggaatatagtatattccttataattattttgcttgtacgaactttgttttcaacatatttgaagtgtcttaaagcactgactctttctctccacgtaaattctaatttatcaggaggtcctttcctaaattaggtaaaatgtagtgacagtttcgaaaatacattcaagtataagaccagtggaccaatgttatctcaggatgaaatcatagatacatacttcaacaaaggtgtacacaggctaaagtgggagagygtattttagttttcatccatttccaacagtgagaggtgtgaatgcttatgcaatatagaaaaaattcccctttttcagttctaattttttatccttaaaaagtcttttggggcaaattcttgaatcactgatttatattattcttttatttcttctgcctgccttctccttcccactgtctttcaccccctgccctttgaatccttccctgcttcctagaaatagcccttaatgctcttttacctctcctcagctaagtcaaatttttactagtagaagcagggtgaatactgtgaagactatatccaatctgagaaacccctagctaatttgatcttgaaaaaacaaactatccacttcaagctgacctgctgtttggcagccggtacgctatttaccatagcaagcatgaaacatatacattgttatggtatgccaaccccagatatcctctcaggtggtcagtcatctgtattacatggtcttggcaatttcagacctcacattttgctctttatttccatttggacaatactcagttaccttcttaacccatttgacacctggattattaaaaccaaatccatggagaaaaactcaatttctgttgggacagtaacaagtgctttagatatgttacctcatttaatcttaataatgtgcatataatatcctcgttttgtagatgagaaaaatcaagacctagagaatgtctttaaatgaatgaagaaactcaatttttaaaaatatatatatttaaagtatacaacttgatgatttgctgccctcttaacaaatttcaagtattgttatctttagtcaccttgcacatgagatcgcccaagaaccaaagaattgaagtaaagtgcccaaggtcaaatagttaatggcaaagctgggattaaacataagtttataattccaaagtctatgccctttacctgtatcatcaatcaataactgttcatcagtgaaatcaactgtatgtctattctttatacctcagttttggcatatgcattgtacagatccacattaaatgatttgatctatgtttcacttctgtctataaaatgggtataaagagacctacttcgttggattattatcagaatcaaatgagaaaacatacatgtaaagtatgtgcctgacgcaaagtaagtccttgataacctgtagctatcattgttatcagagaaaagaaaaatacagacatataaatcctgtgtttgttctctagaattgatgaaatcaaaagttaagtctataaaaatctgacctgtccatttgttaccatgattattggagacatttgccatttcttcagtggtgcaagttattagttaccatataatatccacaaaaaccaagatgatagacctactttcattattcaaaacatgtaggaaaaattgtatataattttaggcaccacactctaaagggaacattgaaaacttgaagcaggtcaagaagaaaaaaactgaggtatggagaaaacttgaaattatattgtaggaagaatgtyggaggaactgcagatgtttacctgggagaagagtgaaaggatgggagggaagaggtgaggaagtagacatggaaattactgtatggatatttgcaaggctgctactatgtaggagacttattttttatgactctgggttggcagaactgcccaaaracagatttttgccttaatttaaggaaaaacttgtcccttagaactgtctgacaaaaggaatggagaaatgggctgcctctggagtagcgagtgttccagcatggaytggattggcacttattggaggtgttgcagtgaaagttcattcattggataagtgttggattaaatgacctccaggttcccctttcaactcagaaagtcagtgacttaaattctgatccctacttaccaataatcactgaatagatttgacagtgatgcattcttttgtgttgcctgttcttccaattgttatttccttagtaacactcctcccgcccctggcaggttgtaacagttatgatagcaatgatttgtagtgactrccaaccctcagggaaccaggatactatagattcatagggttataagggaccttaaaggtcatttagtccagtcttgtagacttgattctctagggatatctggccacttttttagtggggattttttaagacagttagtttataatgttactctaaactgacttgattttttagtaaaattgactggtatcagaaaactggtgtaagaaagctggcatgtgggaagtactcttggaagggaacaagataacagctgtccacttctaaaggccttgtaggtttcgttctctggcatcattaacattagcagagtaatacaatagtaataaccttgctaggcctaattaatttttctctgctttctttatctcatattaatgagttttcataaaaataagagaagattttaattctttttttccctcacattatcaatttgggacactggccattccagtgatggctgtcattgagtcaggaatcttgttttcaagattaaaattttatcatttgtatgtagatcattagaatacaaaatgccctcccccacttttgccatttttgctagaattggtgtcagaatagattcagttaggagcaaagttcagacacacatgttgattcagggatcagagtccaacaggtaaaaggctagaactaccgtaacaaatcaatgctgttttatttttatgttgtgtttaactaaaggacattctgtattgacaggccacatttgtgccatttcttttttagactaataatcattattggagaggagttgtctgctaatgtaactactttgtgagttatagtgttattgtctgataattttgcagtatttttaaatttttagttgactaatacaggtgatttatttgaaacatatctattttgtcatctttaataaaatgtctttattgtttttactgattttgaaggtaattcatgctcattgtttaaaatacaaacaatttgaaaatgtttaaaatagaaagtaaaagtattccaggcccacaggtaatataatcagttaaatttggttggcttttgcaaacttacaatacrtacataaaattacatgtatgtatatratgtgcatatgtttttaacatatctattatactatgcatactttttgtaactttttaaaaatttgatatagaatggacatttttctattgcagtacatacagatatgctaatgtttttaaacagctgtatagtatttatttaaccagtccttaatccctaattggtggggaattaggttttttgttgttgttgttacacagtgtgcatctttgtacatatgtatcagaggtgcttatttatgtatgtaagtaatcaaattcctaaaagcagcattgctggtcaaagggtatgcgttttaaactgatctatattgccagatttttctccagaaaaaggtttacagaattttcactcccagcaatgtgtgagaatgccagtttcttccctgaaacaggcttcttctcattatgtaatcagcattggttttttaaaatgtctgacaattttttttaaaataatttaactagctggtcttacatactagctcagttcttaaggtactaatcctaatgtaaacatgttctctacaaatgtaaatcttaacttgcgtgtcttctgtgtaaccaagaaaaagaagaaactagatcagagacaactatattgcaagagataattgacttacaagagttratattggaattgctactttaactcagtgtaacttagagaagtttcgatgagacttaaaatccttggcctttttgctgagattctttggtaacccttggcttatttatatatgttttaaaagaatttattgtacctgtgagagtgaattaaatttctagagagtcataaaagttgaagctgagttaaataaaaagttaattgtattggcgaataattcaaaatgtgctttaagtataataggtttttaaaaatcatcttttttaaatgaacaggaaactctgatgaggaagaamgtgcttcagaatctgaactttggaagggtccactaccagagacagatgaaaaatcacagtaagtgctgatattaatagagaatatgtaccttttcaatcagtttaggaagctataaccacagctttattaatggaaaaatacaacatcatggtgatctatttaatgccaaggactgcctagcctggtaagattagagcttattcccagccattgtcataagcagccaacacatccagcttcctcctggtaaataaatctttcatcagttcactttaacagatgaacctctggtccttgcttggatttcttcagagatggctgtttcctaagcttccagagaagcctattccatcatactgtgattatcataaacctatgcaagggaatcccttgcatgggaagtacacttctatactgctatcccactggtcttttaaaaagtaaaataataatatttactgttacaaatacataatatatttactatgctcagtgtagtaaaaaaactacagcctaaggagatttacccaattccccttagttattccccaatataacttaggcttacatttttccttaaaaatagtttcttttttattcacttcttgagcagactataatttaaaatgagaatgaacagagaagttataaagtaagcccacaaagtaaagagaagcaatgacatttcacaagtatttcaaagcaaaattttaggtaatacatttagggagaggtgccaccatatgaaatatttttattttaatcaatctgggtatagttatgattattctagaaactaagaattatttgatggctgaatcatggcratatattgatatatagcagaatcagccaatatgttgacttaaagtattttatttttattaatctcatataatgtatcatgtagtaatttttttactctattgatcttaagtatgcttttttttttaaatagggaagaagaatttgatgagtattttcaggatttgtttctatgagacgagagagagaagcctccgctccttaatgtgaaacttcatgaagttttaaacttcatgcaatttgaaattccatataagtttttatctgcaagttacagcttgtgtggtttgtctttggaaataaaaatccaggttctctcagaatgtcagaggctttggaagttcattagttcaattaaagactttcctgtcctttaaatatcttttcaattgcttatctacaattctgttttatttgtagctcctagaggatagagctggacagattccattgttcctacattttgtaggttttttttcactgccttcattatgtatcttctcttgccttcattattttattttattatttcttctttttctcttttttagagccaccaatactggatttgtttgtttttcatttttttcttttgtrgaaacggagtcctcctgtgttgcccaggctggtattcaaactcctggccttatgcattcctcccaccctggcctcccagagtgctgggattacaggtgtgagccaccatgctctgccaattattttaaattactaggattaaagtatattatgtatgtctttaacttctttctttcccattgataaactggcacccttcttttaagtacctgctctcccattaccacctatttccagctgctttttgaggttttttgcttgcctgtctcttgcttccttcttaacctctaccacttaagagagtttgttataatcaaatttgacttcctagcctgtggataatttactattaagtaaattattaccacagggagccagtgaggtcccagtagtctaaaacagttcatgtgttcacaaaaattgcctccccggcagagattatgcagtaagataatttaactgaataatactatgtgcatgtatcttgcctcagatatactcatgcaaatatgaatatacctctgatatggtttggctctgtgtccccacccaaatctcatcttgaatgtgtactcccataattcccacattttataggagggatccagtgagagataatttgaatcaagggggcggtttcccccatattgttcttgtggtagtgaataagtctcacaagatctgatggttttatcaggggcttctgcttttgcatccttctcattttcttttgctgctgccatgtaagaagtgccttttgcctcccaccatgactctgaggctttcccagccatgtggaactgtaagtccaattaaacctctttttcttccccagtctctggtatgtctttatcagcagtgtgaaaatggactaatagaacttctatgcagaaatataaaatgtaacttcttaacataaggtcctagtcgcaagggtctatggaggtgcttcaggagatccaagcctttttagaatctgtgcaaacttctgtgtatgttttttggaggaaaagtccataaatttcaaattttcaaaaatcagattttcaaaaggatttattgatttctgaaaactagcaaagatctgcttttataaagagcaaatagatggatagatataggagaagatgcttgacttgatgaataagagaaaggacatatagaaaatgaactgaacataagcaagtattttattgaagatatactattttaaataacatttaaacacggaatgattggcaataaactgcaaaatgagtaatttggtatcattttaaaatggttattatcagagattttccttttattaaacagttattcattaattccacaaatatttatcaggcttctattatatgtgaggcactgagctgggcatggctgtaaaggaaccatctaggaagtaattatgcaatcatttctgaacctgtttcagaaaagtaaatcagtgttgggtttatcagtgtttaacattgtttgatagtcccctcacttcttgaataaattgttttttttcacctcactacttgtagtgtgtaaaaatgaatctgtatttccggtgaaaaagtgtttgaaatgtccagccgcaagactgatattagtagtagaatatatgcagttaaacattcttatggtaaaaatatgtccattgtttagtggttgtcagaaagtaaaattcctgcaaaattaaaattaggaatttaactaggaagaatatctaaagaccctttaaaaatagatcagtgtatttggtatttcaagtagatttatgacatcaggctcatttataaatttatataaaatcacaatacttaatccatgcatacacagtgacagataatgggagttatgtttttaaggagtcttgaaaaggcctctaacatgatgagtttaaaaagtaattctcctacacacctatctcaaactttgctatagtgcggtcagtggtggtcagcagaccactggtctgggggtgttgaagttaggccttcttatacttgctcttatgcagagttcatgtatttggcagaccttcagtggtggacatctctaccctcaatacaatttctggtgactaaggaggggaagttgtttgagctgactgatgttttggggtctaaaattacatagggctaaaggaataacgtttcttacgtggtttttaaaataatagtgcttctggaagtggaatttcaaaattattttaagcaatggaaataagggagcatgcatcacttagctaagttgattactttaataaacaatactcatttgagtgtacatatgacttactgtcataccttatttatatctgtttgttgtaacatttattcacatagtattcattcatattactgagtgcctaccttgtgccaggcactgctctaggtgccgagatagagctgtgaacaaaacagacaaaatagacaaaatctttcctcataaattttacattctaatgtgagagaagcagtctgacaattctaagtacctaacttataaaaataaatggcgattcatttcttggctgctcaaaattgaacattatcttgtctattacaaaatatataggttcattgatgttcaattctttagactgtagatagcttgtgacaaaaaaattctatgataaaatatatggcataactatattattctattttctaattttatctatgattatagataagtaaaagaagaaatcttaaatttctcgaatatccagacagacatataccatgcagtcgaagtagttgattgcccttagtttgtcttaacaatttaatatttagaatgcctggtaggtctattaatcatttttagaaagtcatcttggttgaagtttttctgtactatttttgataaggttcttgcataatccaatcacatgcttcttaacgcataatattcattagctgctttaacttgcattatgattatccagttagaatcttgtgcattgataatctttttaatgaaaagaatagttctgaactgtaaaaaatattcttagttacacccaaaataattgatttcaaactttgaaggaggagtgtaggtcaaaggcatagttttaataaatattgccaaaaaatagtttggtcttcatcattctattatcaagggtaaaagtagagaaaagagataagcatttcagatggaatgacgttgaataaaatgacatcattattttctatatcatatttacaacactatacattctatactgcgtttactcttttattaagatgttgagagattttagttcggggagtggcttgaggtatgaatcacagttacgaatgttatgggtgaattgtgtctcccccacccctcacccatttcatatatttaagccccaatccccagtacctcagaatgtgactgtatttggagataaggccattaacgaggtaattaagactaaaatgaggtcacatgggtaggccctaatccagtcctactggagtccttataagaaaaggagattaggacacagacacacagagggaagaccatgtgaagacacagggagaagatggccatctgcaaaccaagttgagaggcctcccaagaaaccaaccctgccaactccttgatcttgaacttccagcccccaggactttgagaaaatacatttctattggttaagcacccagtctgtggtactttgttatagcagccttagcaaataaatacaattaatgttttaaaaaagaatttgtgactagtttcaggattgcatattttttaatttaaaataaattggcaccaaaaatgtacctatttttgtcatattttgcacttttgttgaactttattttgcccctgggatttttgggctagcaatatatattttcttcatagtcacagggtagtttttctgaagatcctgttacgtgatgatttgttgaagttcttttgaatgttttctggttttcttcaaaggtaaaatgatatttgaagtttagaccagttagataatattacaacattaaacatgttttggactttttgtcatcaccacctcctgaatcttcagcagctagtaaaatcaaggaaagcaatattattaggagttagtggatatacagtgtttttattctaacattcccatgatagtagtgtcaactttgtagactaattagtcattttaacctagcaagtactgtgggtttgaccatgtaaaaacttgaattaatattcagagttggtccattcaaaaaataaaatctgggttaggtgcagtggctcctgcctgtaatcccagcactttgggaggctgaggcgggtggatcccttgagattaggagtgcaagaccagcctggtcaatatggtgaaaccctgtctctactaaaaatataaaaattagctgagtgtggtggcatgtgcctgtaatcccagctactcaggaggctgaggtgggagaatcgcttgaatctgggaggcacaggttgcaatgaactgagatcatgccattgcactccagcctgggcgacagagtgagtgagactccgtctcaaaaaaataaattaaataaataaaaaacagaatctgatcaatggttggccagttaacatcttagtttctcactgagacaatgcagtctggaaatctgagcttgatgcacaaagctccatgcctggtgatagaaaataatgatcttagtccacaaagaattctctatgtagtagcaaaaaaactcagaagtaaatttttgtgcaaataaaatacagatccatatccaatgtcacttaaaggacctgatcatctcttcataataaagttgagataaaggttaaatctaatagtactaagaaataccctcacttttcacttgcttggtaaaaatcacttattgttttgaaatgcaaatcatatcttaccttaaatctctcaaatgacccatgaacatttttagcccaccttcaaggcaatacagtatctggcagctacctgcactaccagcttcatatgtacttcgcactctttactctctagactccagctatatcagcttaaaaatttttcaattgcaccaagcttattcctactccaagcctttgtacatattttcttactcttcctccccaatgcctgctttctgtggttagcgtaagcattcttcaggaaagccttctccatggcccatgtgcacactagtgccttcttcgagatcgttaattgtgcattggttcacaatgtttagttcccccaccaaatggtaaattgttcaagataaaggatcccatctttccccagggcctgcctaacaccgggctttatacagagaagacatctgataaatacataagtgaatggatatcaaggagtcaaaaactcctgcttttattctgaaggacatccttaactttgttaagaaaaatattttctcctatgaattatttaaaatttcactaaatgcaatagagccacctaaaaggaacatgtcagggcctttccacatagagatgatttctttgttaagcaataacaattgcttacaaaaccttcagagtgataaactttcaagacagaaattagcattccactttcaaaatgatgtttgggccatctgatgaactaatagttaatcctaagcattttaagaatccaaaaacaacattaaacttgacaaagtgactttaggaatagaaatttcatgccagaaaaaaaatggcacaggaatctcatgccagaaaaacatctcccaatgagacatttgggagaccggcaatttcagccttactctacatgtagggcttccttaagctgaagatctgtaaaaccacctcattacatggagaagaatattaaactcagcgaggttaagcaagctgcccaaggtctcacagctaatgcataatgttgggacaaaaacttttttctcacctaactctaatcccccagattctgtagtttacatattatccctaagcacccagtgttctgcagaggagccaccttctagcaagatgaagaagcctagctccaacctctacttcaactggaccggtcaattcgatctggagttatacataagatgttgtctgtggcagggccagggggacctgaaaaccactaatcggcctgttaaaatgatcagtctgcaccagtaaagcaggttttctgtttgtggtgactctttatggctttgtcacatgccattaagctcagcctagcttctggctacattacagggagcaaaaacagagcccatctaacctttttcggctcctccttcttgcttttttgcctcctcttcaatgaccttcatctttgcatcatactcatcagctagtgatttccattctactctgttattctgaagaccactcagcataggtgtgatttctttgtgaaaccgtgagaactcctaaaaggaattttaggtcagaaactacataaat

SEQ ID NO: 98116 - DNA, 15943 bp, Homo sapiens
aagaacgaagctggaggcatcatactacttgacttcgaactatactacaaggctacagtaaccaaaacagcatggtactggtaccaaaacagagatatagaccaatggaacaaaacagagcgctcagaaataacaccacacatctacaaccatctgatctttaacaaacctgacaaaaacaagaaatggggaaaggattccctatttaataaatggtgctgggaaaactggctagccatatggagaaagctgaaactggatcccttccttacaccttatacaaaaattaattcaagatggattaaagacttaaatgttagacctaaaaccataaaaaccctagaagaaaacctaggcaataccattcaggacataggcatgggcaaggacttcatgactaaaacaccagaagcaatggcaacaaaagccaaaataaacaaatgggatgtaattaaactaaagagtttctgcacatcaaaagaaactaccatcatagtgaacaggcaacctacaggatgggagaaaatgtttgcaatctacccatctgacaaagggctaatatccagaatctacaaagaacttaaacaaatttacaagaaaaacacaaacaaccccatcaaaaagtgggcaaaggatatgaacagacacttctcataagaagacatttatgcagccaacagacacacgaaaaaatgctgatcatcactggccatcagagaaatgcaaatcaaaaccacaatgagataccatctcacactagttagaatggcgatctttaaaaagtcaggaaacaacagatactggagaggatgtggagaaataggaacacttttacactgttggtgggagtgtaaattagttcaaccattgtggaagacagtgtggccattcctcaaggatctagaactagaaataccatttgacccagcaatcccattactgggtatatatacccaaaggattataaatcatgctactataaagactcatgcacacatatgtttattgtggcactattcacaatagcaaaggcttggaaccaacccaaatgtccaacactgatagactggattaagaaaatgtggcacatatacaccatggaatactatgcagccatgaaaaatgatgagttcatgtcctttgtaggggcatggatgaagctggaaactatcattctcagcaaactatcacaaggacagataaccaaacaccacatgttctcactcataggtaggaactgaacaataagaacacttggacacagggcggggaacatcacacactggggcctggggggtgggggcctgggggagggatagcattaggagatatacctaatgtaaatgacgagttgatgggtgcagcaaaccaagatggcacatgtatacctatgtaacaaacctgcatgttgtgcacatgtaccctagaacttaaagtataataataattaaaaaaaaaaaaagagagatgtgaccttgtagccactggcctcactaatcctaatctgagtattttctttcccatatcacatcttgaaagggaggccttacgtttgctcctagaggactcctgctttgctgtattttttctaagaaacacatccataatgaaggtgtgtgccgcctcatgtgaagcgagaagagagaagcgagttagcccaacctcctccttcctgctggggaacatttcctggagggaaaaggagagaacattctgtctcaaactagggagagagatgagagcgtcccgtccttctagaaagaagtgtgacatctttgtaaaggggaaaggttgtcggagccccacccttgcacaaggtccagtgcaggaagctagaatgtggccactgagagctcatcccttcagtccatgggcagacaatgccaggcaaactgcccttccccaaacacctcagtagagtttggctatccaaggaatgccaagtaatgtttcttagaactttctttggaatcctgaaatgggggcctaagccttggattataaaagaggattcccctatttcccatcacctcatgcctcatgcttggcctcctctgcaggactgggccagatgatcagatgcaaagagaaggattcacctgaggcggcacacaccttcattatggacatatttcttagagaaaatacagcaaagcaggagccctgtaggaacaacaataaagcctccctttcagaattcaaagatgtgatatgggaaagaaaatacccagattaggattagtgaggccaatagcttggaggtcatttctctttagaggtgtcactttagccttgattatgctggggcaacccagcttgaccttgtccttccacggacctgcggtgtccatgtttccaccagttgtttgtttctctatttacttttaggacaaaaaaagtcgccagcttttattttgtggtagacctctcagaaacccagcagcatgcctgtgagcttagcttacgctgttcctctgcatggaataccttctctctcctctccacggtgagtgcctcctcttccttcaaggcctagctgaactgccccctctgtgaaacttcctccccctccccagggaaggtgagtcgcttccacagcacctgtttctgctctcatcctcacactcagcaccctgtaggacaccacgagcccctggaggcccagcagacagcctggaatggaagatgggtttgagtgaattatcgtgctgccgctggccatgaggccttatctgtaaaacagcgtccttcttccctacctcagagctactgtgaggctcaaacaaacccccagggttaaagcgggagctgtaacttgtaaaagaacccccaggtgtcacctcatgcattgatttcctcattcacaagttatcaaatgccagccactaccaggcagaagctgacaaagacacactgccaaccttcaaggagcccgccatctagggtgggagacaggagcaagcaaagagtcacagaagtgcgtttccactctgatgagggcaagcccagagcaccaatgcaggctgctggctcagggaagcctgccccaactaggagatccctaagctgacttcaaaaggccccagaagagtgagtaaaacagagcgcatggtgtcctgaaagacattccatggccagggtgggaaggacaaagtgatggcacagagccagcatgttcttataacagtgacaagctgtgtcacagcaagtgtgaagcaagatcgggagcaaagttgagaacatgtgggggctgtgtgccaagctagggagttacaaggggggaaagatggtggagcccctagaagttggaagcaggagtgagtgttgcgactggaaagatcaccttggctgcagtgcagggaagagattttggacaagtctaaggctccaggcatggtgggcggggggaatgacaagagcaaatcagagacaagaactacatttgactcttgaacaatgtgggggttaggggcacggagccccgaagtcaaaaatccacatataacttttgactcacctaaaacttcactaatatagcttactgttggctggaagccttaccaataatgtaaacagttgatgaacaaatattttgtacattacatgtattacatactgtgtcccagcaataaattaagctagagaaaagaaaatgttactatgaaatcataaggaagagaaaatatatttactattcactgagtgaaagtggatcatcatggtctccatcctcacggtcttcctgatgagtatgctgagaaggaagatgaggaggagctgatcctgctgctcagcggtgggagagatgagaaaaaaatctgcctgtaaatggactcacaaggttcaaacccatgttgttcaggggtcaactgtaatactgcctgaagacctgctcaacatcaggccactttacatataagtagttcatcccattgagatgcaaaagtatcccatcaggtagacagtactggtctcactcaacaaatgagaaacaggctcagagaggttaagcgacttgcccaaggtcacacagcctgcacacagcctgcgcagaacttgtgtttttcccttgtactctgtcaggcttccgatctgcaggttgacggactgggaagcaaggtatggagggacattaagctagaagggttaccaggggcaaaactgggcagagggatcacaggccaggctaaggagccctttacggttcaggctctgaaggtttaagagcagggagatgccctgaccagggccgttcactacgaagattaacctggtagagcagggaggactagctaggtgagagctgggaaacaggggagctactcatcagttgtctaatatgtgcccctctctgttctaggtcctggagtaccagtagtgaatacaacaaagatgcctgccctcagacagcctgccttctagtggagggacaacaaagagcaaaacaaacaagcaaaatatacagtaggtcagaaggggataagaactgttggaaaaaaaagtagagcaaggtgagtggcttgtttgtactgggggctgcaatacttaaatagggtgcctaagaggaggcaggcggagaggacaactgagacaaagatgagaggcaggagtgtggctggcacatgaggttcaaccacaaagccagtgttctggggctggagtgagccagacgagagaagagttgtggagcgatggaaggggacacgtcgtgccaagctttggagatcacagtgagaactctggctcgtactacttggggggatgatgatgacccaaaagtcaggaatctgttcactgctgaagagagaagagggcaaagggcagcagctccatttaaaaggttctaataagcctcgggcctttctctgtctgagaaacttactctctgccctctgtctccctagattactgcccctatgcctggaggaaaaacaggtgaaggctaaaagccacggggatagctaaagagggcaaactggacctccagctccacttctgcaggtctatgtcagtccacagcccttgcacacgctcccttttaattctccaagcatacctctcacttccaaaactcctgtgactctgctgatgagggcgtctcggcctggaatgctcctccttatctgcattgtgtgggtgtcaaaaagagtatattttgatgacctctccccgcccctcatgctcgctcacatccccctcactcctttcaaagtccgttcccaaaggccccagttcaccgtcctgggctgcttttagccaggtaagatctaaagtgatcctctcttggaacctggtctggggcctatacatctgggtcagtctaggggtgctctcgaagggccaccctcaaagagcgagcctcggctggattcagttcctaggtcccagccgtccgacctctgcgacaacactcagcacaccccttcccctctccgggtctcagttgccccgtgagtacagtccctgctccaacacgcaaggtaatcgtttctggctgctctgatgcactcggtccctaaactcagccttaggtcaacccagaaagcacccgacccgggcgaccccgtagctccccaccctcccgcactgcccagtcgctgacacagggtgacctccaatggcaaggccacgactcttacccgtccgtaggcgcccccctgtctggcctcagctcgcaagcaggctgcacccactgaactccaggcccggaccgccaccctttactcccctcccgcgtgagccgagaatcagccgagcttcctccaccaagaggattggcccagctcggcgacgactcagccaattggcgctcacggcgtgatcttgcccaataaagacggggctctgtcgccagcgtgcccctccccgcgctgggccggggctttgccaggttagtcccaccctcttcggccctgcaccaatagggagaggcggcgacgagcggacggccaatggggagcggggctgcgcgcgcggggcggtgggaacggcgccgagtcagkgtacacgtcggttgcctaacaaccggcagcggactcctttggctatggtgagtgctgccgctctgtcgcgccccacgcccagcggctgagcccttcccaggccccagctcggccacgccgcctctcctgcgcctttctcggctttagcgcaccagtctttcctttgagctctttcccgggagagtagggtacagacgctaaccaacctactgggcctgcgcttcgctgctgcctcctcttcacccacaacaggcccacacccgcccctcgggctccccttgcattccctgatcccctcggtgaacctccctgggcaaaaaagactcgaatccctcacaggcccctgactctctcagaccttggccccctggcctcctcattctgccaaaatttccacacacagctgggaaaaggtgtatcgtgttctgttacaatgttttttacaatttaaatacaggggcattcaggggatgctttagcttcttggagaaggcacgaaggtgccagatggattgagttttattactcggtactgacacaatatacatcttaacaacttactaatatttggccaaatctagaagtaattgggaagtcggagtacttactgggaaggggagtactgggagtgggcatcgtaagactgttttcagaaccaggatccccacgttcgggaagagctgattatctctagttattcacagtcatcttcttgactggctctcttttgggatgattttcagtaagaggtgtccttactgaacaagtgatctccctgcttctagaaacaacagtaaagaaaagggaggggtagaagttcatggaaagattcattgttcttgccagtaaaccctgttatctttctttttaagcaaagctttggaattggttatataaatgactttaaaaatacatatgggtgtctgtaactatgttatgtaaatatggactgtatgatrtattattgtgcttgtgtattgcataacatataaaggcctccaactttaagaaggcaaacatggcatcaagttctcagcgaaaaagaatgagccctaagcctgagcttactgaagagcaaaagcaggagatccgggaagcttttgatcttttcgatgcggatggaactggcaccatagatgttaaagaactgaaggcaagctctgtgcattcctgccgtactgcccttcctttcctctgcctcttccttgtcatctccctatcacctctctaccccttttgccctcttctccctgcagtaagtaacaggggaggttgtactgtgctgttttcctgtctttacttactttgagtattattcaataaaattgattgcaaatatcaattagatcaatgtcatagtgttccccaatcatattaacatgaccacatcagatgctggcttaatgctctcaacactgttatttttgctcctgctactttagatgtgcttattgagacgatcctgttttctttataggtggcaatgagggccctgggctttgaacccaagaaagaagaaattaagaaaatgataagtgaaattgataaggaagggacaggaaaaatgaactttggtgactttttaactgtgatgacccagaaaatggtaagtagctaagacaattatcatggtatggagccccagtcatctgcagaggtccatggcgtcttcctgttaaaacagtcatgtgaccacagagcagtccaggtagcaactgcatcaggaggcctgccctcccatcatgttactttgggctcccaaaacaagcccttgtgcttctttctcaagacttccaagcagatacctcttcccacagaattccaaatcagttaggaaatagatatgggatagggagagatatagcgataggtagcaaacgtcaccttggatggagtgcctggcttgcctggtgtttctttgaggccaaaatgggcttcctgacacttgccgcaagtctagactcgagttacattgttaaaaaggaaagggtgacctgaccaggcagtggcagggctacaggacagkagtaaccaaccgtggtgtccccctactcatgtgttttatgttctacttgttaagtctgagaaagatactaaagaagaaatcctgaaagctttcaagctctttgatgatgatgaaactgggaagatttcgttcaaaaatctgaaacgcgtggccaaggagttgggtgagaacctgactgatgaggagctgcaggtttgtaatgcatcacactggaacttaaaattcccacctttgagccctctgtgacttttccattacattttccctagtgtgagcacctctttgaagaaaagccagtgtactttgtccctctgcagacaacttaattctcctttaatagtcagacaaacctatgaaccctgcttccagaaaaatgcacatatgcacaattttgcttactattttaggttccaggaatccctctagtcaaggcaatcttcaaggtccctcccaggtgatatgtttgacaaagtatgagttggttttcaaataacttttcagaaaccaagctattatcaggagtagcatactggcattgggtggactacaatgatctattcacatagatacaaattatctattcacatagattaaaagtctattgcttgccaggcacagtggatcatgcatataatcccagtactttgggaggctgaggcaggaggatctcttgtggccaggaatttgagaccagtgtgggcagcatagagaccccatctctaaaaaaaaaaaagtctattacttagtcaccttttggcattagtttataaattaacctgaatctttactgtcatataggaaatgattgatgaagctgatcgagatggagatggagaggtcagtgagcaagagttcctgcgcatcatgaaaaagaccagcctctattaagatcagtgtcttctttttctactgcaagcacatgtaactagatttagtgcctgccatggtgtgaaatctggcttttgagaacacaaacttttcccccacggacctccctttatcactttaatagtgaccttgagcctattttagccgtttggaagtgttctttgatattacagttctttgtaaaatgacctgcgaattaccctaattctcaaaagcaaaacaagagcacacaagcgtgaagaaaaggatcttaaagctttgagcacctgccattttgccttgcatcgtttccctcgtcatgcatttccacatatccacaaacacagaacgactttagacaagcacatgttacacctgtgttgccacaagcagtcattcttgacggctccagtttttatttgacacttgagtttagttttctcttttataaacccagtgaactcctgcactggcatttggatgtgtgttaatgctatttkttttgtcttaaaagtaaaacctttctcagtttgaacttgtattctctaaggatgagttctttagctttgcttatgagttcctcttctcaattattgtgttgaaggcagcctattagatamaaaactccttaccagcctatggacagaaaatgaataatcctttgctactttcctggcatgaattgctttttgccttggaaggctgctggtttgtaaaactagcagaatttttatatcacctaagcctaaatgatgctctaaaaatagttttggcaaagctaagactggaaaagagtcttgttagtaatttgtgcttgaataaaatggggagagccaggctaacgcaacactaggatggattcagccaacctctcgtgaatttatttgcttatggtatctcatcgactcttggaggtgggttgggctgagtgaccccatccaaccatcttcctggccttgcccgggattccctgtgtgagaaatcctggtagatgacattaaagtctctgctccagggtgagagtggggaggcagaaggggtgagggagaatagaaaatgaacaatgatggaatgctcgtttgttcacatggagagggagaaaacagattttcaaacttctgggggtaggctagtcctctggggatagggttgcctgattcagctaataaaaagaaagttgaggtaaatttgcatttcagatcaatgatgccttttttttagtatgactatatcccatttgtattttttgtttattcattgttgatcttaaatgcaaatttacctaagcatcctgtattgccactggtaaccctacccggggagcacgttacagaggccagaagcctggccctcggtctcatgcctctggaccctgacatcctgtaggacttgggggcccaggaatatgaagtttaccatatcccccagatgagtctcatgccgagggactgctccttaagaaaaacttgggggaagagcccagactagcccaaaccctggattctcacacacacccacttcctcatcgggcaatttggggcaagctacttctctaggtgcctggagtttgatgtctgtgtgatggggagaagagttgtgcctactcagaatcactggaggtgaaatacaaacttacagagaggacctggcttgaaggtattcaagaacaagaggattcagaagtgttcagtcttactcccattcttttgctacagttatcacataagctttgttgttaaatgtgggtccatgaagcttttatcattactgtccccaaagtgtgttgatagcatttcctaggaggatttgacctttgttgtattgtgattttctaataagaggcatatgattggataaaagacataatattggaaaggagtgaaaagactgggccctgcctccaattttactgttaactgtaaccctggaaacactcttttgaaaaaaagttaattaaacgagatcatgtcctttgcagggacatggatggagctggaagccattatcctcagcaaactaacccaggaacaggaaaccaaacaccacttgttctcactcgtgagtgggagctgaacagagagaacacgtagttacagggaaggggacaatatacataggggcctgtcggtggcagtgggggtgggggtgtggggggagggagaacatcaggataaatagctaatgcatgtggggcttaacacctaggtgatgggttgataggtgcagcaaaccaccgtggcacacgtttacctatgcaaccagcacgtcctgcacatgtatcccggaacttaacttaaaaaaaaaaaaacagtttcagggataaggaaaaaaaagttaattaaaaagaagttttgaaattgacaacattgtatatatttatggtgtacaatatgatgttttgaaagatgtatacattgttgaatggctaaattaagctaatggactatcctggagacattcttatctcctcctgcttaatattcccataaatgaaatctctcaggaatctcttgagacaggacggagagtggcaagtaataggttatccctgaggataaaagcaaacataaggtctttgcctggcagccattctaacataggtgtgcagttattcagtggaaggatggggacagagagggagcatgagtcagtggggctggaccggagagctgtaaagggatcaggaagatggggacggagagggagcatgagtcagtggggctggaccagagagctgtaaagggatcaggaagatggggaaggagagggagctgggctcagttcatgtggaggcagaaaagagtcctgaaggcgggggaggatgtggatggagaagtaactgaggtcagttcacgtggggctggaccaagagatgaagggaaattgcagaggatagggacagagaagtagaaaagatccgtgcatggggtgtcccggagaggtgcaggggagcaggggtagggggaagggagtgagagggagcagggatcagttcatgtgaggatgcagctgagttttcatgggagtgtcagtgggtgggtttgtagagttagtggcttattcatgtggacaatagagttgtgagggagtgaggggaaatgacagttcatgtggggctggcccaggaagctggagggggatgaagtggcgatgcacacttagagggagcagatgtcagttcatgtaggctgtaccaagagatgcagaaggctgaatgggatggcatgggagaggcattcgaggccagctcctgtgcagctgcactggagagatgcagagcgtcagagagggaaaggaaaagccactgaggacagcttatgtgtggctgtatctgcagaggtagccggagtgtggggcaagggaaaggagagggaacggagcttagttcacgtgtggctggaccagagatgtatggtggggaaggggaaggaaaggagatggagctgagttcatgtcatggagggctggaccagagagatgtagggagagtgactgggtaagttctaaggggtgtgaaggtggcatatgattgcataaagacatatactattggagaggagtgaaaagactgggccctgcctcccattttgttgttagggagggagaggcagggtgagtgggttcaaataccggtcatttcagagctgcaggggacaggcagggagacagaggtagcaggggtcagcccttgcgggtggaccagagagatggaggagtggggtgggtttggaatggagaggtaacagaggtcagttcatgtgggactggaccagaaggacactggggagtgggagaagatcagaagtaaagggactgaggtcagttcatgcagcgtgggacggaccaatgtagggaggtggtggggaaggggcaggagagaaagcagagggcagttcatgtggggctggaccaaagaaatgtcggttgcgtgtagggattgggctggagagagggcaaagattcattcatgtgcagctgcggcagagggcagtagtgcaatggggggagacagggcacaggagagagcagagagcagttcatgcggggttggactggagagctgcaggagggtgggggtggaattttgaactagagaggtcagagattgcttcatgtgaggttgaactaaaaagttcaatcagagttggagaaaaaggggaggaagagggagcaggggttccttcatgtggggctggaccagagggatgccagaggagttgagggggatggaaaagtagagggagcagagattagttcatgcaaagatggagcaaacaggtgcaaaggcttagagacatagggagcaagagaggtcatctcacaatggactgggtactgggaaggagattgagcccagagttagttcatgtggggctggaccagagaggtagagggggatgggggggataaggggatggggatggagagagagcagaggtcagttgatatggggttggactagagagatctggcgggatggtggagagggctagggaatgcaggccagttccctgaggatggaccagagagccggaggggaggaagggtagggggacggagagggagaatagtcagtttgtgtttggtcttgtgggcctccttaataacttagggttgtgctaaatttccttgaaaaacctgtccagcagattcgtcttttctttgcttccaagtgttagaactactgtgaacagcagaatttgttggtagacatgctcaagcctgatataacgaaatgatttaagaaaggaggtggttcagtttctgtctctgtaagacatggaacagctgctgggactgagatttttttaagttctatgatgaccgggaagagaagaaagaacacattttttaccacttttcttgtttaaccacctctttaggaagcctaggagttagactgtgaggttagacccaggtgtctcagggaccacgtggctccctaccatccactgggggaaatttccttaaagttcaatctggcttttgagaatgctgacctttcaaatgcaacctcaagtgccaggatgtctgactgtcattgggccaacctcaaaacttgatcttagagcagctcttcccttgagggactcctgctgtcaaggataactgtattccagggctgctcaactttattttatgtttttgtcacacctttgaatactagaattttgacaatatgctagaaggaagtaatacactcaaaacaacagtttaacgagaattgcaacttagtcactactctaggccagtaggcagcccactatacacttagtcacccttcagttggactggaccggcttgctgtccagatggtgtcaagttcctgcacagtgcagaagctacccctttttgagctagctcctccatcaccattagtgagaagtatcttacagcaggttgctcctttctccactccatgtctcatgacctgcttagttcatcgtcctacatgctggaagccgctggaatggccacatcttcagttgtagcaaaaatagtgcctctgcatcagctgcagctgtgaagctgagacatcatccttgtgtgccatgctcggacatatcggacccatttgctgacccaaatctctgtcagtagccctccaaattcttatgtgggtttgtggacccatttcaaagaacatcgccatcagcacttgctgtatctggagctaaagttaccctcatttctagcttttccctgcagcctcccagtcatctggtcttccaagcctctccttaaccaccaccgtttgcctttatctttctgatgcagtggtttagaggattgatgtcattttcattttcttttttgtctttgccttatatgtcacccagactttccctacagtattcacactcatccacccctttctttttcatttctgaagccaccacctcaactcaaattcagattgctgaaatgtcctcctagctgatttccctgtcctgtcttttcccaagacaatctgcagtactgtctttgtcatgccattattttgctcagggaagagacctagccttttgattcagccgcccctggttaaaatcccaactcttcaacccagcagctgtggttttgggggaaaggattcaaccccctcaagcctcagtttgctcatctagaaaacaaaggtgcagagaggtcaaagacagcaaacaaaggctagcgtagagcctgatgcctctttgccacagatgatggctgctcattaattagcctgtttttctttttccctctgacttggacaccgtgtccttaatacatgtctatgtgtgtttcccttcatataaagttagttgctatatatatatgtactcatgtctctgtcattgtccctactgaaatattgtccccccatcttatcccaaatctgtgttcttctccttgtgaaactcctcctcagagctccctccttccagaaaacttgttttcaaatagaggactgcgtcccagctggaattctggaagacagcagtcttgcagatatgtcccttgccactaggtggggtgccaggacagagaggttctgaggcagtgccactaaattaccttgaattcagcagtggtttaagctggatcttcctagtgccccaagagggctgtggtctcatttagccttggagggctgtggtctcatctagccttggggtgtgatggagataatgccacagtggggagaatcctggtggggctgtggaccccttggaaaaagtcaccaggtgtgggcactgatggaatgacaggtcatttgaatggataccctattaagtctagctataagtgaacaaaatgatacatttgcatttttgagtgtgagcgatcaagattgcttacctgctacatgggctcattgagactccctaactactttgaacacttctcaacagaagagagcagggtgcctttgatgtcatcatagccgggctttgtgcctggtacaatgctccatccatccatcatcaggtttattaacttactaagtttgttgatcctatagcaaggatttattaactcattaaaaatgtctagcattctgtggctc

SEQ ID NO: 98117 - DNA, 17794 bp, Homo sapiens
gtctggaaaatgggctatataaaaccaacctccaaatttgtctgtgaagattcaacaagttgatggaagtaagactgtaatgtgccaagcattatgctaagtactcaataaataacagataccatcacaggcatggataagatctaacatccttgggctcaggggataaacacaacagtatcttgtgctctataatcctaatcaatggccaggcttcagaagctgccaggtcatcactgccaaaaaaagacaaggaatgctgggctaaaccaccttcccaaggtacttttcattctcctgtgtctttataaagaaatgctgcatatacatgtaactcactgccaaagaatattgtagggtttctttccacttttgagaaaagagcccagaaattgctagaaagccttttaaattttatgagaattttctcactcacaaaaggagtataaagtgccgccctcttgtggtagtttcatgaaatttcctttcccgaagctctcccaaggcactgaatttattttatttatttatttatttatttatttatttatttatttatttttgagatggaatctcgctgtcgcctaggctggagtgcagtggagcgatcttggctcactgcagcctccgacttccgggttcaagcgattctcctgcctcagcctcccaagtacctgggattataggtgcccaccaccgcgcccagctcatttttgtatttttagtagagatggggtttcaccatgttggctaggctggtctcgaactcctgacctcaagtgatccacccacctcggcctcccaaagtgctgggattacaggcgtgagccactgtgcatggcctggcactgaaactgaaatagcacattccacttccataggtccccattagtgttgccagagtaaaaaccttgggctaatgtacaccaaaatgacacagttagccataggctgggctaaatgaaaaaggtcagatgatatagtatatggttcttcccaatgggtgaacagtcttatggacagagaaaaagaaataggccccacctgccacctggctttaatgtggaacctggagcacatctgggaaactcatggctcccactcagacctgctgtccctgcaggacatttgctcagtgggagccctgtgagcaatttgtcctccatatcacctccaaattaatctccaaacactgcttaatggaaaagcaagagtctcatcagaccaaaaccactcatcctgactttcattcaaggtttcttacattctagatccttcagtcttttgtccaactactgaccagtttgcattttacacctctagcaggttcttctcttgtttctggcttttgcttccactctctttccatcctccatctctaaatgacctacacactcttctatgaatagctaaatcccttcttgccatgaagtctacctcaggaacactgggccaaattgtcttcctgtcagcttgcatacaactgcatcttagcacctgattatattcagtctcccaggattgcaaagtctctgaagtcaggggtcacaggttagtacaagttgagtatcccttatccaaaatgcttgcaaccagaagtgttttggatttcaaattctttttcagattttagaatatttgcataatacttaccaggttgagcatccctaattcgaaaatccaaaatctagaacatataaggagctcaaacaactctttaaggaaaaaacataataatccaatttaaaaataggcaaaagatctgaatagacatttctcaaaataagatatacaggccaggcatggtggctcatgcctgtaatcccatcactttaggaggccgcggcaggcagatcacctgaggtcaggagtttgagaccaggttggccaacatggtaaaccccgtctctactaaaaatacaaaaatcagcagggagcgctggctcacactttgggaggctgaggcaggcagatcacaaggtcaggagtttgagaccagcctggccaacatggtgaaacctctctctactaaaaatgcaaaaattagccagacgtggtggctcacgcctgtaatcccaacacttagggaggccaaggcgggcggatcacaaggtcaggagatcgagaccatcctggctaacacggagaaaccccatctctactaaaaatacaaaaaattagccggatgcggtggcggtcgcctgtagtctcagctactcgggaggctgaggcaggagaatggcgtgaacctgggaggcggagcttgcagtgagccaagattgcgccactgcactccagcctgggcgacagggcgagactccgtctcaaataataataataataataataataataataataataataataataaaataaaataaaataaaataaaaatacaaaaattagccaggtgtggtgccagacgcctgtaatcccagctactcagaaggctgaaccaggaagtggagcttgcagtgagccgagatcacgccactgcactccagcctgggcaacagagcgagactccatctcaaaaaaaaaaagaaaagaaaacgtggtatgtatacacaatggagtactattcagccataaaaaataagatcctggccaggcacagtggctcacacctgtaatcccgatactttgagaggccgaggcaggtggatcacctgaggtcaggagttcgagaccagcctggccaacatggtaaaaccccgtctctaccaataatacaaaaattagctgggtgtggtggcacacacctgtaatcccagcatttggggaggcagaggagagcaggatagctcaagcccaggagtttgagatcagcctgggcaacatggcaaaaccctatctctacaaaaaaattagtcaggcatgggggtgtacaccagtagtcccagctacttgggaggctgaggcaggatgatcacttgagcccaggaaatcaaggttgcaatgagcaaagattgtgccactgcattccaacctgggctacaggagaccctgtcccaaaaaagaaaaaaatgaggtttcagtagcttctatgcaaggtgataactgcagagaactgagactcaactgaaaataggtgataaaacattttgttgtgctatttattaattaaaggacaaaagagcaagatgaaagaccactaatattttttgagctcccactacatgccaggtaccacaccattgtcacacctggcccacaggagatcttcaataaatgtttgttaaagggatgaatgaaaccccaaccttcattctgcaaaggaaatgaaagctcaggaagattcagtgattaagatcacattgtaagtactggcagagctggggcttgaacccaggtgagctgaccgattcaaatttactgctgcttaacaactcacccttacatttagtggctgaaaaccgcaatgtactatttgtcacaatcagggtagacaagatgcagatggtggttctgctggtcttgtttggggccttacatggctgcactgagatggtgacaggggctgggacacacaggatggcttcacccacacatctatcttggccatttttggaaactaactaccataggtggtatttcatgaccctgtaagcacccacaaattgcacctggttggatattctgccttagaaagatcattctggcagtagaaagtgccttgaaggggaaaccaaaggttttgtaaaaagtctactttggtggtgaagacctgagcctagacaggagcagtgcacccagcaaacagtccaaggggaaggcaaagatggtctactccaccacaggttgcagagatgccccctggataactggataacagtgtcaaggataacaggagtcctgtgttatcccactagagtcagactacaagtatcagggtgagatattttattgaagggatggagatgagaaaaccgaaggaaaccttttagtgttcataccacatccatatctgatcacaagcattggttatctcaccagcagaagcacttttcttcagccatctctctaagtcagcaaactacttcatgacagctcctttgtaaccagaggacccaaatttttccagagtacgactggttaccttttggctcattgattgaccctcaggttttttatattctgacttaacacacaaaagtgtgtttatatagttacatatatatgtatatatgaaaaatatttgtgtacatatttctatatatgtatgtagagctgagacaaaagttttacaatgaacagcaccttactctatgcaacacactcttatttctattcgctttaatcctttttctttttctttttttttttttgacagagccttgctctgttgcccaggctagagtgcagcctctgcctcccgggttcaagcgattctccttcctcagcctcccgagtagctgggattacagacatgctccaccacgtccagctaatttttttattttttggtagagacggggtttcaccatgttggccaggctggtctcgaactcctgatcttaagtgatccgcctgcctcggcctcctaaagtgctagattatagcccacccaatcctatttttttaaatgctgtccattaatgcattctgacttcttgcttgaaaacccctggtttagtggataagcacctgtaactccaggaagattcaggattaagggcagaaataatgaagtaaattgaagtattagcattagtattttccattacattttggaatcgtctattttgatgtattcatgacggttaaaataatttaacatgctaatgtatggattaacttggcaattccattttaaaatattaaatggaataacgattctgactcgtaagtagacatgtgtaacagaattcaaccacatctgtaaaccatattgaaattatgagagtaagatttaccaaccatattttttaggtttgacatattagatttgtgagtgaactatgtacttggattttgtcaagtaactcaatcgcttaacaaaataacaattaaatgtataaatgcagtttatagctatacattatttttaaaaatccccttcgaatgactctttaaaacataccaggggatacgctacttaagtataactaggttttggatttataacgttaatattaattattaaagcaaaactcatttctaaagagtcgcctgagtgcccaaaagacgccctcaaggacagggaagcagctgcgattcactcagcgatcaccagcgcccagaattcagggccgcccaagcggaggagcaacacgtggcccagcaaaaggagctgggtcccgtgcagcacagcaacaagaaactggcctaggaagacgctggagcgtctttctttcgcacgttactgcctgctacagtcatttaaaaaaaaaaaaccaaaaacaaaaaaaagaaataaattagtagtacgaagaaaactgcgcgagctacattcccagcagggtctgcgccagagcgcgccaggcaccgctcccgttacgggtgggaggaaaggatgcaccgcccacccggcgccggggaggctcgtccccgagtaggggacgggaacgcctgggtcccggggacgtggggcgcagggtctggggcccgaggccacggacgaagcgggaagccggctaggcagcggtctctgtctgggatggacgccgcgccccacgcggacctcccgccccgacttcacccagctctgctgcccgtaactcataagacaagaacatcaggaaccggactattaccccgaaagggccttcccaagtcgtttcgccgcctgcagtgcccgaccgggggccgcgcgtccccggcaaccacgcccgcccgcgcagctgcagaggccggaaaaggcctgctcgcccgcgctcggcgccacccagcccgcgctccgggcgataccaccctgggcggcccctccaaaggccggagatggtgtcgtccccggcctccgattggtcgggggggcgggggcgtggcctctggagcctggttccgcgcgccggagcgcgctagccgcattgcgagccgaacccgggagctggcgccatggtgaggagtggttgcggggcgcgggcgacgcgacggtgggggtttcggcctgcgttcgggccgcagacaggggcctgggcctgggcctgggcctgcggcctgcgcctgcgcctgccctgggaacgggttccggcagacgctgaggttgcgttgacgctcgcgccccggctcccgttccaggtgctgttgcacgtgctgtttgagcacgcggtcggctacgcgctgctggcgctgaaggaagtggaggagatcagtctgctgcagccgcaggtgggtgagatccgtgggctcctttggcggccccgcagaccctcatcgcgcgggtcccagcatgcacagcgcgctcccacgtggccggccgagcggttcggggcggggggacgggcctggaaagctctagatccgggggtctttaccttgacccatgggtagaatcgctctagcaattagaaataagcctcccggacgccgcccccgaacgattaaagcagaagctgggatgtggggcccaggtatcagcatattttaagagctyccaaggctgagaaccgctgcttkactgcgccgcagaggcaggagggagggaaggaaaccacttagcctctttctccccccaggtggaggagtcygtgctcaacctgggcaaattccacagcatcgttcgtctggtggccttttgtccctttgcctcatcccaggttgccttggaaaatgccaacgccgtgtctgaaggtaagtcggccaccgccaagtgtcacagagagatgtggttcctttcggtatcctctcgggcagcttgtgatagtatttgccgtccttggctggctctgagtctgataggcgtgaggcagtatttgagmcatacaatgtgtaatttgaaataattgtcttcacagagctcaaggtctgggaactgtgctagaccaaactgtttaagyagacgatgtggaatgtgtgttaacgtttccttgtgggcactgtagtgacaaactattttttatttttattttttttgagatggagtctgtcccccaggctggagtgcagtggcaagatctgggctcactgcaacctctgcctccctggttcaggcgattctcctgcctcagcctcccgagtaactgggattacaggcctgtgccagccaccacacccggctaattttgtatttttggtagagacggggtttcaccatgttggccaggctagtctccatctcctgacctcgtgatccgcccgcctcgacctcccaaggtgctgaggttgcaggcgcgagcgacggtgcccggccgacaaaggggggtttcttaaagggggtcggcttaacacctacttgtgcctgaggttttgcctaaacacaatcaagtgtctggttctctgctttctgttcgattggaaagggcagttgggtaaacacaggctgagaaaaaaaggtttggttccagaaggcaaattctacgaaatactcgagggtgtgttacaagctattatttattgcccacttgtgctatcagacctgaatgcagttgttcccatggctgggccaggctttgcagtgatgacttgcgaatcaaatctgtcaatcccctgagtgcaatcactgatgtctccatgtctctgagcaatgcctgatggggagggatctaggtatgccatcccagcgtgctcggtgggaccagggtagtcagctgagggatgttagagktgatcgtccttcagcctgttagtgggaactgtgttctttcccctgaggggttgttcatgaggacctccgcctgctcttggagacccacctgccgtccaaaaagaagaaagtactcttgggagttggggatcccaagattggtgccgcaatacaggaggagttagggtacaactgccagactggaggagtcatagctgagrtcctgcgaggtgagaccatcatctgttatattcctgttatcctggacattttgggggaggaggttctggaaacttggttgcttgttgtgatttctgggaaggccttcaggctgggctggtgcccgtgggtgcgggagctagctcagagccccttgttgctcaccgtcttgcyctcttcttaggagttcgtctgcacttccacaatctggtgaagggtctgaccgatctgtcagcttgtaaagcacagctggggctgggacacagctattcccgtgccaaagttaagtttaaygtgaaccgggtggacaatatgatcatccagtccattagcctcctggaccagctggataaggacatcaataccttctctatgcgtgtcaggtaaagtgcaggggccacccataatactggagcctttggtctgtagttcagttaattttgagtcttgatgaggactgaccatcctgtgggtagaaccatgtgggctggggctgggtgtaggcctcctggtgcttaccacaggctgtgttcttacactgactgtatagaaagaggaggtagagtaaacctaccccatatacacctcagctcaggccctgtgcctggtctgtattgtgaatgggggaacatagaattgaggaagatttggatctttgtcccatttcctccaggcagagtaggtgtggagaaggcaaggctgtagctctatggtttttgatgaagcagctgggccagggagtgactgtggctctttgcagggagtggtacgggtatcactttccggagctggtgaagatcatcaacgacaatgccayatactgccgtcttgcccagtttattggaaaccgaagggaactgaatgaggacaagctggagaagctggaggagctgacaatggatggggccaaggctaaggctattctggatgcctcacggtcctccatgggtcagtgcagagcctggcaacctgcataaggtatggggctctaaatagctggcctcttgmattcacacttggtttttcctaggcatggacatatctgccattgacttgataaacatcgagagcttctccagtcgtgtggtgtctttatctgaataccgccagagcctacacacttacctgcgctccaagatgagccaagtagcccccagcctgtcagccctaattggggaagcggtgcgtcacaggggactcaaaaatgggagaataaggactgttgccatgtgcacctgcactgctgtatttcgtgacccaccatgtcttccctagttgtgcttgatggggaggtggggagcagggctgtcgtgcaactgggcaggtcagcagttcatttctctgactgcttccttgactctctctccaggtaggtgcacgtctcatcgcacatgctggcagcctcaccaacctggccaagtatccagcatccacagtgcagatccttggggctgaaaaggccctgttcaggtaccagtgagggcacctgcccacaatcaggtgccacttctggtgcccactgcttgttgggggatcacggtgatggctgaccagggctccctgacctayacaggcctctgctatgggggtgatggccagtcctggtgtctgagtgattcccagggcccagcaaagggaccaagtttccaggtcagcgacattggatgccttccctctgcctctgggagctatgggttggcatgcattggggtagagatccaatctggcctgaggctcactcaggacttcggggtgagaggaggggaggagctgagctgccttggctaatggggttgaaatttctgatcttaaactctccactgaatattctctcagagccctgaagacaaggggtaacacyccaaaatatggactcattttccactccaccttcattggccgagcagctgccaagaacaaaggccgcatctcccgatacctggcaaacaaatgcagtattgcctcacgaatcgattgcttctctggtatgggtgggggggcgttggcaggtgtgagaaggggctgggtggctgggtsgggaggcttgcaaccatagcttccacaatgatggcaatatttttcgtcaacagcagttcacctagtgagtgttgagactctgggtctgagtgaagctgagggtagagggaacacagggttggggtagtttctctctttgggctgacaggctttgtcacccacacacatccagaggtgcccacgagtgtattcggggagaagcttcgagaacaagttgaagagcgactgtccttctatgagactggagagataccacgaaagaatctggatgtcatgaaggaagcaatggttcaggtcagttgggctttgctgggtgtggagtggcatagctagctgttggaggtgatgaactgtctgagcctgaccttgtagaatggaggcaaaaaaactgatttaatgagcctgatccaataaagccagaaaggagtcctcagagcaccagaagtcttcaggcccttttagcacttttctttgaccaggcagaggaagcggctgctgagattactaggaagctggagaaacaggagaagaaacgcttaaagaaggaaaagaaacggctggctgcacttgccctcgcgtcttcagaaaacagcagtagtactccagaggagtgtgaggtcagtaggcagcacggccctggcagagatcctaggttgtaggattttcaacagcagaacaaaggatatgctgcatcaagctgtggtcttgagtccaggcttttggactgaaacaaggacctgaaacatctaaaactacctcttgattctataggaaggagataggtgctgaacttgctcaagagcccagagagctggttgtagctcacacccgttccctgggcatgtgtgttctgtcctcggctgcctcccaggagtcctcaacctggggtagtgtaaattcctgctctgcttattatcagacgtgtgtccggaggtggtcgtgtttcacagtggggatgggggcagggaggtccccaatgtgctaagctacaatcattctccctgagattttcatttagcacccagtttcttaaacagtgtttcagggccctgtctggaacttggcatgatggttctgttgcgaccagcatggtgggtgttttttaggtttttttttttaatgggctgaggtaatttctcatgacatgttttccttctaatttgggacagcctttggggtggatttctaaagttatacccacacaattaaacyatcccagaaacactgggcaatgttaacgacacrcgttcccctgccttggctacttaattgctgaagatgtaatgagcactgttctcacagcctgttcccctgtccttccctttaggagaygagtgaaaaacccaaaaagaagaaaaagcaaaagccccaggaggttcctcaggagaatggaatggaagacccatctatctctttctccaaacccaagaaaaagaaatctttttccaaggaggagttgatgagtagcgatcttgaagaraccgctggcagcaccagtattcccaagaggaagaagtctacacccaaggaggaaacagttaatgaccctgaggaggcaggccacagaagtggctccaagaaaaagaggaaattctccaaagaggagccggtcagcagtgggcctgaagaggcrgytggcaagagcagctccaagaagaagaaaaagttccataaagcatcccaggaagattagaatgcaaatggacattctctgggaggtggggcataccatagcccaaggtgacatttcccaccctgtgccgtgttccccaataaaaacaaattcacaagagttggttcatgttctttattgaacaccttacatgggtatggacagggcctatgggtggggcaaggcagcaatgacagcctcagtgaagtcatggcaagtagcatagccacccatgtcagaggttcgaacctgtgggggagaatcatcatcatccatgtggcctgggctccatcctaacaatccccatcaccacccaacagtctgtcccctaaggaagccggcccaaggacaacctaggctctacccagcaaggtgaccatggtccactgcttagaggcacaaggtctcttccctggtacactgcactgaagggtatggggagtgtggtccttgcaaggttggaagaaataaagggctctagctccctttagtctgcaggtgaccgatgacagacttgatgaagtcggttgtggtgctgtagccgcccatgtctcgagtccgcacctacagccaccaccggcaacagccgtggggagggagaaaagagagcccatgaagggaggtagggcaatgtgattgaggaaatggaagccaagaatgcgtgacagccagaaaaaaggcaatgcacaggaatggaaggaggagccaggatgggaagcacatggacctgccactcctcttaagccactattagctgtgctgcagccagggcaggacaggaggctgagcaggcaaagatgatgggaaacgcagatcagaggcaggatgtggctaccttccttggaagaaatagagacaagaccaggtggaaggaaagaatcacagcgaaaaggagatggggcgtgaaggtgaagctgatgcttcagcctgcctgtatcccttgctgttccacccccaaggagagctgcaagttctgcattcagatggcccatgaaaagggcagtggatggagcaggaaagagggaacagcagatgggatctaagaggcaaaagagatcaagaggatgaaacagccaagagaagggagatgaagaacagccctgagagggatgcagggatgtcagggagcagatgttctggggacctggggggaaaggagacccccattcaggttccccagagggtagtgccgaggtgctgacaccagaactactctaaatcctgaagccagcactactcttctcaactcaccttgccaactttgatcaccttcttcaccgcatctgcgatcatgctggagtgatactcaagactgtggatatggacaggaagaaactgtgactcccccaagacacctcccgctaatttccccacctgctcctcctcacgacacccaacctctgccgacagcctcccatgacctacttaagatgccgcagcatgttggaagccgacagcagcatggccgtgggattggctatattcctgcccactgcctgggcaaatgggtgccgggcaccctgtggagagaggggcaggctagacactgggaggaggcaggaggggtatgcagaggcttaggttggaaaaggacattatgggagggggagctcaggccagggtcactgaaaagaggcatggtgggcagcgtgggggaagaacaggccaagatcacttaggaagtggagatattgggatgggagaggaatggcggacttgaggtcagaggaagggccgagggagaaagcagcctcaccgtctcaaagactgcgtattctgcactatagctctcaccagggaccacaccagctcccccaaccaggccagcagccagattgtcaataatgttcccatagagattgggcatcacaagcacatcaaactggtaaggattctgcaccagctagagggtgagatgcaggcatgaagtaaattccactccccaccctcctcctccgccccatgagtagagatgtggggaggcctcacctgcatgcagcagttgtctatgatcattgtctcaaatttgattttggggtacagttcagcaacttcctcacagcactgcaggaacaacccatccccaagtttcctgtccatgggccaaaggggacagaatcagccaagaaagtacaggggctaccttcccaggaacccatcctacacaaagccatgcccctcacatgatgttggccttgtggacagcagtgaccttgccccgccccttcttggtggcatagtcaaaggcgaactttgcaatccgctgagacttggctcgtgtgacaatcttcaaacactcaatcacaccccttgcactctgggtaagaagaaagcagcagctaggtgacactgggaagggaaacaaggagctccacctctctcccatcttcatccttgccctcccccagtttctggggcctcacctcatgttccagagagctgtactccccttctgtctgctctcgaatgatcaccaggtctagattgttgtgccgagtcatatacccaggaagtgacttcacatggactacgttggcaaataagtccaacttacgcctgagggtgggcagggccatcagctctgctcctggtgccctggcacctctcaaccattcaccccacccagaccacctacctcagccgcatatcataggaggctagctcccccttatactccatcggggtatgaatctttcctgtgaaaacaaagtgggaaaaggagtgtcagccacaggccaagcccaagggaactcagaccagtgtctaacccccttaggaacatcatgtaacccagactcccatctcccattcccacatcagtaaacttttaaattgtctctgggggcaagggacaaaagagaataatgtagttaaagccagaaacatttcatctattgcattttctgtgtgtgtgtgtgtgtgtgtgtgtgcgtgtgtgagagacacagggtctcactctgtcgcccaggctggagtgcagtggcacgacctgggctcactgcaacctctgcctcccaggttcaagcaattctcctgcctcagcctccccagtagctgggattacaggcatgtgccaccacacctggctaattttttgtatttttagtagaggcagtgtctcaccatgttggccaggctggtctcaaactcctgacctcaagtgatccacccgccccggccttaatgctttatttttagtcaacatatttaatttatgttgaaacttcaaaacggagaacagattttttctatttatcaaaaaagagcctgggtttaacaacaagttgaaaaacaatgctagcagatctgtgatctttttatctgtgccttctccttatttgacattttttaacccaacacctactgatgaatatcaattatatgtcaggcaataaggataacaactaaaaccatacaactcctgcccttgagaagcaaacggtacactgggaaagagagaaaatatgaaagacatgataagtaccatgggaaacttgcatagcaacacaaagaggaaatcctctccagtaatatcaggatacagcacagaagagctggcacttcagccatgccttgagccccagaacctatgtatgtgaccttatttgggaaaagaggctttgcagatgtaattaagttaaggatcttgagaaaaaatcgtcccatccagggctaaatatttgaggagaaaaatgataccgagacagagagggaagaaaaccacagatattggagtgatgcatctacaagtcaaaaaacagcaagagccaccagaagaggcaagaaaggtttctcccctaaaccttcagagggagcagggccctgccaacaccttaatttcagactgatggcctccagcactgtgagagaatacatttctgttaatgataagccaccaggttcatggtagtgtgttacggcagctatgggaaactaatacagtgaatgagtgagaaggactctaacaggtagcaccaaagaaagaacgttctgggtggagggaacaatataagtcaggtagtacatatttggaatctaacacacaatctagtgtgattgaagcacagaacaagagttgtggaaccaaggcagaaaattaagggccaacttataaagtactgactttcctatggtaaggctgggcctggaaaatcaggctgttctttccaagaagagatatggaagatgaactataggggcagaactagaagccaaaaaaatcaaatgaggagattaaagcgcggaagacaaaagaaaaggggcagctaggcacggtggctcacgcctataatcgcagcagtttgggatgcagaggtgggtggatcacttgaggtcaagagttcgagaccagcctggccaacatggtaaaaccctctctctactaaaaatacaaaaattagcctgggcatggtggctcacacttgtaatcccagcactgtgggaggccaaggcgggcagatcacaaggtcaggagttcgagaccagcctgaccaacatggtgaaaccccatctctactaaaaatacaaaaattagccaggcatggtggcacgctcctgtaataccagccagctactcaggaggctgaggcaggagaatcacttgaacccgggaggcagaggttgcagtgagctgagatggcaacattgcactccagcctgggcgacagagcgagactctgtcttaaaacaaaacaaacacaaaaattagctgggtgtggtggtgcacacctgtagtcgcagctactcaggaggctgaggcaggagaattgcttgaaccagggacggggaggttgcagtgagccgagatcgcgccactgcactccagcctgggcgacagagcaagaagaaacaaagaggaaggaagggaggggaaaaaaaaaaaaagaaaaggggcagctaaaagtggtattccagaaatgcaatgaataagatttgatgacagttgatgtagcctcaggacagactcagaacccctggaacttttctgcatagacagctgacatgatctctcaactcctgggctcccaatgggaaggaacaaatgtccaaataccaatggtggttgccctggagttaatataattgcatagcatgtggggagaagggcttaataaacatttggtcatttgattttaaatggcacatggacaagtggcaagagggcacacataccaatgatggccactttgttctccttcatggaactcagcacctgctccagcttctcctcagatgccatattctgcacctcactcaggtggtgctcctggaactccactgggacagcggcagccttcagagacaggttcccaaaacatcacagtcaaggccaagtcctttccaacacactactgtcctctactgtctgatccccgaggccactcaccttgaacacctccttgacggcgtgcatcagctcaggccccacaccgtctcccggaagcatggtcacgggaaaggagccctccaccctcacgtcctcggcctcaattgggggaagaggggagaagtaaagatagagctggggcgggagcacggatcctgggagtagagaagtagggagacccgggaggggtggggaaaagccaggggagggagcagcgaggaagggacagggtcgtaagagagaccccagccagattcgtgcatacctggctccgcgatgcagcgtgcgccgcggccgaggtactcagacctctccatgccccagggttcccggcggagaccagcgcctgcaacagggacacacaagcctgtaaggtcagctttgagacatccagaccccgaacactacagttgactttgccctgtttaggaaaccctaggacaaactctccgctccttcgcccgcccctgcccgacatgtcccggggcctcactcgggtcagccagcggactccgctcaatgccgccatgtttcccgcaggaagtcgcgtgggaagtgacgcctgaagctggcgcggccccgtaccccgacttccggcctgtactgagttcctggtatttctctctctgcgccaaccagcactgcttgctcacgcctgtttctcctttttcttgccggtggggaggtcatgggatgcgcaagcactttgtctcttgctttgttttcagtcgcc

SEQ ID NO: 98118 - DNA, 14124 bp, Homo sapiens
gtagccagcattaaaaaaaaaaaacaaaaaagtgacctgtaacacaaattcccagagaacttcaacctcacacctgtgttttcactctcagtgaggggaaatgcatttggggaggattattgtgaccacagagccactgtggagtaccgcataagactggggcttatgcagctctgacttttttttttttttgtactgtcacctggcctggagtgcagtggatctgggctcactgcaatctctgcctcccaggttcaagtgattctcttgcctcagccttccagctgggattccaggcgccaccatgcccagctaattttttatatttttagtagagacgcgttttcaccatgttggccaggctgttctcgaactcctgaggtgattcacctgcctccgcctcccaaagtgctgagattacaggcgtaagccaccgcgcccggccacagctctgaccttttaatgtcactttcctgggcccttttgtggcactatggtgggattcttcaagttcttgactttgaggtcctgtaaactgaaccatgaggctgactctggcagtgttccctttataaaaacatcacatatattgtttatgcgcctacctgcactaaggaaatattcactaaagcacctgacaggggaaatgacagcatcatggctaggcctgcctgtctcaggtttttgggattgcaatattactcttgacttcctatttgggaaagaaaaataattccaaacttaaccctttctgccaaagttgctcttatttcagcagtcagctggccttccttcctagttgtccatttcaactccgtacttgtcagagttggggaaataaccacagggtaagtgcaggaggtaacatttcccaaagatttcagggaatactggataactgtgattgttccatgcggaaaatttggagtatgttggaaaaatatgaggaatgactttaggtgtaatgacgtctagggtggtctccttgatggaacagattaattgggcaaatgcattcttctcttgtcctacccacctggaccactataagcagcttgccttcacctagaagcagcacaccttcacaattcagcccgagagattaacaactctacagttttgcataaccagatcctcaagacctacaccacccatctccaggacaacatgcgggggccagtcattgacatcatgcttattctagacaactggaaggggcaagaatcccgtttcgtggtaaaacatctatacttgattgggtccttcgggaaaaacttgccactcacaaattgctggtccatcctgtctatcccacaaagcctggtggacctcctcccatcttagtgaaagcacttacatttgggtgttctgctccaaatgcatttaccagctagaccccaaatctaccacccacaagtggagccttgagcaagatattctcttggtggtccaggctgcagcatgattctggcaactctcccccttaaaaccttgcagagctcattgtctgtaacagatccaagccctactaggaacttgaggtaaggatctgaagagaccctggtgttttgagcaaggccatgcccatcaggttaactatccagggttctgcggagatcaggcatcactaccctggggcatcacatgactctgcaacctggactggttgggatctgagaggctacctgtgcacctggctgcactcaatgttccattagaagcaggtacagatggcactgggtttgagttaaccctgaaggtaccagtaagctgcctagtggtgcctacaccagcaaggtggctgtgggtagagaataaaaacgtgacacttggttcccaggtggttctgcatgacataacagcatcagcagtgaatgctgagttccagccccatgctggacagcagtggaatcagcccaaagacagagcttcaaggtcagtgtgtcctctgtctgaacagacagatggcttacgtctggatcccggtacagaggccttggaaagaataaaactggaagatggagacaaggaggtccagggaggagtacgttacataaaactggacttcctaacacaggcctatgtgccacatcaccaaaggcttccaatgcaggggtccagatggcccactcttcaccatgacgaagcccgaggccatggaagacatcatcaaaccactgcccacgtgtgcccatcaggtctcactccagatgcctcgcacctaaaagcagggatgccactgtgctctggccagagttgatgctgggggagaagagctagtaccagcctaaggagggaggccaaggttctcaggagtgcagtgctctgaggagggctgggtgccaggcaccacctctgcttgtaccttattacctgctttctcacctgcaataagagtggcccatacaccctaaaaggttttcatttcggccgggcgcggtggctcacgcctgtaatcctagcactttgggaggccgaggcgggcggatcacgaggtcaggagatcgagaccatcctgactaacacagtgaaactacgtctctactaaaaatataaaaaattagccaggcgtgttggcagacgcctgtagtcccagctacttgggaggctgaggcaggagaatggcgtgaacccgggaggcagagcttgcagtgagcaagatcgtgccactgcactccagcctgggcaacacagtgagactccgtctcaaaaaaaaaagaaagaaaaaaaaaggttttcatttcttgggggtccctaggccttccctgcaaagaagtgggagacatggagagaagctggagttcatgtgcatggcagcaaacggaagctgctctggttgagaaacattcctccagctcatcccagacactgcttgagggcctgcatctgaacagggactatggatctatatactctcttcatcatcacaggtagtcccagtacccatagaggttggtccaagtgcttgctaagccacactaacctcataaaatcttggtcaaccatgtctcccctgccagcagccatctgctgggtggcccaagggcaatggcaatgccagggcaaatgtaggtcactgaggccatgggtggagagacccactcctaatggcctccctgcttttaagtcacacacctgctaatcctagcctagaatatttaattcttcatggcttcattacctgtaaggcaaaatacaacctctttgtggaacccagaaaaaaatggggtctcctctttgccttctgggtcttggatacaccagactctggccagcaaagcacagtatagagcagaggcaggcgcctggccaatggttagcttgtggctcaggtcctgggtgacacaggctagagtcctaaagctccagatgagagatcactacacttttcctgtaaaaagttaaagattttagtctttgggattcatatggtctctgttgcaactactcacctttgccactgtagtaaaaagaagtcaatgagtgggtgtggctgtgttccaacaaaactttatttacaaaaacaggaagcaggcacgtttggccctcagactgtaatcttcccatcactactcttaatgatactcagatgacctggctgcctgagggggctgtggccctgtctgattctctgtgagatggaaaccactctagggtctcctggtgcgctgaggctgtacacaccggcagaacagggcactgcgtttggaagtttctgaccaagtggtgacagcagagggcaaaacgtgaaggctgtgctggataaggctgaaccttcctcataagcaacaccaactgctttattccaggtcagggccaactcttccgccatgatacatacatggtccctggcgggcactgtccttactgggcccctaggagtccctgcgttgtggcctgaccaccagcccctctctggtgatggcccagttgtagttcttccgggagtccaatgctgcttccacccgtgcctccaggttctctcgggtgatgaagtttttcacctcttcctatcgggagagaaaagcccagctgaacaggagccttgggcacatgccagccagcccacccagcctgctggcctctcaccccactgagaaagcagctcctgctctccctggggaagcatgcctggaacccaggtcctatttgagagcccctctggcctcccagtggagtgatatcaggttgcttttccacgttcctcttttctcagacacttcagccatagccccgagtgccagctatgaaaatctcacgtcctggtaggtgaaatccgtccctcagtggtcccctctgaatcactctaactcatccttccccccattactttatttatttatttatttatttattttgagacggagtctcactgtcgcccaggatggagtgcagtggcgccatctcggctcactgcaacctctgcctcctgggttcaagcgattctcatgcctcagcctcccgagtagctgcgattactggcgcacaccacgcccggctaatttttgtatttttaggagagacggggcttggccaggctggactcgaactcccgacctcaagtgatacgcccgcttcggcctcccatagtactgggattacaggcgtgaaccaccgctcccagccacccttctatactttaaatcaagcctcatccattctcactgcattactcctaagtggtctccctgcttttaagtcgcacacctgctaatcctagcctgaaatacttaacccttcatggcttcatcacctgttatgcaaaatacaacctctttgtggaacgcagggtccctcccacagacctgctaggtacctgaacactgtccaattactccgctcacctccgggtctttgcgcctgactggcactctcctctccaaatccggacctgccaactgtaagtctctgcacatagccagcgcccgcgtcgcggtgcccagaattcccagtgccccgcaagccgcgtccccggctggagtcccaccctccggagacgttgcccacctgcagctgcagcacttcccgctccttgcgctgcgcccaggcctgcacctcttcggccttgcgggcctgctccaacgcctgccgctgctcctgctcccgctcctcctgccgcagcctcgctatcctgtgagggtcaaagggccgaggctgagcggggcccgggcttctcccaggccggccaggccgcgccgccccgccccgcctcccgccccacgcaccgcagctcgtgcagccgccggttctccgcctggttccaggccatcagctcgcggtgctcggcggcgtccttcagggccttgcgctccgccagaaccccggctcgggcctcgtgcaccttcctctgcacctcggacacgaactccatcctgggtgcagacgcgccaggaatcagcaccctctccgcccactcccaccgtcaccagcgcgcgcgggcggccacctccccccggccgcacacctgagggcgcgcacggtctggcggtagtgctggtaacgctccatcagcacgaagaactccgcagggtccaccgcgggcggcatgttcactcgctcgatcttggatttggccagcgggtcgtggcgggtcttgcggccgcgcgctggcagcaccagaggggcccggggcctgcacggggtccccgcgcccaggcggctcagcgcgcgtagcatggccgagtctcctcactgcggccgcggtgccgggacgccaccgtgccccggaagcggcgcggggaaccttgggacctgtagtcctcgggctgtccctcacgccccgcccggccgtgtggcctctggaaccgaagcggcgaccctgcggacgtccgcatcccgcccccaggctctggcccggccttcccgccagggcccggggccatcccttagttactcccgcccgcggggccggacccgcgtccctccagcccccacgcagggaagggtctcagcggggaagacagggaggggacgaaggacagaactcgacgcaacagcttcggagaacctcacactttattggaggatggcggggcggggcggggctctcgggctgcggtctgcggagggagaggtggcggtcatgtctcaggacactggtctcgtaaccgccgagctgccatcttcctggttctctcccctctcgtcccccccagtccccatgtggcctcccacagcaggacgccccccgcctcccgtagaagcctgaggatccagctagtgtggggatctccagctcccttgggcatgccctcttgtccaccctaaacaagcctgacgcatagaaacctcagcacatacacacaaatcaggcggtaagacwttgcctcataggaactaaccactttcttctttagttaccgggctctcctgatgcactgtaaatgtttgatttgcaaaacagtagcaaaccatttccccacgcctgtcttctgctatggtcttggggagctctgcagtccctgagatgttcctagtgcacatgtcagtcaccacctggtcctcttggccctgttgtctgtttgagtgaggttgcatccctcacctctttccactggcctggggtctgtccacctcaagacagtcattggcttgtcaggatgcctgtgggatcccatggccaccactgtcttatagaacaattatctccttctagtctactagtgactttggtctttaacccaagtgctttgtaaattgtctagaatcctcctgggaaataggaaggatagcagacagcaccctgctgtgtgcagtaggggcactgagaaatggctgggggtgctgtggcagggggcatctcagtggtgtttcattctccccaccctcccagcacccaaccctaagccacaatggcctctgatgaccagtggctggtcttgatgctggggacctctcaccctactcaccagcagtgtccgtgccaggtgtcgcttcctgtgaagggaccactgggccgtggtcctgccctcccagggcatgctgtcgtccaggggagccagggcatcacttgggaggccatgggcagtctggactgggctgcctgctgcagtgtccagggyccttccttagaagggaactgatgctgtcctccctaccccgacctcaggctccaggagggtgggggagcccccggccatcactttcttcctccccatgaggctgggagacacccacctgggggcctaagggcattctggggatcctgggctgagctgagggctygctttcctccagggtaccagccatgggaccagtgctgagcctctgagggtccaaggtggrcagtcagcagcagcaggagcaggaggcctcgcctggagctggccatggctgctctaatggacagggtacagcattcaaggagacttacctcacccccacatccccctacttcctccagggccactttggaaaactggcatctcaggggcagctttggtatctccttatgcccttccctctctgccaccgctcstcatcccaagcatacaggggtccagatcctgggggatcctggcccagcaggggatgatgctccaggggacgagccttctccctgagcctggggcacagaggctacctgccttgccagctctgagggccctcccacttgtccaggtccatccatctttccttcaaggagtttccagaagtggaagaaagttggaggggaacagagacctgaattcaggccaatggatgggaggatagatggatggtcaggggagttctcaatgyaggcgtgtttggagcaccagtgctagggaaccagagttgcaggccttctgcccttttctccgtggcctgctgtatctcttccatagtagttggggatgtggaatggatgagtggtattgatgggggcaagtgcttctaccccttatccctcccatgccaggggcaacaagcacaagaatagatggtagagctgttggggagaggagaggaaaaggggacttctctggcatggttcaggggtggaggcacctgggaatggggaagaggagcagcacaccatacgcccaggatgaaacttggtccaggtgtcctagcccttagggaaggctccccactcaccaaggaagagctgtggatgagatggctccttcaggcagctgcaggaccctagcctgatggccccaggatttatagaccaggcagctccacccccagactccagtgacgtcttcagaggggaagagagaagctcaccacccaacccgcttcccagagcatccagtccatgaacattcaccaggcagctgctgccctgaggccaccgacacatgctccctccccaccaccttcccaggagccttcaggcccaggactcttgctttaggctggcctatgtcctggtctcaccttcccacttcccaggctgcatcttcaagctcctgatcttgagacctagaaagccctcacagccttccctgatcccaaaagagaattgtgtcctgggcaggggcaatgcctgggggctccccaactcccagctcagggctttccctggtggacagtggaagcctaagagtagggagcctggcaggctgttcagaggtacaggggaggctgtgaccactctcccagagggcttccgtttgctcactgtagagtgggttgggtgggacaattcacatccacacacctgggaaccagggctgggtcactccagatggctgggtttgggtggggcagtacctaccccggagtggcttctctcctggcgaagaagcgggcccatgagatggggcccagctgttgggccagtgcagtctccctaggtaggtagaataattttgtccctcaaggctctaacccctccccagtcatggatttggacacagctagcctgggctgctggaagtgggctcttgcttcccagtctgcgtcagcagctcagctttccttggccagccatcagcctctgggggtcagaggcctgtttacagggttcatagccaatctccgcacttgggctgaacagcaaatgggagggccagggtcatttggagagctggtgcgtcaaatcctgtgacaaagatgggggaggggaggcataatgggcatcagtcagccctagacacctggacttcagcagccaaggcaggatgggcacacctgtgaacttccagactgacttattagcagggaccggaaatcaacgtgtggcccatttgttcagttaaattgttttggcttaaatatgcggactttgttaactgggtgatttttagggaaacatttgcttgtggtttagtgaaaatgaatctgagttcgacgtactagtttagttctggttggggtttacagaatgctttcttcaaagatgcaccaaggctggtgtacctttaaaagggggatggttgcctttatttattctgtaatttgattccggcttttcctgaaaaatctaaaccagagccaagcttcctggggaaagctctgctcccttttttttccggcaacatacttagcttttaagaaatgtttggtcctttccagactagaactgtggaactcttgtatccctctcattagaacatagaaagccatctgttcaccacggagctccagtcctcaggatatgaagtcactgcagccaggagctgcgtgtactcaggtgggaaagcagaggttcagaggtgaataaacactcaggtgctgcaggagcacagagaggcacaaaccctgagcaggcggcctgggtgaaggacagagacgagtgagctggagtcacggacgcagggagtggcagcagaggggtgcagcataaggaacaaaatggagaagggccagcaggaactgccgtggatccatggggccagagtatgtgggaaggttagaggaaaggagggcgggcccctgggtgtgggcagtgggaggcaggcatctctggaccaccctgacatgcgaccaggatgcgggggacttgggattggaggagagctgagggtccacagagacagatccagaatcctgacctctgagagaggagacagtggaggagcagctaaagggtgaggataagaggcagaggacagcctgtgacacaaaggggaagagaccatgggtccctggtgtttagcaccaaggtgaccttggtgcgcagggatggaaaagaaatgtgtgggaatgaagtgaggaagggggaagagtgagaacacaggtttctgcaagtagtctctcatagagggaagaacttaggcctggggtgggagacatgctctttatttaattaattaattaattctttttctttttctttttttttttttgagatggagtctcgctgtcatccaggctggagtgcagtggcgtgatctcagctcactgcagtttctgcctcccaggttccagcaattctcttgcctcagcctccccggtagctgggattacaggcacgtgccaccacgcccggctaatttttgtatttttagtagagatggtttcaccatgttggccaggctggtctcgaactcctgacctcaggtgatccgtccgccttggcctcccaaagtgctgggattataggcattagccactgtgcccggcctatttttttttttttttgagacagggtctcactctttgacccaggctggagtgcagtggcatgatcacagctcactgtagcctccacctcatgggctcaggtgatccttccacctcagcctcccaagtagctgggactacaggcgtgtgcctccatgcccagatgatttttgttattttttgtagagacaggatcttgtcatgttgcccaggttggtctcgaatcctgggctcaagtgatccacccgccttggcctcccaaagtgtgggattacaggtgtgagccactgcacctggcctgctctttatttttaatgagagagacttgagtatttgggacaggggagcaatgaaggaaactgcaacccaggagggacccgcccaaatgaagtgaggtctcagtgtggcaggatgtagggctttgggtgtgtggtgggtgcaggctgttactcttcccctatggagaaacactcctaccctaagccccttgggtcgcaactgactggctgtgggaagggcactggatgaagcagtcactgctgccttttccacacgactgtgctgtgtgagcttcagcacattttccttttggcctatactagtttctgttgggttcacctctcttgtaaacatgcaagccccgagtagaaagtaaaagaggagtgaagagggaggcatgaagggatgagggacacatctacaggctgagcgagacacggagcaaacagctgaggtcattcctacctggagacaatggttttgcacccaggtgatgcctatccactggccaaatcagcacggacttcagcagaaaaccactcaggccatggtggcgcaccctgctgaaggccagccctggcaatggcaggcagcctgctgggaggcacacaagcgcctatgaacggcctcacctgcacattcactgagtggcttgctgacccagtgcctgccctcctgcatcgacttggacttggtcacacagagcactgaagggtagcttgcaaggagccaggggctgctccccaaacttggcacccctcaccagaaattcctcagaatctgtctttgcctaatttatccatacttatcgagactgctgagttttaagtttactgcctcttgggagttcgttagttcctacagaactgaatgtctctaatgactcacactcacctcctgtaaacttccagagggggtctgttgcagcccttgcctcctgcaggtctcctgggtcccttccgcacatctccttccttcccacaaacatcctgggtatgtggtgcacagacaggcttccctcctggagccactacatgttaactgctttatctggactctgaggccctctgtaatgtggctctacttcgcctttcctccttttcactcatctaaatttccagcctcccatgggtccagctcaagtcccacctcctccaagaagcacagtagtgctgatccctgaacatgcctccatgggccaggctgaggtgccatctctcactccagaagcctctgaggagcccaggcctgcgctggctctcaagaaaggccctgcctgacagccacagccacgagttcactctcctgctcctgtggtgagctgctctgaggctgggaggcagtggacagacccactctcccagtgtgcccccaacaaaagatcacacttccccagcactccctgtagttaggcatagctatgaccaggtgaaaacctacttgtgaagctgatgagtggaatgcggggtggattatgagtggaagtgaaaagtgcagatttggcttcctgtccttagaaatgaagctgctggctctccatgctctttcctcagggtggattatggacatggcagtgacccagcttcaaccatgaggatgagaataatatcctaaggatactgggtctctggacagcacagactgttacgggagacataaatgaacatccagcttctttaagaaacaaaagttcaacacttttgtctaacatgtcactcaaaaccaagttcggatctaagactcccaccatctgacttctagatctgagaaacattcacactgtcccagaaatgaggacacgtatgaaagaaaatgggaacaattcaacacaatatatgtggacataaagatttatcctagatagggtgacacaatccagacagttttgtagcaaagcaccacagactggagaggtcagactggcctcagcccaaagctgagccagctctagtctcccctgtgcccctgtccttaaggagactcagtgaggacctggccaccttcctagggagggaggctggccaggaccactaaaccaaagatgtgctgggaatgaaaggagggtcctggagatcacctaagaactggaagggctgtgtttggtggacaggaggagctgggggactgtggcctctctcagataactcagagagaacagcaacaggagggccatgaacagccgaggagagccccagcctgtatggctgccccacccccagacaaagggagagacatttcctcagggagtcaaagcttttattacctgatagtccctagtgtggtgccagagataccgctctggtcctattactccccatgatatcagtggtggggatgggggaggggaccagggagagaggggagggatatttacagtgcatggtggtacggggacaaccactttcctcgagagctctgagaactttgtgctttttttcttagttggtgccgagctacctggaatggattttgtgtttatcttctttagggaaagatgtattaaccaaagcacaatccagcccaatttctcggctgaggatttcacgatatcaatccaaacatcacactatttaattccccaataaaacattggaaaaaggactatcagtgctaacacatttacatataaaatttccacctaataggtaatagaagcctatgtaccaatttctaaaacagttataagatatatacacaatttggggtatattaacaaaacagaatattacaaaatattaaaggcaatcctcctggtccacggacccttgttgccgcttacttgaagttggcataatctgagaatgcatcaatatactcctgcaccaccttgtagcagaactcatactgttcctggagagtgaaaggtagggaaaaagtcagggttactgaagaacacacagtacctgtaattcctaacagactcatttttttgttgaagatggaaaatcaagaggaactgaatgtttttgaactttcacctgagctctgatctgcctgccagagttctgacagcattccccttccgggctgaatgcagcagaccttctacaagcagagctgaccagagctgacccaggccccacagaggtcagacaggcatgtgctgggctgggagacagtgcagctgagcatggcccacgcttaccatggctgccaggctagcatgcaccctggctctcagaacctcgtctcccaaacctcctaacattcacttttctttaccccccaaacatttctagctccatgggattcaggaaaacctctgtggatgtgcggcttattaaagtc

SEQ ID NO: 98119 - DNA, 17869 bp, Homo sapiens
  misc_feature (1)...(17869): n = A,T,C or G
gtagacccacattcacagcagattattcacaatagccaagggctaccagcaacccaagtgtccatggaaagatgaaatggataagcaaaatgtggtagatgcatacaatggcatattattcagcctcgaaaaggaagaaaattctgacacatgctataacatggataaatcttgaagatattatgctaagtgaaataagccagtcacaggaagtaagtgctatatgactccacttacataaggagtctagagtagtcaaattctgagacagaaaacagaatggtggttgccatgggctggggggaggaggaaatggggagttgtttgagggtacagaatttcagttttgcaagatgaaaaagtcctggagactggttgcacaacaacgtgaatatacttaacactattaaagggtacactcaaaaatggttaagagagtaaattttatatcatgtatatttaaccacaattttttaaaatgttctttttttttttcagcctcccaagttgctgggattacatgtgcgtgccactacacacagctgacttttttgaaaaaaaagttcatgtttatgtatcaaaaaaacaaaatgaaacaaaaatataactacttaaatagttgccctcccttctaaaaataatttcaggagtatataatgtatcttaactctcctttcttttaccataagatgcttcttagtacctgaaactcaatgtatctagaaccaagctcacctccttccctgccaaactcacgcttcctttctcatgattttatttaagccccaaatccaagtcatccttgattccttgctctccttcctccccaccaagtgcagtcattacgaatttcttccactttacttctaaatctctgagactggccccttctctccacctccaccatcaccaccccagtactggccatcctcaactttttcctgttctgttccatcaggctcctaaccatctcccttgcttccattttgcttgttccttccaacttttccccagcattgcctacaaaaggaacttaaaacacacacacacacacacacacacacacacacacaccccttgcaaatccaattacatcaaccttttgttaagatcctttaattgaggcttcccatcgttcttcagataacggtgatctacacgtccctgcagcgtgtgacccctacacgaagggcatcaacttcatccatgtcctgttcttgttgcctacagcactccagccacactggctctctttaggtcactgtgcatgcctcagtccttcctgcctcaagacttttgtgtatatgctcttctccacctccatcccacttcatgcacctacatctactcatcccctggatagggtattattacttctttcagagtgtcttctctacctttgactcctggagtctgtaacatgttctcttaggttatttgctactatacctctctttatagtgattatgatcaaacaaatactgagtgattatcaactgtctcgcctgctggctgtaagctctatgatggcaggcagaactcttccacatctgttttatcatactggctcagcctgccaaagggatgggacaaattaattaattagattagcccaagttgcatttttaggattaaaaaaatagcttaacttctggagtcccataagaactggtcaccgtttctcctccttgccttcccaaattgagtgggttctccagaatactactcccaatacaaaagaatcctgtcaggcagataggacttgaaatgtaatgtctgccacctgttttatcattcattcactgactcagacatgtatcaagtcctgcctatgcataaagctatgcacacatatgaacaaaactaagtacttgctcttaaagcatttccattctggtggaaaaggtgaaacatgctcttatattttcctgttaacctgcccgcccccaaaaccctattttttaacagaggtctagaacctgtttgggttcaaagcctgactccactactcaatagctgtgtaacctggtcactagttgtataacctggcctctctgtgcctcggcttcctcatcagtaagatggtacctacctcatgggattgtaaggcttaagcaagttaaaacacataaagtacttagcatgtttagtacataagaaaggctcaatagctgttagcaacttaaaacataaatatcctccccagcaagccttagacccctaatcctttctggcagtacagcacaggtaagagtagattaatcattcagattgtgtctgtggcatgcacccaacacatacattcttttaaaaccttattaacatgtcaacaaagcaaagactacatctgacaaataagagctctgtggtaatgaggtcaatgtctgcagtactctttgatttaataagcctgggtaggcaacaggtatcttcaaaataatacaagtaaagttgatattttaaaagtgaatgttgtatcaactagctggtgtgtaaatactaaatgacatggctaccttggtcagctgaaattccttctccacagaaacaagttgaaatcatttcctactgcatttatggatttttaatgaagtttttgcaattttttcatactgcacaggcatatttcttttcttttttttttttccccaagatggagtcttgctctgttgcccaggctggagtacagtggtgcgatcttggctcaccgcaacctccgcctcccaggttcaagcaattctcctgcctcagcttcccgagtagctgggattataggtgtgtgccaccacgcccggcaaatttttgtatttctagtagagacggggtttcatcatgttggccaggctgatctcgaactcttgacctcgtgatctgcctgcctcagcctcccaaagtgctgggattacaggcgtgagccaccacgctcggccaattgcacaggcatatttctaagagagaattataaataaacaacaaatgcaacaggtctctaaaaactgccacagggcacttgtccatctaggaagtatatcacattaggtaccaaaaattacatttaaaagttttaatatgtcagtgagaatggtatacagtttcattagcacaaacaaatgtcttctatttaagtaagacccccatgcaatgtctttgtgatctttacttgcaatccataacatatatctatctatctatcgatagatacatctatctatctatcgatagatacatctatctatcgatagatacatctatatgtctatctatagatagatacatctatatgtctatctatagatagatacatctatatgtctatctatagatagatacatctatatgtatctatagatagatacatccatatgtctatctatatatagatacatctagatgtatctatatatatatagatacatctatatatctatctatatctatctatctatagatagatatagatagatatatctatatatagacggagtctcactctgttgcctggactagaatgcaatgacgctatcttggctcactgcaacctccgcctcccaggttcaagcgattctcctgcctcagcctcccaagtagctgggattacaagcacctgccattatgcctggctaatttttgtagagacagggtttgaccatgttggttaggctggtctcaaactcctggcctcaggtgattcacccaccttggcctcccaaagtgctgggattacaggcatgagccactgcgcctggcctaaaataatatttttaatttttcagagggagtatgctatgttgcccaggctggagtgcagtggttattcacaggttctaacatcggtccctacaccctcaaacttctgggctccagtgatcctcctaactcagcctctccagtacctgggactataggaacatgccacaaagctcggcccagtaaaatatttttaaaaannnnnnnnnnnnnnnnnnnngatagatacatctatctatctatcgatagatacatctatctatcgatagatacatctatctatctatcgatagatacatctatctgtctatcgatagatacatctatctgtctatcgatagatacatctatctgtctatcgatagatacatctatctgtctatcgatagatacatctatctgtctatcgatagatacatctatctgtctatcgatagatacatctatctgtctatcgatagatacatctatatgtctatctatagatagatacatctatatgtctatctatagatagatacatctatatgtctatctatagatagatacatctatatgtctatctatagatagatacatctatatgtctatctatagatagatacatctatatgtctatctatagatagatacatctatatgtctatctatagatagatacatctatatgtatctatatatagatacatccatatgtctatctatatatagatacatctagatgtatctatatatatatagatacatctagatgtatctatatatatatagatacatctatatatctatctatatctatctatctatagatagatatagatagatatatctatatatagacagagtctcactctgttgcctggactagaatgcaatgacgctatcttggctcactgcaacctccgcctcccaggttcaagcgattctcctgcctcagcctcccaagtagctgggattacaagcacctgccattatgcctggctaatttttgtagagacagggtttgaccatgttggttaggctggtctcaaactcctggcctcaggtgattcacccaccttggcctcccaaagtgctgggattacaggcatgagccactgcgcctggcctaaaataatatttttaatttttcagagggagtatgctatgttgcccaggctggagtgcagtggttattcacaggttctaacatcggtccctacaccctcaaacttctgggctccagtgatcctcctaactcagcctctccagtacctgggactataggaacatgccacaaagctcggcccagtaaaatatttttaaaaaactttaatgggcaattattacatagcaagcactgttctaaatatgcactggtgataaagagaagcaagaaacatgcttttggccgggctcagtggttcacgcctgtaatcccagtactttgggaggccaaggtggatagattgcttaaggtcagaagttcaagaccagcctggccaccatggtgaaacctcacctctagcaaaaaatacaaaaattagccgggcgtggtgacaggggcctgcagtctcagccactcgggaggctgaggcaggagaatcccttgaacccgggaggcggaggttgcagtgagccgagtgcccctgcactccagcctgggcaacagaggaagactctgtcaaaaaaaaaaaaaatgctttcagccctgaaggagcctggtttagcagaagaaacctatacaaatgtcgcctaaatatacaaatagaccatacctaaaagaccctagcactgggcccagtgaggcccacaggattctattgggggagaatcaggcacagttccagaaagaacccttgaactactaagtcctgaaggatgcgcaaaattcttcagtgagataaagagagaaatggcagtatccacagaaactgcagactggttagggccttgtaattctgcgcagctggaacgcaagatttgggtaggagagcggtagatgaggttggagagacaaacgggctgccttacagatagacgttccacgagaagttcgtagtttttcctattagggaagctatgggaaaatcctaatctgggtaacgatgtaacgggtttacactttagaaaaatccgtggtttaggactctacaactcccatgggcgggctgccctaacccaggggttcccacttccgctgttccgggattcacggacgactcgcccccttttcccagccttggtcagcactgttaccccgcccgccgtgcgatcccgcccccctcggagcrcccctgtggtctgacttcagcagcactttccggcaggagactgggcactcgctgtcacccgcgagctgcctccctcagcgagatctgagcatctttccggaggctaacagacctgggcttcggggtgaccactgtgcttgcctcagtttccttttctggagcaggggaaggcccggctccctgcccaaaggcggctgtgcgctaagtggcagacrctcggggagagccggcgcggggcggaccccagcgccagtagtgacaggggcgaacgccgccgggagactccagccggcgggcgagcagggtaagccaggccgtgggcgggagggcggggcagctcaccggtaaaaggcagagtccccgagtgggttccagttcgccgtgtagcagtccatggctggtgcagacggcagctrggaagcaccgaggggacacccacctagagcgggctccaggccggcacttccgcttccgcccgtccgggtcacgtggcgaggccgccgccgcggccatcaccactgtgggcagcctcacttggctgccgccccgagaccccagcccgtacctgggcttcgcgcccgccaagtgggcccagccctggctcctgcgccctgtggcggccacctccatcgccttgctttcccttcgggcactgggggtcgctcagggcgrgacatgggtgaacggaagtggaagctgtgagcgtcgcagcccgaggcgccgaggcctgaggcgccgtcggggccacmgcgacgctcgcatggagagcgctgggcgctgggctgtgcaccgacggctaacctggacccacggtctctgcggggcgggagctttgcagaaccgactggccgactggggcgcgggaacatgaggcttggctaggagcccgctgcgggccaggcgcgcggtgcgcaggcatacccgggtcgcgggtgaacaccgcggagccccgggacttggtaattggcgcgagcgggtgcgcgcatgcgcgggacggcggcgggcacgtggcgaggcgyagggcggcgccgcgcgggaagctccccagtgccctggaggcctgctggctggacgaccccctgcctctggtaccaagtgtgaccaaggctggcgccaccatggctctgctgccgtcacctcctccctttagcattgagcagccccggaggggctagccctgaggctgacctgcccagagtccccaccatcgcgctgcttagtggcctctccctgcagcctgtcgttgctggtggcggcatggtcttctgtctgtcgagcgaggagccgcgccgcccgctgcgaagcgacatggtccacttccakgcctcggaagtccagcagctgctacacaacaagttcgtggtcatcttgggggactccagtgagtgcctcttctagggtgacgcttccagtcccacaccttgcagcccgttcagtgtgtctggaccatttgtttccatctcacatctcttgtctgtcttctggtctgttccgtccagtaggttttctctttttatgtcccacacatcttccacaggagtcctgacaggtgtaataacctgtgcacyttttagcccatccttgctcagcatttctcgccckgacagctccccataatttccatcacgaaagcgttgcattgtgtagtgtgtctcctgggtgacttggccgacttaatttctgccaggtgatcttgggtcactgtatactgctggccaggaggcacacagaacagaggcaatgccaggactttttaacctcatcttttctcctgcgtctaagtcaaccacagagctggtgtcgggcacctcagccctgggaaaatggggtcctggacttggaaggagctggggcaggctgaggtctgcctcagccttgggatctctgtctcctcccagttcagagggctgtgtacaaggacctggtgctcttgctccagaaagactcactgctcacagctgcccagctgaaagccaaggtgagggaagcttggtggccatgtcagtggtgggtgggcacagaccctggcctggcagggttctcctccctggcatgggtctgaccagtagggtggggggggtgggtagggggagctgagctttgaacaggaccagctggtggctgggggccagctgggcgagctgcacaacgggacacagtatcgtgaggtccgccagttctgctcgggctctggccaccaccttgtgcgcttctacttcctcactcgtgtttactccgagtaccttgaggatgttctggaagagctgacatatggacctgccccggacctggtgatcatcaaytcctgcctctgggatctctccaggttggggcgagggaaaggggaatactggttggggctggaagtacggctgaggcagtccacccttgtgctcttgcccaccctgtgtgttatccaacagatatggtcgctgctcaatggagagctaccgggagaacctggagcgggtgtttgtgcgcatggaccaagtattgccagactcctgcctgctggtgtggaacatggcgatgcccctcggggaacgtatcactgggggtttcctcctgccagaggcaagtgactgaggcccatcaggacaagagatgggatagcagactggtagataggacaccctgctttcagaccctgctgcgttctgtggctcttagaggctgcactttctcacttagctccagcccctggcaggctccctgcggcgggatgtggttgaagggaacttctacagtgctacgctggccggggaccactgctttgatgtcctagacctccactttcacttccggcatgcagtacagcaccgtcatcgggatggtgtccactgggaccagcatgcacaccgccacctctcacacctgcttctgacccatgtggctgacgcctggggcgtggagctgcccaagcgtggctatccccctggtgagccctaccataagtgggggggtagtgatgcactggggccctcagaggacagggctcagaaacagaatgggacrcagccactcaagggaagtagaggtcccttgaaggactcctgtggcttctgcatgcaccttcctcaacccctgaggagggttagatcatcggagcaatattcttgtccaagttccagttttctacagtctggctgtgtagtcatttctgtgtgcttgaaggagcttgtacaagtattgaccacataaggcagcatgttgcaagggtcctacccaacagattaacaggaaagaaatggggcatgggtgtgaggagtggaaagacagggaggaagggccatccaggcagtgtggcagaagcaaagaagcccacagctggggggygggggtacagtcaactggcagggtgtggaacagggatgttgcatcgggaaggccagccttatggacttgggctcaatggacagtgttccataggcttcttagttcagcctcagagtcccactgtgactggtgcagcttggtgtagctctcctcgggccccatctctrggcctttggtggaggcttctgagggccccactcccccttgttttgaggcactgctccccatcacatctcaactgtaacactctgctgcagaacctctgtttccatgtcaacaccctagtccctgcatgcacacaaagagggcaccatggctgattgtctccatggctgcttctcccctgcatcgtgtccttaaagggcaagtttcctgctgcacttgttgacgactcacccctttcagccccagtgtctagcacaatttccctgtacacagtatcaacagaattgtatttgttgaatgggaggcacgagtcatgttagaaggccgattatggcagcacaagaggatgtgggggcacagagagtccaggaatatcatagagacagacctgtaacacttggtagccaggagttggagcatcagggaggtgaatacagattttggttaaacatccccattttcttgtttagatgtaataattgatccccagcaaatgatgggatgccctgaaggttgtaaggctagttttgatggcttaggcctttgaaatccaatttggagctacagaagttagggccatgaaaagggagagttgatttggggtggaaggatgagttggtgagtttggtcacagcagattgatttgaggttctttggaaatacagagtagatttgcagtcattggtacccagcagagagattaaaactgagggcacagtggcagctgtgagggagacagaacgatgctcatgctttggattggcaggaaagaggggctatggcggaaacaaaaggagatgagggcaggggcacttttaggaaggactgagrctgctggcagtgtcacatgactgttgagaagaagggaatttgttagcaagtggttacatttagtaggaaaagtgttgagggcatgggtttggattaaaggagggagtgagcaattgaggaggaagtggaaattgggcaaaacattccttttggaagtttggatggtaaaaggaagttgttggggaagggaataacaggatctttatgtttggcttatttactggtctatggggaggaggtgggcgaggaaaaagctagayacaagacctgggcaaacaaagaaggctctggagggaagtgtaggttagaacaaaggtaagtctgagaggtaagagagaaggaacacactttgggcttggcctgaaatgagagggaatgaggaaaactgggtagagggcaaggatgctccagcctggtggctctgctctccaagaggaaggaatagagctttagaagtgtggatggccagagttcagggcagcctggctcccaagcctacctaaaacaaccatcccattcctagacccgtggattgaggactgggcagagatgaatcatccattccagggaagccataggcagaccccagacttcggggagcacctggccttgctcccacccccaccttcttctttgcctcctcccatgccttttccctacccrcttcctcagccctcgccacctcccctcttcccacccctgccccaggataccccttttttcccaggccagcccttcccaccccatgaattcttcaactataatccagtggaggacttctcgatgccaccccacttaggtaggtgcttctgcagctcccccaccctcttgtacctccccttacccagcctcctatgcctaggtgagctgagaggagttgggtagctccttgtgcccctagcactgggtttggtcacagcagtccctgagtctgaaacatcatctgtaggttcattaatcagctcactggttgtcactgtttcaccgtctgaaggtaggggaaggactatcccttttttgtagatagggaaacagagaagctcacctggaggacaagagttgcttcaaggcagagctgcactcactctggccagaagcctgctcttayaatgactggttcttttgtaggatgtggccctggagtgaactttgtgccyggccctctgccacctccaatccctggccctaatccccatggtcagcactggggcccagtggtccaccgggggatgccacgctatgttcctaacagcccctaccatgtgcggagaatgggggggccctgcaggcagcggctcagacactcagagagactgatccacacatacaaactggacagacggcctcctgcccattcggggacatggcctgggtagactggatcttgggctggractggatgtgccaatggcccttcagggcctgcctggcacctcaggtactgggctagggtgtctgctatgcctggtattgttcttgtccattgctgtyaccaataaaggcatggaagaacagagtgacaaattcctgtgtgcagtgggtatcccaaaccatgatcttaagattgggggaggttgcctctgggctttgtccaacgtggggcctttgaccccacactatttagaaatcattgaatgtgccctcctgtctcatacttaattctaccctcaccagaacatgtgtatttaacagagatcctggaggggtcccctattgtcagcacgttggggaaaaatcaagggctaagtggaaattgttaatattttgtatggaattttgggtctggctagttcttacctatacctcccggtctcatgcattcatgtgtatattcgttattcatctacctccaaagatacgaagatgcataaacttatcttgcataattcttggcacatagtggacacacagtaagtggttggaatgaaactagaagctcccaaacccaagtgggagacgtattcgaaacttcttcttttttttatttttgagatggagtctcactcaggctggagttcactcactgcaacctctgtctcccgggttcaagcaattctcctgcctcagcctcccaagtagctgtgactacaggcgcacaccaccacacctagctagtttttgtatttttagtagagaagagatttcaccatgttggccaggatgaggtagatctcttgacctcgtgatgcgcccacctcagcctcccaaagcgctgggattacaggggtgagccaccgcgcccggcctctattcgaaacttctaacttgattgatgagatgtgcagtggaaggaaagagaacacagaccaaccgctttggtgctggtggtgagacaaaaaaggagctgagggagacaaaatccaaggtgggtgccaggataggggtggtggtagagacactgttttaagctccatgcagaagttgaaagcagggaggtataggatttcagctttaacaggtagtcttgatcctaggttcatgactgtacaaagaacgtcagtagtggagtgtgaactaaaatgtggggtggtgtgagggatggagcatggcagtggactgataagtgatgtgagggcagaaatataaggtaacatgaagaccccgtaaataattttgaattagaatggatagaagagaaggatgcagaattcttgtattaactttccatacttattaatgaaattttaccttgttgaaggacataacatctcacacaaaaggagatggaaatagcagaccagaaaagtgttgatccttgctagccatctactagactaaatgcaaatgaagggaagctaatgaatcaatacactggtgctggaaactgacacagacaatgtgacttaataaaaccctttagaggaaccaaatgagacagtgtacaaaagcgtcagcacagttctgaaacttttaagttcagctttctctggtataaacaaaaaggagaagggacatacaaaaatgaaggaaagcttcttgtgagataagatttttaatcattatttgcaacatttgattttttaaatttattttttcacttttttttaaaatataaaaacaaggtctttatatgttgcccagactggccttgaactcctaacctcaagcaatcctcccaccttgacttcccaaagtgctgggacaacacatgtgagccactgtgctcagcccccaaattgatttttttcttttctttaacaaaaacccatccttggggcagccgtcttcagctgtatccagtttgcccaaccccttgtcactctgcctttccttctcaaaacacttttctctcttcagacacctttgtgcctctgattctggggcttcctgatattgctggagaaaactgtacacctggattgatttgcaggaaaaagtaatttgagtgacgcagcctcagtgagatctctgttgttttccatcctgttctccaggaatcctgtcaccttccctactgagccaagccaagcctttttcacttgcttcaaatcccatcccagttctggagctttcacactaagaaacctggagactcctcaaatgtgctcaatatccccttcattctactgccatacatatgtatttatatatatacatatatatattatgtatactatatgtatatataaaaatatatacatatgaatataatttataaatatatatatttattatagaaatacattatgtttatataaatataatgtataaaaatacatatatatacacacacatacgcatagagagacaaggtatctgttgtccaggctggaatgcagtggtgccatcacagctcactgcaacttccgcctcccaggattaagtgatcctcccaacctcagcttcccaaatagttgggactacaggcacacaccaccatgcctagcttattgattgaatgattgattggtagagatggggtgtcacaatgttgcccaggcttgtcacgaactcctgggcttaagtgatctgcctgcctcagcctcccaaagtgctaggattataggtgtgagccaccatgcttggccctacctccatatttttaatttccaacccatttttctatgtggctggcatggcccacggtgaggtttcataacctttactgcaatgtcccaacacctttgtccttaaaactttcttacattcctttaaaatttatggaaatagcttaatctctttaaacttgaaatttatcataagaatagaataaaggggccgggcgtggtggctcatgcctgtaatcccagcactttgggaggccgaggcaggcagatcatgaggtcaggagttcgagaccatcctggctaacacgtgaaaccccgtctctactaaaaatacaaaaaattagccaggtgtggtggcgggcgcctgtagtcccagctattcaggaggctaaggcaggagaatggcgtgaacccgggaggcggagcttgcagtgagccaagatcgcactgctgcactccagcctgggcaacagaagtgagactccgtctcaaaaaaaaaaaagaatagaataaaggaggtaaatgtttctcagtttgttgtcatataagcatatggtacaaaaagcttaaaaatttgactcatctgttgtagattttattcagtcccgactgggaagcaagaaacttacaaatagccttatatgagtcatcacttatatgagtcatcacttacatttaaatcgtttcccttttttttcctttttttttttttgagatgtgaaaataatggaaatcttaagttgccctggtatgtaggcccactatttgctagttaagcaagagagaactcaaacttcattgtctcaaaaaccattcacatttgaccattgacagatcatttaagaagacaatcttacattgacttcctctcattcatggaattggttttaaagaatggactctgtgtccattcatttgccataccaaggtattcctgaaaggagtaaaagatgcatgagcacttcagttgtgatgtcagcacttattttccaggaaaaaaaaaattctctttaagaaaagtaaaacttcagccaggcgcagtggctcacccctgtaggccaaggcgggcagatcacttgaggtcaggagtttgcgaccagcccaaccaacatggtgaaaccccgtctctactaaagatacaaaaattagccagatgtgatggcgcatacctgtaatgccaagctactcgggaggctgaggtagaagaatcgcttgagccgggaggcagaggttgcagtgagccaatatcatggcgctacactccagtctgggcaacaagagcgaaactctgtctcagaaaaaaaaaaaaaaaaaaaaaaaagccaggcatggtggttcatgcctgtaatcccagctacttggaaggctgaggtaggaaaatcacatgagccagggaggcagaggttgcagtgagctgagaccacgccactgcactgcactccagcctggacaacaagagcaaaactccgtctcaaaagaaaaaaaaaaaccccaagaacaacaaaaaaaattagccaggcgtggtggcgcatgtctgtaatcctagctactcaggaggctgaggcaggagaactgcttgaatctgggagacagaggttgcagtgagccaagatcgtgccactgcaccccagcctgggcaacagagcaagattccatctcaaaaaaaaaaaaaagtaaaacttggccaggcgcagtggctcacacctgtaatcccagcactttgggagcctgaggcaggtggatcacttgaggtcaggagtttgagaccatcctggccaacatgatgaaaccctgtctctactaaaaatacaaaaattatccgggtgtggtggcacacacctgtaatcccagctacttgggaggctgaggcaggagaatcacttgagcccggatgatggaggctgcagtgagccaagatcacgcccctgcactccagtctggacgacaagagtgaaactccatctcaaaataataataataataatattaataataataatatcggaagtttcccagcaaaagtagataacttgccttctgttgcattacccagttccctgcctaggttctgtgttcagtacagtattgaagtatatctaaacaggtacatcagtgaaagataaactctgattgcaaggaaatgagcctattctttaaaaaaaaaaaaaacctgcttgggccaggcatggtggctcacacctgtaatcccagcactttgggaggctgaggcaggcggatcatggggtcaggagattgagaccatcctggctaacgcagtgaaaccctgtctctagtaaaaaatacaaaaaattagccaggcgtggtggtgggcacctgtaatagtcccagctactcgggaggctgaggcaggagaatggggtgaacccaggaggcggagcttgcagtgaaccaagattgcaccactgcactccagcctgggtgacagagcgagactcctctcaaaaaacaaaacaaaacaaaacaaagcaaaacctgctcagccagatgtggtggctgacacctgtaaactcagcgctttggaaggctgaagtgggcggatcacttgaaggcagaagtttgagaccagtctgggcaacaaagtgacacctctccccaccttcgactctacaaaaaataaaaaattctctagatgtagtggtggatgcctatagtcccagctacatgggaggctgaaacaggaggatcacttaggaggaccacttgagcccagaagtttgaggctgtggtgacccatgattccaccactgcactccagcctgggtgacaaaatgagaccctgtctctaaaaaacaaaacaaaaaccttttttactgaagtgggattgacatgtaatagacttcacatacaagtagatatatatatacatctatgaaatcatcacaattaagataatgaaatttattcttctacctctttataattcctccctctcattcctccccatagcttcctcatatccccctgctcctgtccccaagcaatcatgggtacttactgctttctgttactatagatcagtttgtattttctagaattttatatggatggaatctttcaatagatacttttttctttctttattattattattattattattttactttaagttccaggatacaagtgcagaacatacaggcttgttacctaggtatacgtgcaccacggtggtttgctatacctatcaactggtcatctaggtgttgagccccgcacgcattagctatttgtcctaatgctctccttcccctcgccacccacctcctgactggccctggtgtgtgttgtttgcctcctggtgtccatgtgttctcattgttcaactcctgcttatggatactctttttttcatctggcgtctttcactcatcctaatgaatgggattaatggaacaactggaaattcatccatgttgtatcaacaatttattcctttttatagctgactagtattcagttgtaatgatatatcaacatttctccattcac

SEQ ID NO: 98120 - DNA, 28749 bp, Homo sapiens
ttgattcaatttcaggaggttgtagctaggccaaaatcctccacttcctctttcctaaatactttttccccctctcctaattatatggctttgcattgatttacatggatttcagctttcaaaaattattggtctttgctgaatgcaaataagcaaatgggaaaattatattaagtttgcacaattgatctttcatcatttcaaatggtacctttgaacagttcctgaaatgtttgtctgaaatactcccagcgttgagtgtcatcaagaggcgctgggtcactctggggaaacccattctcagtgatgtaaattacagggttattatatgtatcctaaaaaaaaagaacagaagttttattccaaacagatgttttaaaaaaagaaagctcataaaatcaggtacattaccctctatcttctgtaagctacaaccccaaaactagttttcatcaaattgcactgaccctattaacttaattttccatgcactgaccttttataactaacaatggaaacgcaaaactgtgcaaatgtccatgaagacagtcaaatgactcttattataatgagaagacagaaatatctttcttccatcagcatctgttgattgtcactgctccttaacccctcagtcctgccagtagctacattctacatcccccataggaggggttctgaaaacctgtaattgaaattttaattttagctaactggatgtcatccactatagctgagactcaaaaaaaggatccaactatctcaatccttaaaatgtcttttataatcatagttgtgacaccagattgaaaaatatgtccaaattacttctatagccacaactaactttaacaacaaatcctagactttgaccactgcttttgaagcctttaccggctagttacccctcatcaactcaaatcctaatctgctcttcccaggccagcaaatgtatatgctattacctaaagtaattcttttttcaggtccatatatatatatatatatatacatatgcctgtcttgcccaccttcacataattgggtgtacatggacacacaaaaaatcatgcatttaccttaatatatttcagtagtttacatactccccatggtaccacgtagatccaatccacatttttccaagatggatctggaaaaaattcaatttccgcatcctggagaatacctagttctcctttcttgttctcctggtacttgattaagcgagttgtataatattgcacagcaaaaaaatcagcagtgcctttgatcattttcttctcttcttcagtgaattctggaagcctcgatgatggatagccttgcttttgactcatggaggcaatctgagacttgacaacttcaggataatcaccatcgatgaatatgggtttagcaaataaatccagatggaaagtgatggctcttttagcagcttcctggtcagacactgagttgggatctgctggttccaaccagaccgcaaaaagtgatagagacaccatacctttctgcttttttcgaaataaggaatcatagctgtgccaggatctggcatgagccttaatcaaattatgagctgcctgataacctccagtcccaaagtgagggatacccggaggaaacatacctaagtcatatgacatcacagaaagaacattagcttcatttatggtgatccactgcttgacacgatccccaaaggtactgaagcaaaactgagcatatttgtcaaaggattcaatgattgcctctgacaaccaacctccttggtcttctaaagtctgaggcaaatcaaagtggtagagggtcacaatgggagtaaccccattttttaacaaatcatcgatgatcttgttgtaataatcaattcctaggaggaaaaagaaagtgccctaagaagaaaagttatttgtagtatattggcaataaattttaaaagggagaatatcaaaaacaattttctgaatgacttttattcaaaacaagttttactacttccttgatataatcaatgaaagactgagaggaaacactgagaattccaaagaagagtagttgatcaggaagtaggagtttaatggggtgacatgattgaaagataaacgtattgaaatggatacatttaggcagatcgctgttatctaactttgtgttattttcatacatattgaaatgatttcatgcatttgtatgtatgctcatttttgtctcttagccccactagaatataagccccatgatagcagaaggcttgtttaattcacctctggatctccaaatcctgggatagtaccagaaatttagaggctaataaatatttctttaataaatgcatggatccgatggtattaaatataaagtaaaggaattgatccagatgactgccttaatgcttttccaggtcaactagtctcacaagtctaggaaaagagacctactgagaatgaacaagagctcagcatctgccccagaatctgggttacaaggacagacagccagaggcttaggacattaaaagcacccagttggaggtttgctctaaaactccaacatagttcatggggatacatagccacctctggctctcatctgatttttccaggactgcaagtatgtaagagagagtttttaggcttgctgcagagttcagaagaaagtttctaaattgaacatgacctggctcagaatttatgtcaagaattcactgagtctagcttaatgatgacgattagcttggaagaggctttctgggaagaggctgatgttagtatttcatgtggttttatatttaaaaatatggaggcaacctaagcttagacaagagaagctgccctgttttaagaagttgtttcctggataaaaattatgaagtcatatgtagaagtgtgttgcattgaaagtctgcctaaggtccctttcttttttcttaagagcctccaatttttaaaaataacaattcacacttttgtatgtatttcattaattcgatcatttgtttgttaattccttaaatacacattaatagagaaactactatatgcttgacatacaaacataagcaaaacaaacaccacccttgtcctcagggagcttagtagcagagactacagagaaattcataaacaattacaatagagtagtagataaattacagagtcctatttaaacatatgagaagggatatccatcctaaactcagggtatttgaaaatattctgaaagcaacatagcgtaattgtttcaagagtgaattatggtgccagaccacctaaattctgtcctaagtctttcacctagtagctctgcaaccttgggcaagatccttaatatctctgaattatcttttcctgtatgagaaatgtggataataagagaaaccttcttcagttaactgttgtgagagtttaatgagctggtaaattaaacatgtttagaacagttcttggcatatggtaagggctcagtacaggttagctatcaccgaaatagtaattattattgttattagtgacatctaagctgatatttaaaatatgaatacaagttaatcgcttaaggtaaggagaaaaatgtgatcaaggaagagaaaaagaggaaacaaaaacaatacacaaaggaaatgttaaaacaaagaccactcaaatgagaaaaacagactatttactcagagtttgctatagcaagagagtcagccaccaatacttgcatttggcaggtattcaaatacagtcaggacagaggaaaagctttagagtggaaaaaagagaacccttgggtgtgccctgattaaagtttgttggccttgggaagctattggagagctaactagaagcagggcatcctttctgattagtttggggagcacatttggttttctcaggttgctcctgagttggaagcagagagcagggggttagaaaatagagaaggtatcagttgaccacactgtgactactctgggctgattgctgcagaggctaaggtttggcttcctgggtttcctttgtcagtctgagttttattatcagatatgacctggccagtgtttgtatattcactcactttctggaaataaaaagttcagtataaggaggaatagaatggtcaaaagaggaatagaatggtgagagatgagcaaggtaagcagaagccaaattatgcacaatcatgtgttttctctctgtctgggtaagtgggtatttttgacaccatctcatttattttgcaaactggaatgtactgtgaatcatgcataacaactccatatttggaagacacacttctgtgctatttctcacttggtagcagaataactcatcctctccccagagatgtccgttctctaatccgtgaaacgggtgaacatgttaccttccatggcaaaagggacttggcagatgcaattaaggtatggaccttgaattgggaagagttccctagagtgtccaggtggatccaatataactacatgagtttttagaagtggaagagtaagacagaagagtgggtcagagagatgcaacaacggaagaagaggaggagaagtggcagcttgagagaaactcaacccactactgctggctttaaaaatggaggaagagggccaggcgcggtggctcatgcttgtaatcccagcactttgggaggcaaagttgtgcggatcacgaggtcaggagtttgagacaagcctgatcaacatggtgaaaccccatctctaaaaaaatacaaaaattagctgggtgtagtggtgcgcgcctatagtcccagctgctcaggagtctgaggcaggggaatggcgtgaacccgggaagcggagcttgcagtgagccgagatcgcaccactgcactccagcccgggcaacagagtgagactccatctcaaaagaaaaaaaaaagaaagaaaatggaggaaggagacccaccatgagccaaggaatgcagatggcttctcaaagctgagaacagtccttagctgatagccagagcaagataataaagacctcagttctacaatcacaaggaactgaattctgccaacaacctgaatgcaccaagagacagactcttccaaagatccctcagaaagagacacagacgtgcaggtatcttgatttcagcctcacagacacccatgtcagacttctgacctgcagaactctaaggtaacaaatttttgttgttttaagcagctaatatgtgataatttgttacagtagcaataaaactaacatactcatgaaattttataaactatccttttttctctcaaagagagtatttcaccatcccacccctgggcccccataaacccacatttctatatttgtgaatgagatatctaaagataaaatgataaaataatctgggtattggtatgtgtgagggttttcatagccaactctttccattgactttgaacatgaaaataatattagctttcatttattgaactcgtactatgcattttgccaaatccaagcgctaagctctagagataggtgtttttattcccatttaaaaatgagaaaacagattcagagagtctcaatgttgacaaatggcatggcccacatttaatcccagtctgtctcactacaaagactgaactgttctcactatgacatcccacttctcatgttaactaatgttcctgagccggaaacatgtgactctattttaccagcgttcatggtcacctacttcagacctgatcacaatatcaaattcctttttccccctttgtggagaagtcattaatgatggccaatcaatgtaattcaaaccacatgataactgtctgttgaaaggaagataagtaaattttaagaaaattttcttctcactcatcagcacagcagagcaacagagcattgcataattaacattcactatcccagaattaagcacttcacttctcgatcatacagtttattcaatattgtaatgaaacttttccatgaagtggagcgggaatttttttttttttttttttttttgagatggagtctccctctgtcgcccaggctggagtgcagtggcatgatcttggctcactgcaagctcttcctcccaggttcacgccattctcctgactcagcctcccgaatagctgggactacaggcgcccgccaccacgcccggctaattttttgtagttttagtaaagacagggtttcattgtgttagccaggatggtcttgatctcctgacctcatgatccacccacctcagcctcccaaagtgctggaattacaggcttgagccaccgcacccrgccagagtgggatttttaagaggagagccccagacccagaaaactcagtcaaaggatcttggataaatcactggtctctctacacctcagtatcctcatctgtaaaatgggaatgttaatactgccaccttaggagcatgtgagtattgaatgagaataaaactgccaaagggttatttaactttgtttttcagaatagtgtaagtcactgataaacaaattctccttctgaataaatgtgtattttttaaatgatcacctgttaccaatctagggattttgaaactttgagaggtcatttggatcccattctgcttctgggtatttaggacagaattgattattttaaggattaaaacttctatagctttctttcatagtcaatattatcttctctaattaagctgatttctgcctatttgatcttagaaaatatgaaacatatttgaggtagaggtcttttggatataacaaaaaccaacccagatgaactcatatacaaaggtggcactgggggcagttgggtagtagatatagatgcagtggacattattttaaatgacagaaatagatcagggactcaatgacagaaaataatggcaagtggaagtcaaaagaattgaagttgggagctgagaaaatctttgcttctcagggaaaactgatctcttccatcccagcttctctcaacacatctgctccatttcgtctttcagaaacagctttcccttctgattcaagcagcagagacaaaacagaaaaatatatacttaagaaagaaccagttttctttacacactcaatctgttgtggtctcaaaatggccgtcccacctgccaaagctacttctgagccccagtgccaaccaccaaccaactcagcctctcagtacctcaattccagacatccttgagggaggaaaacaatggagcaagctcctatttttccatgaggtcacagctcattataagtccagggaaaaatgtctttcctttgtcctgtcagctgtgacctggggtcaagcaggattatataaaacaaagatataggggaattcccctagaagagggcgtggctcgaacttgcaaagatgatgtctcaaattaaaaaaaaaattgacctagaatcctccttcaacaaaaaaaagtaacatagaattcctttgatctcatgcctaccatgcatcaagtttacaactttctttggttcacacctttctagattcacaccattcacaccatcggtttcttttctttcttttcttttttttttttttttttgacagaatctcgctctgtcacccaggctggagtgtgatctcaactcactgcaacttctgactccctggttcaagcgattctcctgcctcagcctcccgagtagctgggattacaggcacgtgccaccacacccagctaatttttgtatttttagtagagacggggtttcaccatattggccaggagggtcttgatctcctgaactcgtgatcccccacctcccatcaatttctttaactgctcctgtgttctcttgccacactgcctgtattagtttcctattgctgctaaaacaaattaccacaaacttagtggcaggaccaagacaaatgcattatgttacagttctgggggccagaggtccaaaacagtgcttattgggctaatcaagatgtcagcaaagttatattccttctggaggctctcaggtggaattcatctttctaccttttccaggtggcagaggcgacctgcattccttccctcatggcttcttctcccatcttcatcctcacctcttctctttgacctctgctttaatcattatctcttttacctcttctctctgactctgatctttctacctttctcttttaaggacccatgtaattatacttggaccacacagatagtccaggacaatctcctcctctcaaaatccttcccttaatcatatctgtaaagtttgttttaccatgcaagctaatacactcacaattcctaagaatcagaacatgaacaccttcagagggccattttcagtctattatagtgcccaacatagaatacaagattaatgcttgtttagttaatttatttaaaccatccctgctaagagaactcatattttaaatcttcaagtgagcactaaattctgcataaatattccctttttttatttccaatacttgggcttcccactaatcgtctgaaatttacatttgtggcagatatgaacatgcacttgaacagttgagaaatacaggaatatgtgatttcagttgccaactcaatcttttcttgttaaactttgaaaaactgacatttgaaagagacagtctgtaacaattccacttcataaaaacattcttctagtttggggacacagaattttacaagtttccaaatgtcctataatcaagctttgaaatggatagtcaaacacaaaaaggtcgttccttgggaagaacagtgacagggattttctaattcttcgcatgctttttgagaaaatatttaaatgggaaaaaagagatggcctttccaagttaaaaccattccaattgcttcaacagatcactgcacaagaatgaacaactgcttattgaaattccacctcctggatgcacctccagtgccctcttgttcaaagcaaagtctgtaatattaatcagccatggttttaccaaagctagggccaaacacaaaaatctcagtgctacaggcacgtgatccccacgtgagatctgcatgagcaatttctccacaatattcaggtggtttccatgacttcagtaccaccacccccactctccagtggtttcggtttccttgctcttggattgctgatctacagtgtgtctctacaaacttctgagtatctcaagttggttttcaaagctgaatatgttgacatattggtacaggtacataatcttgtgtctgaaaatcttaggggcatatgagttcagaatgttttagaaaggaaacacagagcatataccatatattaacactctcagtgaatctgagtgagtatctcctaatatgtctgtagtaaaataaataaatattatcaccaaacagaataaatattcacaacaattcagttagcttttgctgccaatttaattttagaaagatttagtaataagagccttttgattttagaacttcagatacggcactgtggaccaatactacaagttggtgggtttttggtttctgctgttgttgttgttgtttaccatccaaatggaagctcagtaaaaactccaaacccctagaatgagtacaagaagttttagtaccataaggcctccacttcatttaaccaacagggaaactgtagcacagagaattcaagtggtttggccaaacttactgagctctagactagatgcaagattttttatgtcagacaagcctaggttgaacctaactaaatttgtcatcttggcaaatttatgcctaaccttatttcccatgttagcattattgcttctgtttagagatgcccctcattcataggactgttatgaacattaaatcaacaaaagtatgtgcaatgtttgcatggtgagctctgtatatcatatgctcaatgaaaggcaagcattactacccttagagttatttttatgattgttattgacctaattcaattgaattcaataatttttactgaatcccttccatggatggtgctggactagattacaagggtaacagggcagaattatctacccattacactgtaaacaattccaggggttctctaatatgaatgtcatgagtacttagcacagtccctgacacaataaacattcagcacactttggttgaattgaattaaacttaaggcacccatagtctaacatgggatatagtaacagttaacaatgaagaatgtgagaaatatcttaagagcttcgcaaagtgccatgagaataaaaaaaaaaaaagagagattttttttctggcttagaatagagaaatactgtaaagaagagggcaattgtgctagccctgaacagcaggacaggccttcagcaggtatagttggggttaatgaaagctcattctaggcagaataaaaagcttaagcaaattcctacaaggtggaaaactgtatggtatgtttaataagtagtgggttacttatacttacagataaaagattatagacctgtaccaatgtgtgtttaggatattgcgtgatcatacacgtggggtaatcacctccaaaactgcaaagtttttggaggtgattaagtctaagtcaaatagagcctggaatgatatatgaaggagtatggactgtatattgaggctttgagtgactaaattattactactattattattattattattatctgagaccaaatttcgctcttgttgcccaggctggagtgcaatgatgcgatcttggctcatggcaacctctgccttctgggttcaagcgattctcctgcctcagcctcccaagtagctgggattacaggcatacaccaccacacccagctaattttgtattttagtagagacggggtttctccatgttggtcaggctggtctcgaactcccgaactcaggtgatccacctgcctcagccttccaaagttctgagattacaggcatgagccaccacgcatcttgcttcatttttagcagtagatgatccaaaccaatacgatttgggtcaacctttaggaaaattgctatgatggcatcttatagaaagcaaaggacagacagaaggtgaaaacagatagattcatcaaggatatatcaaaaagtccttgtaagaatgataaatacccaaactagggcaggggcaaaaagagggattagaagataagttaaaaagtcataattagaatggactatattcagcaacccattagatggaggaagaaaagacaagaaaggattcaaaggttatttttgttttttagactttggagtaaggtggtgccagaaagaaaggagaatacagatgttggattaggaagattgaagataataagttcacttttaaactgaacaacaaattaccttccattcaacataaaaaataaaactagtcagagatggcaagaaagtatacatctaatcagcagcaactggtcatgggccaatgtctttagaatcagggaatgagcctgctgatcctaaactgtccctattttggagaagctactctagggctgatactacacgtgagttcatgagttgcaattctatttcatgatgtgaagattatcccamcttaaataaaatgagcttttcaagtgcacaagcccatctaggaattgtcatcaagggttgttctatatagggaatcacataagttactcacgaataatgcctttgtattaatgaaggttcttgggatgggaagcatggcgaggcaagcaggtgttctcttaggtcatacaagtgaggcctgtccttaaatttaagaggctctccttaaattttatgccctagacacctcattgcttcacctagtcccagcaccatagatggtgtaaaatcttttctaagacaaagtagtaataaagtgtcttcattaagaaaccatatgtcgtagtgcaagggttggcaaacttttcctgtaaaggaccagatagcaaatatttgaggctttgcaggccatatggtctctgccctagctactcaattctgccattaaagtggaaaagtaaccatagatgatgcataatgaacaggcatgtctatgtttcaatcaaactttatttacaaaaatagatgacaggccacatttgaccttcaggtcatagttttccaaccatgttttgtagaaagagctagctagaccttaggtttaaataactgagcggccatttgccaaatatgtggatttggacatacacctctgtaaaatatgatcactatgccttccctactgttggtgagaattaaagaaaatgggtgaaaatgcctcataaataacaggcattcaatagagcaatgactggtccttttacttacaaggcataataagaagaatagctaacacttactaaatgcttttgaaatgttagcaaccgtgttaagcactttacaaagattatttcatttaaccttccaacaactctctgaattagtcactattacagcattcttttctgttcatggggaaactgaggcactgagagatgcccaagagatgtttatacagatagtaagtgatgtagctggacttaatcttcagtaagtgaactccaggggccttggtgttaaccccatgctagttaattagctccactaattcagccctaattgaagtgcttagaatcatctcaagttcttcaggacttttcataactcatcacagggttacacaactgaaaatagtttaatacaaattttttaaatttaccttcagattaacactcacgttacataataaaacacttattctaacctccctcccactcatcacccccagaaaagatctcaacagtcaaagaaaaccaaaatattactgtgaaaactaatgcaaacccatttcaaaaaatttatcccataatcactctaaaaacttgcaatttgaaagctacattgcagaatagcatactggattaattatgccagactgcagcaataaccttgaattaaagctgcaaccttctatttttaagaaacacttgcctttctggttgatgaaacctgtcgtcccatcaggtaacagacgtgaccaggaaagagagaagcggtaatgagtcaatccaagctgtttgatacatttcaaatcttcctcccacagagtgtagctgccacaagctacatcgccagtctggttcttgaaaactctctctcctccctgatgagtaaatgtgtcccagacacaagggccttttccatctgcatcccagcctcctgagaaaaagaagaaaatgaaacagttacactcttgacatcaagaggcatatgtggaatgtaaatatttgtcaccaaaagaacatacctcattaactcaatgtaccatatttataacctttaaaatataagcctttaaaataacatgcatgagcggattatgtgtttagctgtccttgatccctgaagctgactggtggcaaatgaaaawttattgcatagcgccgctgcatagcaggctttcatgkttcattatctgaagacctcccagctggtaaacagaggcaggccctggcttatgaatatctgagttgaaaacatctcctccttgcaaacattccccctggccatgactaacatgccttgtccttatgcgtgacaggatcttgggactttatgtgtggcccttgacatttaaaccctattttcctattctctgacaatggaggctgtgctggtccagtccatctctggaggggagggagccctggtttccaccactgcttatacgatattgctatctgaaactcattcattcatactgcccttgactcaacaaatattatgtgtcaagcaggataacaagcccaggggataccagagtgaactatgttgtgtctcatgttttggggaatttacgtaacagccaatgtaaaggccctttctttttcagaaacgagggaagggcatttatccaagtgtgggctggagtcagaggaggtctctttctgctcaattttcctgtaagcctacaactgatctaaaatataaagtccattaatttaataaaagaacatatccagtatgtttatcatattttatatatttaaaaatatatgtaacaatccacgtatattctgagcatatacatgtgaggtagaagtatcgcatgcctgggaatgatcaattcaggtgagtgattacctttgaggaaaagagaaggaagtggaaccatggaggggtctacagggccttcaaatgcatctcttatgtttcactcattaaacaaggtagaaggtatatgaggggctgtttattacatttttggcaatccctttctataagcctaatatataatatcttataattactatgtaagaaaagaggtcacagctggagtaaaatagatgaaaacaattacctcattgagcatctacatactcatattttgtgcacagatctaaaaggattaggtatagtctccagttccaacctcaggacagcaggagtgataagtcatggacggcgccatgaggatacagaagaggctgctaaaaggagctctgacaaaagcaaaagtggtcattgatatcaaggtagaatactaaatatctattcaaaaaaagctatgaatattcgaaagtattttactttggagccatgtaattatagaagcaaatagttttacacaatccagtgactctcaagttatgtctacatatggggtttagaggaatggggataaaagaagagtggtattcatagaatgaaataggaacaaacacaaaactaaaatttttgaagtatgatgctcatagttttgaatgattgatttaatacatgaaaaagcttaatctcagcttaagcaatggtgtattggtatatatttaactggctatatgttaaaaaataagtatagacctatatgtatatatgtttattatcaattttgctgatataaagtatgcataatacacaatttacaaataataaactatgcaatgcccttttctgtgaactccatataaccaactgattctcatataggatgctcttttagatttttggcaaagtcatattggtagctatattagtctgttctcacactgctataaagatactatctgagactgggtaatttatgaacaaaggaggtttaattgactcacagttctgcatggctggggaggcctcgggaaatttacaatcagggggaagaggaagcaggtactttcttcacaaggtggcaaaaaagagagaagtagtgaaggaggagcgctttctttcaaacacttacaaacccatcagatttcatgagaactcattcactatcatgagaacaatgggggaaaccacccccatgatccaatcacctccctcccttgatgtgtggggattacaggaccttccctcaacacacggggattacaattcaagatgagatttggggcagggcgcgggggcaccatagagccaaaccatatcagtagccaacctacagttgtaatttgacaaatgcatgtagttatcatatgacttttggttaatatttttccttatattcacaggtagaaggaaaagaagacaaaagatgtaccagaacttcactttttaccactgacacgagctacttctttgttgaatcaggtaacagttttcaaacactggtaactgtctcctcaatttttggtgctactcacaacaccacagccacagacatgacacacttttaagttgaatccatattattaacatgtttcctatcactttctaaggtctagacaactagcaaaacaataaatcaaataatgacttctagcatcagccaatttctgcaaccatgatatccgtgaaggcagagctgggaaaagaagagccgtagcagcacaccatattacagtgtttctcctattcaaatacaagagatctaaattacctcaaggccatagaaaacagtgaaatttggtaattagttaagtaatgattttaagtatttactaactttgtttttgatataatttacctataagcttatataagtaatttttaataaagtctgtgttaaagaatcagctcacacaaaaactcaataggctctcatgagccagcacaagcgggcttcaccacatcacttacaactaacttgaataagatcacaccattaggaagtaacagtgctaagatttgtattcagatcttagaagtctaagattctgccattggaccatgttgctcttagtaataattacgcagagtgatgaagaaaaagtcagctgatgaccaaactacttcatttatcaagactaagaagtgcaaaacataatctatacattttggaaagcagtacaagtaacataactcaaacaagttttgacaattttaacaggtcaatgtcacttagcaggaacatgtactgaggtggagtcgcttattctccacatgtactaggctagacaaagcagaactaaacaacattgtttctaaaaaaaactaatcttcaaattgataactaacaattataactgaaattggataaaaatcatataaaggccaatatttgttagtagttttaatgtaaatcttactatatgaatgatattaataactcatttgcccattagaaattttctcccgttgcaattatgcccacattctaaaagcatgatgtcctttatgatgaataagactactgtttccaggtggactgcatactcagagccattctccaaacaattatgattgttggattacatataggaaatacactttttaatgcattgttactctagcaggaggttaggtgacccaaacacaaagggcgaggggtaatttagatgcatatgtgagtagtgatgcaggcttttgtactgggagtgtctgctaagttcagaccatctgagctttcattttaatggcttgtggaacaagggagaaaggagacaaagtctaagatgcatcaaagatgaaaagtataaatagagatggtcacaaaaagctggtatgcaaggacttcatatcctttgcaaaaaaaaactggagacaaacccaacctgcagaaagagagaacaaaaaaattagcttgattcaaacttgggtggagagaggaaattactcctcaatatttgtaaccacaattcagccatcaaaccattaagtgtgagaatgggaaaaagatattttcagatacatgagctctcaaaaatttcctctctttggatattactggaggatacattttactaaaacaatgatgtaatcaagaaagataaagatctaggatccaggaaaaaagaaattcaggagaagaaattgacaaaatcactgagtgatattgtattactcttcttatgttgctaataaagatatacctgagactgggtaatttataaaggaaagaggtttaattgactcacaatccctcagggctggggaggcttcagtaaattcacaatcatggcagaaggggaagccaacatgcctttcttcacatgacagcatcagggagaagtgcagagtaaagccagatgaactcactcattatcatgagaacagcatggaggtaaccgcccctgtgtttcaattacctcccactaagttcctccaatgacatgtggggattatgggaactagagttcaagatgagatttggctggggacacggtcaaaccatattagatatggactaaattgtagcccctcgaaatttatatattaaagctctaacccccaatgtaactggatttggagatagggtcttgaaggaggtaatgattgttaaatgaggttataagggtgagggtctaatccaaaatgtctagtgtccttataaaaagagagagagagatcaggaatgtgtgaacacagacaaaaggtattttgttttggcagtcctggcaaactcatgcaggagtataaaggcaaagggaaacttccaggatgatagctatgcagtagacacagggagtacccagtctgtttgagcaggcgacaggctgtgagagctatttcctcaagaagatgatacaaatagaatatctagtatgttgtattagtctgggttctccagaaaaccaataaggtagagatatatagttttattatagtaattggctcactcaattttggaaaccaagaagtcccacagtcttctatctgcattctggagaacgaggaaagctgttaagctggtggtataactgaatctaagtctgaaagtccgagaatcaggagtgccagtgtatgagggcaagaaataaatgtccagctcagagcaaattttcccttccttgccttttgttctattcaaaccaactgattagatgatgcccacccacactgatgagagtaatcttctccactcactctaccaattccaatgctaatctatttcagaaacaccctcacagacacacttagaaataatattttactagctatgtgggcatctcatagctcagtaaagttgacacatacaattaaccattacataagttttatttaaaaaaataaattatcatgggactttcaacagtcataaaagtagaatagcatgaaacccatgtacttgtcacacatctgcagcagtcttcaacattttgccaatcttttttgtctgaatccacccaagcttcctcattcaatctgtaatcattttattgtgtatcgtgaactaacaaaaatattgttctaattgtggtaaaatacacatcaaatttaccatcataaccatttttaagagtatagttctgtgacatgaaatatattcatattgtttagcaaccatcaacactatcatttctccagagttttttaaatattcaaaactaaaacattgcaaaaattaaacaattactcaacattcyttcctcctccaagcccctagtaaccaccattctactttctggttttgactactmtaggtacctcagaaaagtgaaattacacagtatttgtctttttgtaactgatttattttgcacagcataatgtcctcaagcttcattcatgctgtagcgtgagtcagaattttcttcctttttaaggcttggtgaaacctcatcacacgtacataccacattttgttgatccaccatttctcaatagacactgggttatttccagtttattctgaataatgctactatgtacataatatgcaagtatctcttcaagactctactttcagaccatctgggcatatacccagaagaggaatggctaagtcacacggtaattctctttttaattttttgaagacccaccatactgttttccatagcacctgcaccattttacattcccaccaacagggcacaagatgccctatttttccacgacctagctgacacttgaaattttctgttgcttttttttttcttaatagtagccatcatattatgtgtgaagcaatgtctcattgktgttttgatttgtatttccctaatgattagtagtgataagyacatgaaagattccttacatcactaatgagtagggctatctagtatgttagaatgagagaaaatgtatagaaataaaaagtattagatttatttagcaatamacacacagaaaacaaaatgaacawatagaaaacaagtattaactttgtgtgaaaatgttgttctggaaaataaaaataatgatagtatactatgtggttcaggtgtaaataagtttcagtggtyacaatgaggtaaaycctgaccactgatctaaatacaattaaaatctgattatttggggaggattatggtgttggaatctttcatgtagtagtggagataggaagatagaaggaaagaaaactaacaaagagataaatcctcatctttcacaatgagaagttaactgatcatgacagctgcggaaaagtaaatacataaaaaaaaagagcaagaaaataaaaaaatgaaaaatacatagttagcaaaataaaaagcataaagtaagatggtaggacacaataaaactgatccattctaacaatytaagtcaatgaagtaaactcggtgaaaaaacaaacattgtcagactaaatttttttttcagctattagtggtttatttgcttcagtaccatatttaatttttttattttagttttcctttatttcttctaaaaaaaaaaaagggatacacgtacaagaatgtgcaggtttgttacatgggtatacgtgtgccatggtggtttgctgcacctattgacctgtactytaagttccctcccctcacccccaccccccaacaggccctggtgtgtgctgttcctcgctctgtgtccatgtgttctcattgttcagctcccacttaggagtgagaacatgcattgtttgttaaattttaaaaatccaatgatatgctatttactatactcacactttgaaaacatggagatataagaaaatcaaaagtcaaaatatgatactctgcccctccaccaaataaaacagcattaaaaaagacttaaaaagcagcactagagagaacatgggtcactacataatgataaaactattttaaatatacatgcacctgagaatatggcttcaaaatatgtgaagcaaaaattgacataactgaaaaaaagttgtcaaatccacctccaaaatgggaggatttaactaacccctttctcagccactgaaaagagtcagacattaacagatttgatctaattgatatacataacattgcaaaataacaaacactataattgaagaatacatacttttcaagcagacaaaaaacactatgaaagttgtgcacaaattgttccgtaaataaactcttcataaatttcaagtttgaggaaatacagataacaatttctgaccaattaagttagaattcaataaataaagataattaggaaaccccaaaagttcagaaatatgaaaatgcacacaggaagaacttaagggaaaaaaaggaataaataatagtagttaccaaaaatataataaaaactaaataacacaaaatattaaaacattgtgtcatctggtttaagtggtacttaaatagaaagccttgacaaaacagaaagccttaatgtatgtattagaaaacaagcaaacttcaacgttattgagctaatcacgtaagagaggaagaggaagaggaaaaatagaaggaagagaaagatggtaaagaaaacagaaggagaaactaagaaacagaaagagaaaaactaaggtaagattagaaataataagatagaaaaaaaaactcaggggaacgccccggtggagaagctgaggtcaacatcagatttgaaatatttaaagtggatacaaaactatttcagcaatgcagacaattaagtgtgttgttgtgggcgatggtgctgttagtaaaacatgtctcctgatatcctacacaacaaacaaatttccatcggaatatgtaccgactgtttttgacaactatgcagtcacagttatgattggtggagaaccatatactcttggactttttgatactgcagggcaagakgattatgacagattacgaccgctgagttatccacaaacagatgtatttctagtctgtttttcagtggtctctccatcttcatttgaaaatgtgaaagaaaagtgggtgcctgagataactcaccactgtccaaagactccttttttgcttgttgggactcaaattgatctcagagatgacccctctactattgagaaacctgccaagaacaaacagaagcctatcactccagagactgctgaaaagctggcccgtgacctgaaggctgtcaagtatgtggagtgttctgcacttacaaagaaaggcctaaagaatgtatttgacgaagcaatattggctgccctggagcctccagaacygaaaaagagccgcaggtgtgtgctgctatgaacatctctccagagccctttctgcacagctggtgtcggcatcatactaaaagcaatgtttaaatcaaactaaagattaaaaattaaaattcgtttttccaataatgacaaatgccctgcacctacccacatgcactcgtgtgagacaaggcccataggtatggcccccccttccccctcccagtactagttaattttgagtaattgtattgtcagaaaagtgattagtactagttttttttttgttgtttcaaaaaaaatttttttgtgtgtgtttttttgtttgtttgttttgtttaaaagcaaggcatgcttatggatgactctgtaacagactaattggaattgttgaagctgctccctggttccactctggagagtaatctgggacatcttagtgttttgttttgttttttttccctcctctttttttgggggggagtgtgtgtggggtttgttttttagtcttgtttttttaattcattaaccagtggttagcccttaaggggaggaggacggattgattccacattccatttcctagatctagtttagaaaacatgttccccatctggtgctcttaggaaggagtatagtaaatgcctcatttaataacatactcctttttgaaagttgccttttctctccacccttgagtagatccagtatttgatgaaactcatgaaagtgggtggagcccgtcttgcccctcctcttttctaggacgcactatatgtgactgtgactttcaaggacatttgtttgccatttgctgatttttttgggaagttaatttctaacttctttcactgataaatgaagaaaagtattgcacctttgaaatgcaccaagtaatttctaacttctttcactgataaatgaagaaaagtattgcacctttgaaatgcaccaaatgaattgagtttgtaattaaaaaaatttttttccctttcaaaaaaaaaccaaaaaaaaaaaaaaacaaaaaaaactcaggatagagattaacagaagcagatggtttttaaaaaaaagtctaagaaaatagaaactcatctgaggtgtgtatgtatttaaatgaggaggtaaaaataaatgttagaaatgcaaaggggaacatagctaaagaagctgcagaggttaaactgacagcatctatatgttattttaaaaactttataaaatacatttgaaaagttagatggaaatgacaaatctagaaaattataacttaccaaggttggctcaaatagaaatgaaaaacttgaaattaaatcagtagttactaattattggtagtaaaatcttccacaaagaaaatgccagaccagttggttttacaactgagttccaacaatcatttaaaaaatgaaacaaacaaaaaattctactcttgtgcaaattctcccagaaaataagaaagaaaaaaatattctcttcattttatgtgactagtataatcttgataccaaaccagaaaatggtactacaataaaggaaaaagcataagccaatctcactcattaacacagttgcaaatgtgctaaataaaataacaggttgccaaattgaacaggtataaaaaagaatgttttacaaatctgagttatagtccaggtatacaagactagtttatcattagaaaattcattaatgtaattaaacactgattaatggatagaaatccgtgtggtcatctcaatacatacaaatgttaacatcatatatgtatacatgaataaaagtgttagtaaattggaaataaaaggcaatctccctattgtagtaactaatagttacaaaaaacctacatgctaaaaaacattctttttaagatcaagaaaaagtcaaggatgtctgctataatcaattctattcaacattacataaggtttgttaattagaggtacactgaaataaaactaactaaataatataagccccagagaggaaaaaacaaaacaaaacaaaacaatcatttgttaactgtaagattacctatgtaaaacctccaaaaaaatgtaaggatgaattataagaataagggtttacatcaatgacagactggatcaagaaaatatggtacatatacaacatggaatactatgcagccacaaaaaggaaagagatcatgtcctttacagagacatggatggagctggaagccattatcctcagcaaactaacacaggaacagaaaaccaacgccacatgttctcacttgtaagtgggagcagaacagtgtgaacatatagacacagggagggaaacaacacacactcagggacctaactggggcaggggatatgggggggagggagagcatcaggaaaaatagctaatgcatgtggggcttaacacctaggtgatggattgataggtgcagcaaaacaccatggcatgtgtttacctatgtaacaaacctgcacatcctgcacatgtaccccagaacttaaaataaaataaattaaaatagaataaaatttatagagtttagctcagtaaacttgcttgatacaaaattaataaaggacaatgcattctatacaaagtaacagttataaaatataacatttatataaatagcagcaaaaatacctaaatgtatatataataaagtgtaagcatgttgtctagaaaattataaaattttattgaaagataagaaaggaagtaaaattttctttcaagaatatctaaatatttgtttatggaatatcatgtttatgaatacaaagattcaatgtcatccagattctgaatctcttaatagtgatctataaatgctatgcaattccaacccgtcctaacagttttttaaaggaatttagtaagttgattttaaaatctgtatgaaatataaatgggccaagagtatttaaaatctctcaaaaaaatattgtatgaaacttatcttaaaatatactaagatttagaacaaatttataataagtagcttagcgtggcactggcataggcccacataaatagatcaatggacttaatagagaccccagaataataccatgcatattcaatataaaaaattcaatatacaaaagagatggcattctagtcagtaaagagggacttttcagtaaataatgctgggaaaattgatttatatattttttcgtgaaaatggatgcctactcactacacatatacacaataaacaggtggattaaataggaaaactctaaaatgtttagaagacaacacagaatatttttgtaacctcaggttagagaataagatctttaaaagactcaaagagcttagacctaaagggggagaactcagaaattcaactgcattaagaaatagtatttacaaaaagaaatcattaaggaaattaaaatgcaaggcacaaagtaagaggatatatatgctacatacatgactaataatgaacttttatctggaacacataaagaactcctaaaaatgaatacaaaagacctgaatgtcttctccctgccaagatgtagtaacagggtctagatttactctctcacctaaaacaattgaaaaccaaacaaaatataggacacagtgaaattgaagacatttggcctcagacaacaaagaacagggatcatccacagccagggaacaaatgagccctacaactgctccatcgtgttaccttgtgaagtttccaggacacagcacagagaggacaaacccacagtctggcagacttcttaagctgaggagacaaagctgaggacccagggagaccaagatgtctagaattctcagggcagagcaccaaagagggaaagagttccaaagagagaacaaaaaccatagaaggtcgcacttgagcatgcagaatacttatccaggcacatgcgtgaagaaaccatctgagtttgattgaaaaatcacccgaaggattagaggtgacagtactcagaactcacataggagtagtgccctaataatcctaaatgtttatccatgaaataacagagtttcaacatacacgcagcaaaaacttacagaactgcaagaaatccgcaattatatttgaatatttccgttaaaaaggccaacgagactacagaaaaattgatgaaagatgtgaagaatttcttcacagaagggaaaacacatggctagtaaacatttctttaaaaaggtaagagagtgttaaaaatttggaaaatgcaaatgaaagccacaatgagacaccattctacacctacacaattggcacacatttaaaagtcgggcagtatccagtgtaggagaggttgttgctcagcagaaatgtgtatacagtgctggtgggagaacagtatggaaacatctactaaaattaaagaagcacatacaccaaaaccgagtaattcacataccattgtataccctgtttctacaatggaccaggagacatatatatccatgaatgcaacagtcagtgaaaaaaaagaagaagaagaaaaaaaaagaaaaccattgaaaacaacccaaatttcctttgttgggacaataaatcaataaactatagcatatttctataatgaaagactgtacaggagtaagactgaactacttctcagatcaatgtgcataaatgtcccaaatataatgagagagaaaaagcaagttgcaaaaaatacacataatacattgccatttatatagtgtcccaaagcatgtaaaattaaataataaattatcacactatacattctcatgtagcaagaccatataagcaaaaaaattgataaatgcaaaattcactttcctggataccactgggcagagggctagacagacaatattgaaggaggttctggaaatgtgggagtaggtaaatatcatttttaatactatatacagatattataaatattatctattgtgtatctaacaaaatcaattttataatttcattgttcatagtaaaggccatttattgagcactagttttctgtcaacactacaccaacagcttacttcaaccatcccattgtttccctcactctaacccttcaaaaatgcactgtgattattccaaataagtacaaagggaaaccaaggcatgtaaatattgagttgatttcccatgatcacatagctgataaccgaacagcaaaatgtgatacccttagagtcctcccttatcaacaccaatagattaacctccttggagaccattactaatacttacaacttaggtgaggtctcattaagggtctcacaatctagtagatattatacaaagaaattcttagactacattaagagttgtattaaaacctgttttaaaaaaaaactgtgggaaaattaatgaacaggcattcaataattaattctgttgttgggagtcaggtatacttgcccaagagaaaacattttaagccagggtgttcaaagatgagtaagagttctcatcgagggaaagcaagtgcatacttcaatggctgtgctggggtgattggagaaagaaggcatagagacccaaaccagaccagttagctatattgcaatatgttcggcaagaaatgacaagatcctgtgttttatttttagtaatttggaagaaaataaaattgtgtttgaaattatcctattagaacatagaagggatttccacaaaaaagtaaaatactgatattttatcaaatatcaaagacttcccaggttgcaaaggattatgaaaagagcataggctctggaggcaggcataaatgagtttatgtcttgtctctaccccttactatttacatgacctctctgtgtgtaaaataggaagatactatctacttcatagggttctagtagtcaaagcaaaaatgcttagtagtgtgcatggcagatatttaataatatgtgctcaaaatgtattagttcttttctcctcccttaggctgaatgcaaatgaccagttgttgtttgtttttttcttctctctgtggcctccctattgatgccagaatgcacatgtagaaaatactgttaatatttgcatacttgcctgtggttaagaatcaatgtcttggcttgtataacttggtctgtagggccctcagcttcctgatatagaaaacaccattacaaatggtatcctatcactttaacaattgccataacaatgcctttgcgaggtcacagacctaatagacccctgcacaaaggaaatcatgtcaagtaagaaataaataactaagggggatggggtacatgtatctgtctatctgtctgtttattcttccttccaaacccaaaactgacatcaccacattgcctccttttggcagcatttctgactccccaccattatcacatcctcctctgaacacccaccctgcaaataacgcatagtgctagagtcttttttttttttttttttttggagatggagtcttgctctgtcacccaggctggagtgcagtggcatgttctcagctcactgcaacgtctgcctccggggttcaagcgatgctgctgcctcagcctcctgagtagctgggattacaggcacacaccaccacacccaggtaatttttgtatttttagtagagatggggtttcaccatgttggtcaggctggtctcaaactcctgacctcgtgatccacctgcctcggcctcccaaagtgctgagattacaggcgtcagccaccacgcctggctgagtcattttaaaaacatttttctttggcctcctttagtttgagctctgtcaaagcagggtccatgttttactgacctgtctgtgtccctccagtagtaagaatcatgtatcaaaatagtgcacgctcagtaaaatgctttttgtggggtgtgcttcacataaaatacgaatactgctgtttactgtctcattgcttcacagacacgtgcagaagttatctttgtcgtgctcgtaagtaattgaaaattctttatttgaaaggtaaaatgtgactaaaagttcaagtcaatgcccgtataagttgt

SEQ ID NO: 98121 - DNA, 17644 bp, Homo sapiens
ctgggctcaagcgatcctcctgcctcaacctcccaagtagctgggattacaggtgtgagcctggcttaacaggagaatttttaaaaaagaatccaaattgtaggccgggtgcagtggctcacgcttgtaatcctagcactttgggaggccgaggtgggcagattgcctgagttcaggagttcgagaccagcctgggtaacacagtgaaaccccgcttctactaaaatacaaaaaattagctgagcgtggtggtgtgcgcctgtactcccagctactcgggaggctgaggcaggagaattgcttgaacctgggaggaggcgggggttacagtgagcctagattgtgccactgcacttcagcctgggcaacagagtgagactccatctccaaaaaaaaaaaaaaaaaaatccaaattgtaggccatcatgcagactttttttttttttaggtataaaaatctgtatttatattacagtgacagaatgacacagcacagcccaacccaatgcagacattttaaattatgggaatctagcctatgaagaaacactgctctagataaaatgatttcattgataagatataagttgtaatcctggttctgtgccacttgcatatagaaagggtctaaaataaggataataacacttaaccttcctcatctcaaagaatgataaaggtgaattgagagatgacacttaaaaattaagagatgtacaaatggaaggaatcagaggaaagggggattcagaaacggcatggataacctggagtgttttggggaagcttccaccacttttgactttgtaatctctctacttgaagtcctctgctctaccctggaatggcagtgtttgaacttccctgggctgtttgtgtatctgctactcagcctctccccattccttccccctctttcactgtagtacattgtgaagtgccatggcaacacgcttctgccccagttcctggggatgtaccgagtcagtgtggacaacgaagacagctacatgcttgtgatgcgcaatatgtttagccaccgtcttcctgtgcacaggaagtatgacctcaaggtaagaagagggtagctcggacttagagggaggctcctgatagcctgagaatggggaagaccctgggaggtctttggatgattccttttaagggaaagaaggctgggtttgagtactcatcttaggggctgggttctgactgttcttttagccacttctactgacttggtgtttgggtctttctgcagggttccctagtgtcccgggaagccagcgataaggaaaaggtgatagtaattttatgtgctagggtgagggatgagggatgagggagggcagatgaggggaacttcttaggatggagaggccactctatataggaatagggattactagctatttattatcttaaaccacttaaaagaagggggtaaacttctgttgatccggggattgtttggaaggggcagtgggagcagctgctttaacactggcatgggttattccatatggaaggcttggggatgggtgaggttgccagacttgaagagcaaagtgtttaacttccacttcccattctgggttattttattcaagcagctacttttgcttaagaagacacaggccgggcatggtggcttatgcatgtaatcccagcactttagaaggccaaggcaggactgcttgagcccaggagttccagaccagcctgagcaacgtaatctctaccaaaaacacaaaaattagctgggcgtggtggcacgcgcctgtagtcccagctacttgggaggctgaggtgggagaatcacttgagtccaggaggtcgcggctacagtgagctgagatcacaccacttacattccagcctgggcaacagagtgatcgagatcctatctcaaaaaaaaagaggagaaagaaaagtcagcctggagggtcttggctaaaaaccataagcagagagtagtgggatgtgatttgggatacagctgtagtgactgagtctgtggaagtcactggaggtgagaacagaccagggaagcatcacagtgtggagttagatgagatctaactgagctagcatagagccctagacagaaggtggggttctgagaccttggggaagggatatgttcccaagatgtccctttacatattcttaggttaaagaattgcccacccttaaggatatggactttctcaacaagaaccagaaagtatatattggtgaagaggagaagaaaatatttctggagaagctgaagagagatgtggaggtgatgattgggtgctctgggaaatggctttcctttttttgctccctagagggtagttgtctctttcattcacggtatgagggagctcctccccttccctttattcttcaggtcctctgcctatatgggggtttagtatgagacatgaaaaacccctggagctgacccgtggaaggggtggctggaataagctaaaaggatgatcttagatactaggacatataggcactaaaggcagtggtatgccctgcaacctcaatttttatacttcctttccccagaagggccccagaaattcaaaggtacaggtacaggggtgatacctagcagtgaagagtgagagagaggtgtctgatttgtcagtgggtctcagtttctagtgcagctgaagatcatggactacagccttctgctaggcatccacgacatcattcggggctctgaaccagaggaggaagcgcccgtgcgggaggatgagtcagaggtggatggggactgcagcctgactggacctcctgctctggtgggctcctatggcacctccccagagggtatcggaggctacatccattcccatcggcccctgggcccaggagagtttgagtccttcattgatgtctatgccatccggagtgctgaaggtgagagaaccgggacaatttaagggtggagaggggatttttcctggaggacagagaccagagtgctgggggagagcctgattagcttttcagaacaaaactgactgcttcctggagaaagggaattggaactaaacctactctgaattgttggtctctctcccaggagccccccagaaggaggtctacttcatgggcctcattgatatccttacacagtatgatgccaagaagaaagcagctcatgcagccaaaactgtcaagcatggggtgagagttcgcaaaagcctttcctttcctgtcttgactattctttgggaatagagtctcttgtgccagagcaatggggtggcaaaagaatggaggtggtctggggtagattgggtgggggtgatggggacgggtgctagggtggcctgacatattgttccgtatctcctctcacaggctggggcagagatctctactgtccatccggagcagtatgctaagcgattcctggattttattaccaacatctttgcctaagagactgcctggttctctctgatgttcaaggtggtggggttctgagacacttgggggaattgtggggatattctagccaccagttctcttcttcctttgctaaattcaggctgcaggctccttccatccagataactccatcctgtcgagtaggctctttctgaccctcagaaatacattgtcctttttcctctttgcccatttttcttccctctcttcctccccatgagaagtctgcttgtagtattagaatgttattgttgactctctcccaagtgccttgatctttgtaatatctcctgttgtttctatgatataggagctaggggaagggggttgtttgccttcttcaggacctgactggacagatggacctggctcaagcaactactctggatgcactttgctgtgtgggatgaactaaaagtgtctgaattttgctgataactttataaaactcactatggcatgcttccctcctggtgggccctaggatggatgacactcaagatactacagatgtgggtgcaggcatgcacacacacgatggaatatggccattcctacacaggtggggtagagagtgggtcagcagcctggcacctcacagaggtgggacctaagaggactcatgattatgcagagaattggattgggtctctgtcatagattgagtaatctcttcccttacctcaattccatctccacccatctctacatctgggcacagcaacccagagatggccaaaagcattcaagcctgggggaagatgtttgactattgctgctcttcaccagaacctcacacctctcctgggactggaacccttcagtgggtgtgtggccagttttggaggctggaatgatgggccagggtgtaggattcattctccatgtaaagtttcctttcatcctgcctagccatccccaaggtttatttccagaagaaaggaatatctctacttggatcaattctggtcatttcaagaggatggaggcctcaagtgtgggaacttcccctactccctggatgtgtgtacctagcacacttccttctcccacccctttttccagttggatttgtttttctgttctcttctgtcctgtcttatactgcaactgtgtctcctaggggacagatggccttctttgtcatcttcactctccacccccagagaggagtcagagccataactcaatcactcagcccctccaaagatagttgatgtgtgataatctcataatgttgagaaccctgatgagatacattgtcttcctctccctacaatgcctctggggccaaggcacccattcttcttgctatcctccatcccccttgaggcttccactttttttttttttagacataaagctgggcatcagcaactggcctgtggtgatgcaaagctgctttgctctgtatctggctggactgatctgtctcacaagaagccatgaggccatagggagaagctccctctccccttcatcttctgctccaaaggtggtagcaagaggagtacccagttaggggttggagcccccatataacatcttcctgtcagaagactgatggatctttttcattccaaccatctccctttcccccgatgaatgcaataaaactctgtgacaccagcaaccattgctctttagaaatgggttttctgatcatatggctgatgtgttatgggcagtatggatgtcttcatttgttgcttctgtttttcatcttttttgttttattaataaaaatttatgtatttgctcctgttactataataatacagggaataaattattcaatccaaatttctgtacagaaatgccttttttttttttttttaaatttcacttctctcagggagcctgtgtttaagggtgcagagaccagctgaagaattctggtgttcaaggtgttgggcccctaactaaggatgtgggtttctagacagatggctgtgaacttttttaaaaaggctgtgaagggtgtgcacgggaatggaaaacttagtctttaaccttgtgggaggtcagcggtagtgagggccagggaagagtagggtgatgggacccttcctcttcccagagttctgggcttgctaacactccatctttgtaaaggtgagtaggcctctcagcccaccagctaaaagaaaaggaatctagtattcccccaggcttcctgggaaagctgtcctcttcctggagggaaggaagagtacagcagggtcctgggaaagtgaagaaagtgactagccctccagtctagaggggggagtgaaaaaggggtggatgaatagaggttgttgccagtttgggagattcctgcctgtcttggctgaggaagtcttttggctggtggaaaaacctggcttgatgtggccccagggaagtgagttggattgggcggagactgcttgatgtgggaagcagagcagagctttttttttttcttctttgagagtttttaactctatttgaaccatacacttgacaccaccaccacctcgagccactttttaaaaaatgtattcgcttcccattctgcaccagcctccatatccctgtttgtggaaagaaaaatcagaggcactgaccaatgatcatctgagagcaggttgtgggggtcataggaggtaacaatctagaaagaggcaggagatgagggaggggattgaaatagtttagtacccggatttgtttattttttagagccaatgcttttctttttactatgactcttcccatcccacattgttcctcaaaggcccttctaccataaggattcaaaaaattgccgccctccccccgaatccccatatacccaccaacacttcacccacccatccaccaccagctcctgggagctgctacgcagctggctgggaaagaaaagggagagtgctccgccgggagcggggagcgagtagggtggcgtctccagggatttaacctcctaccctcagttccatgacgccaccccctccctccaaagactgggacagcgcctccatttttgttttggggaggaagggcaggggcttgcggatagaagggggtcaaaggaacggtgattatcacctgtgaggggaaagggggtgctgtcctccctccttcccttttcctcagcctgcaccccctgcaatcccccacctttcggggtctccccctccttgttgctaaggcccggaccgtcatcccagcaacagcctcagtcatgtgaccggcaatggcggcgctgacgagaggtaggtgagcccggcgccccccacacccaccgcgcgccccccgggccccgctcgcacccctcacgcgccccccgctcccccggcgccccctcctccacctcccctccccgcgcgcggctccgggctccccgctccgtgcccggccgatcatctttctagcaccctccagccttggcctccattcgggggttctgagggctgcgatcgggccgacatgcacccccacccggcggtggggatccgggggctttggctactgagggatgtggggagttggttccgggtcgggtcttggaggaggccgtsgggggagggcgggagctgcttcagtggatgcccccagggacccttgcccatccgggctgtgcctccctctggcctctgtctggagggagagactggttccttgtccggcctgggttgccacagaggaatcacagacccaccctaaactggggcyccgcctcccttttctgtgccagcaggacttggacctaggacacctaggtcctgggtcccccgtgatggggagagaagtgttgcatcgcggatagactgtatgggctgagactctagggttccattttcacttatgaatctcgaggtgcatctggccttgggggacgatgatggaggcatgaagggacagctgctccttcttggatcagtcaataaatggaggtcacactaatggcccttctttctgtttgagctgcatttggaagtgttgtggagacagccccgtagcccaatgcgaccagactcagggaaaacatcaggcccctccagctgagcccttgtgtgagccccgcccctccctaaatgccagacttgggagctgacagacagcactgcctgtgctgggtttaaaaggtgacaatgagaactttgttattgcaggrgcwgctgccactttgttcacatccttaacagacttcagcagaagggactgagttagctctcaaggaaggctccctggcaataggggctgaattatttggcaatgtggagcaggcgaggagttggggagcataggaaatattccggtccatgtgatctgagggaggtggcaagaagacctccacctgtgtgggcgttttctttcctgacttctcttatgtgtgccctaggctttcttgggggcctcagagctggggaagaaaggaggaaggttagcatgttgaagttccttcttgagcaacttggggagaagctgataatggaattctgcagagaagagaggagatggaaggggagtttttatttctgggttggctgaggggaatggtaacatttgccatcataactttttacccttcccccactcccagtcctggtcagctgagtggaaatagaaggatttctgctgccatcatcttccatgggctttccaggtatctcccccgcaagggatcctcaattttcacccttaaactggtttccttcattccatgttccaagtaatgccattcttagtaacctatacccaggtttctgtctctgttccatgggctgctgggttgggggccatgggaattgggagaaggggtttctyactttccttccatttttccrccctaccaggtcacacgacctacaagtagggagcagggaaagaagagtgagcctgcatgccaattctaagctcttcaggatcaaagtaagcaaaaaggaggggcaaagagtctccctcccctttaaacagcccatttttccccaagaggtgggaggggcaarttgtttctatgatctgggagaaatgacaggagaaacaagactgatasttggcttagatgataatatagctctggaaacttttttgctcttcagtgggttttgggtttggaagataaggggagacagaatatgaatttgggtgaagggttggggattaggctttgagaaaacagaggtaatagagggtttggaaggaacctgaagtaggaggcactgatacttgtcaaatggggaccccccaccctgagtccctttcaccctgggggcagtgtcgttcgtcctgtccagaatggcagcctgtggaggcacctgcaagaacaaagtgactgtgtccaagcccgtgtgggacttcctgagcaaagagaccccagcccggctggcccggcttcgggaggagcaccgtgtgtccatcctcatagatggcgagacttctgacatctatgttctccagctttccccacagggtcctcccccggcccctccaaatgggctctacctagcccggaaggctctcaaggggctgctaaaagaggcagagaaagagctgaagaaagctcagaggcagggggagctgatgggctgcctggctctggggggtggaggggagcaccctgagatgcaccgygcaggcccaccccctctccgagcagccccacttctgcccccaggagctcgggggctcccccctcctcctccccccctgcccccacctcttcctcctcgccttcgggaggaggcagaagagcaggagagcacctgccccatctgtctgggggagatccagaatgccaagacattggagaagtgccggcattcattctgcgagggctgcatcacccgggctctgcaggtgaaaaaggcctgccccatgtgcggccgcttctatgggcagctggtgggcaaccagccccagaatgggcggatgctggtctctaaggacgccaccctcctactgcccagctatgagaagtacggcaccattgtcatccagtacgtcttcccgcccggtgtccagggggtaagaagaccatggcctgcccttaccctttggctttccccaagctctgacctaggaaaaccgggtgagggtgagtgtgcttgttagatgtgagacagtcttgctgtcttccactgtgccctcctactcagtgccctggacctaggaggtccccgtgaggcccagcctttccatccctgtgatcccaaggcacacgtgaaaatcagatatgagctaggaaaaaaaaaagcaaatcagatatgagaggaaggaattgcatattatttccttgatgaacacaaatactgtgctgacatcttggcagaggtaaattctgtggaggtggtggcttaggggaagggaggcacaataggaagggatctgaccaacccaacagagccaggagcatcactctgtaaaaacaggagtagtcaaggcctataggtgtcttcctgctggacaaagagtaatgtgcaattctggctgcagaggggtgaagaagctgcacagaagagtgatggaaaatggaacaagttagacagtggcagaaacattaggagtattttcaggtgaagggaaggctgaaagatagattattctgtcttcacatttttgctgagttgtctggagtgtagggaccagctaacttccatcacttctgagaatccatttgttgctgaatggagacttgagggattgagacagcagaaaaaatctcttaacacataaggattatgctctgaaacaggctcttgctgccgaggccgtataatctctccttctgtggaaagctgtcagcctgttgctgccccgttcgcattagctgggggtgctcagacagagactagcctggatgaccctcctctggcatctgggccttaggatgcctggctgctcactgcccactctgcttcaccttcctcccaggctgaacacccaaacccaggagttcggtatcctggcaccacacgggtggcctacctcccggactgccctgagggcaacaaggtgctgaccctgttccgcaaggcgtttgaccagcgtctcaccttcactatcggcacgtccatgaccacagggagaccgaatgtcatcacctggaacgacatccaccacaagaccagctgcacagggggaccccagctgtgcgacccctcttcatttcctttcccttggctcctcccctttgttccatttccactgagggacccaccaacccctcgytcacggagcctcctaactggagagaaccacttccaaactgttcagccatctcagtttctcctacattcaacctggtcctggtgtgcccagcttagcctacaaaaataagcagaactgggctaaattatcttggatttggaggtgtcctcccttaggggaggtggggaggtgtctgagccacctagaatgagggtgagcatggggataatagcaagttcaaacagctaacaaccctcaccctcatttctctttgctcccaggtttgggtacccagaccccacctacctgacccgggtgcaagaggagctgagagcgaagggtatcacagatgactgaaggacatcgcctttgccaaggcccctgctgtctgcctctactaggacccagcagaagcctctttctcctctctgccccctgccccccacaccacacctgtaggggacctgtctgactgggaagggagttccgagagggagggggcaatcccttcccccatcccccactggccaagtgtttcaatgcagtgtgagccrctcccttctggcagaggccgacctccaaggctctgttctcccctccccgtgtacatatactcccggtttccctgcccctccattgcccttggctttttctggtatgtgctgtgctccacgaccaagccgagaaaggacctagggtggggaagggagggtctcttgattcctaaccgcccccacatactgctccaccgctgaacttcgggtgccggggaggagaaattgggctgatgtgagctccccgtcacccgccatggagccggctgtgtgtgttcatcagatacagttctcccttaaccttgtcctttctctcctgtgtctcagtctccgtcagtctgtctttctccgctcttctctgacccctgtgaggaacctccttaccctgttctggaatcgctgccagactgtagcttttaatttaataaaaataaagtaaaatatgcaactctttatgccacacccgttcttttccagggactgggtgggggtggggtggggagagggacctgctggaaaggggagaggggatgatggggtgatccctgcgtgcactcccagtccctctgcctcctgaggacctggggaaacgggatgcaccagcgggctctgtagtaacactgagaaaccctgggtcacttcgatgttggaattagtattaagagggtgtttttttgttgttcaactatggttgtagagaaaacaaccctagccactctgcgaagtttggctggggtgggagtgggggcggagccgggcagggggcggattccgcagcagcaactccccggacgcgcgcaggcctcaaagccccccagcttcagtgccccctcgaccctgaaacttggagcagggtgggggttcagtatgaagcccccggaccgccccgcccctggccgcactgaccggatactgggggtcatggggggcatgctgcgcgcatgcgccctccctgggcaggagggggtaagaatgggggctcgcggtggggtcgggggtctttcggggccttcaggagggctgcacccacaactcaacttatccgaaaacgagttctgcggggcagtcgcaggaatacatgaattctattacgagggccatagccccgttctgggcgagccttttataacaatgtgggttttgacaggtaggagaaggggaagggggaggtcagggctgcctaggagggcaggttccttacagtggttctgtccccgcagcccccaaggagaagccctctagggttggtgggtaccgagccagagtctgaacgtacggagggagatcacagaagggatcgcgaacatgaggtcctcgccggggctctgcagcccggtaagaagctgggggtggggtggggcacagtttgctatcctgcgccaagtggcgaattcaaaaatattctattcttattagcataaagttcgcatctaatttgcatgagacccatttaatcgcagagacctccactcttcttgccttcgagtccaatgtgtgtcccccatcccagtcgatcccgagccctcgcaggcagagtgtccccgcgccccacccctggcccctcgccagcccgggctccaggacttcgccttaattggcgattagtcttagctggagtcccggggcctggaggaaagaagggtcctgagagagggcggcatctgggttgtgttcacccacaaaagactccccatacacgcaccccgtaccagggggcctctgtccactcggccggggacagccccaaacccagaacatcttcgcacaggccaaggccccatccactgagtcctccttcatcgcagaggccaaggggagacctgggcagaccctgcagacaggctgaaccccgaccccagcgctccgcagagcccgggatgcgagagggagggggaccccggggcaggggagcacgggctggggaggggaaaaagcgctggggacgtggagtgggaacgtggtggtgtctgggggaggggcgatcggggcgggaacccggcgcaggcaggagggggaacgcgatggagagggcggagctgggccgcagaggccccgcctcgtggcggccccgcggccaggcctgttattcagctctccgctccgctgggacccgcacagcgccagtggctcgggggtcggccctcgcctcctccccggcccgggcctagagccacccctaaccagaggccggagacagctggagcggctgccgcatcccggcccagcctcccctaccatccctcccccttccactggacatctggaccctaggcccccgcaccgacagggttccggaaaccctccccgcccagcccggcggccgggccccgcgcctctctctctctagagcccccagccctcctcaagactagacttccgcctacccctggacacctcctcccggtcccctccctccccccctcccacagcctggaccggggtaggagggagggggggtgtgcgcccggcgccgtccccgccccgccccccgtgattccccctgcatggccggcccgggtggggggcgcgggggggcccgggcgccatgcggggggggcacaaagggggtcgctgtgcctgtccccgtgtgatccgaaaagtgctggcaaaatgcggctgctgcttcgcccgggggggacgtggtgagtgccaggtcgagagggtccagtgttgagtggggggcgggctgggggttcagggcatctgtttgccctggcccttgggatttagggttggagactgtatgtgttttccaggaaagtggtttcttaagtgatccctaaggtcccttctgcctccaaatttctgttagttcaagttaaggaaataggggaaggggcagggaactcatctctttccctttgtcaaatgggtttgagaaaaacccacccacaatccccttaggcctagaaccgattattttcctcaaaccttttgctaagaatctacttctgaagagggacaggagaatggaggaatgagaatgaggtggttctacaaggggctttataaggaatcacagctctctgtcgctgagcacaggccaacgataaccctgatggaccctcctcactggcctcctctattgggtctacgcatgtgttggggaggtgggctgcagaagtcttttctttttatagtgattactgcaattggtggaggaggggactgggagtggcagatggacccagctcatcctcccctcttcccagagaatggtctgtacccattgaaagagggagggttgtaggagagcagatggccacccccagcttccaatgtctgcccagatggctgcccccacccccatatctatgctatgctcaggatatggggaacctccacatgtaactgggggttccaggcctggagagccaggcgtttaccttactgtgctttctcccaggggtgccctggtgaaattttctatcctggccaactcaaatgaggatggcaagagagtgagcccttggagagagaggctgagcatcatgaagagaagaccctgggagttccctggggaccctgagtctggagctggggcaaggtctatcacctcctctctttttcctcccattagaatcctattccattgcgggcagtgaggggagtatatcggcttctgctgcctccggtctggctgccccctctggccccagctctggcctcagctctggcccctgttccccaggccccccagggcccgtcagtggcctgaggagatggttggatcattccaaacattgtctcagtgtggaaactgaggcagacagtggtcaggcaggaccatatgaggtgagcagggaacggcaccaaagcatgtgggacatctatgaaggacactggcagagagggcaagttggggccacccagctactgtccccgacctctgacacttgatttctggcccccagaactggatgttggagccagctctagccacaggagaggagctgccggaactgaccttgctgaccacactgttggagggccctggagataagacgcaggtgtgaggacaggctctggggaggctcctttcactcaaggggcattcgtttgctcaccctaggatgttctttccttccagccacctgaagaggagactttgtcccaagcccctgagagtgaggaggaacagaagaagaaggctctggaaaggagtatgtaagtgtccacagcccttccctgcagttgcacaacttccagaagactgtccctcacattttagatggaatttcctccaaggttggctatgatgataaaggggaggagggaggaacgggctgaaccaaggatgagctccgacgctgaagtgggggcctcctcctgctttcatcctaggtatgtcctgagtgaactggtagaaacagagaaaatgtacgtggacgacttggggcagattgtggaggtagctccctttaccccttcccagcccctcctgcctgcttttccatctgcccagggctattttcaggaggtgcctgggcgctcctctgtcccacctctcaagcctccccactcctggaccttcctactctgggggcagggcggctcccaccagggagggggaggtggaacacaccctggatttgtgtacaggagcaccattaaggtggggagagggccaccacatgctcatgacccaacctcaactttcccacagggttatatggccaccatggctgctcagggggtccccgagagtcttcgaggccgtgacaggattgtgtttgggaatatccagcaaatctatgagtggcaccgagagtgagtggtggaactctgacagctaggtgctggagaggggccctcatctggttgtcctgtatcctaacatcagcccattgcgacttaaggaatgtttggagaagttttgtagggcacactaccagggcagacagctcgaaactgctgggagtgggcgaggtgggggttgtgaaatgtatttgacctgctgcttctctaccaacccctccagctatttcttgcaagagctacaacggtgtctgaaagatcctgattggctggctcagctattcatcaaacacgtgaggcttgagggggcagggcctggggcggggcttaggaatgggctgggattctctggagatgcgtcctccctccttgcccaccctgctctctcttaaacattacccctgttaggagcgccggctgcatatgtatgtggtgtactgtcagaataagcccaagtcagagcatgtggtgtcagagtttggggacagctactttgaggtcagtagctgagatgtcttggtgggaaggaggacagaactggggctttccaggctgcataaccaccctgtccctgtccccaggagctccggcagcagctggggcaccgcctgcagctgaacgacctcctcatcaaacctgtgcagcggatcatgaaataccagctgctgctcaaggtcaggaccccctttttcctgggggcacagctggctggcacagctgtttcctcattcatctccccagggttcttagggctcccccagacttcctgagggccctcactggtgtcctcaggggaggatgtgagagcttctaagggtgtcctcgtgacctccctgagcatttcttctctctgtcttaggattttctcaagtattacaatagagctgggatggatactgcagacctagaggtgaggaccccagatcttccaggacacaccatgtgctccttatcctcctagtatctcatgggttcccccagccccttgggtggtttacagctgtctggtttttagggggaggctggttggggttgagataccgtctgaagaggcaactggctgaggaggcctctttcccaataatgactctcttcgcccaacaatgcgcctccctcacctgtgtcccagcaagctgtggaggtcatgtgctttgtgcccaagcgctgcaacgatatgatgacgctggggagattgcggggatttgaggtacggagatagggcaagaaactggaggcccgatgctcttctgccccagccctagcattcaggaggtccttatggggagttgtcttctcctggggctgaccccatggttggttgggcatgtcaggcgaggaagggaggagcagagaattgtcctttttcttgttctttttccaaggccactatccttttggtttcagggcaaactgactgctcaggggaagctcttgggccaggacactttctgggtcaccgagcctgaggctggagggctgctgtcttcccgaggtcgagagaggcgcgtcttcctctttgagcaaatcatcatcttcagtgaagccctgggaggaggagtgagaggtggaacacagcctggatatgtatacaagaacagcattaaggtggggagaaggccacgagggagggcttggagagagagagggcatgaggcctctgagaggatgtctcagaggagccagggagg

SEQ ID NO: 98122 - DNA, 53246 bp, Homo sapiens
aaagtataaaagaaaatctagcaccttcttcggggcggagagaattttgagcactagccatctctcggtcgctggctaataaaggactcctgaattcatctcagagtgtggcgtttctctataactcgctcggttacaacgcggagagccaatgtaaagttggtgctgctgctagtatcacccttgatgttggggagtggggacatgcccctaactgcatctttgcctgcagcagctacccgtaaaccaaaactaaactttaagccccccaactgtcggaatggaccccacattttggccaacaggatcccaaagaaacttaaaaaactagttcaggccaaggcaggaaggaagggtctgacatgcctcattatacccttctccctttggagtatatttattcattttttttttgagacaaggtcttgctatgctgccctggcaggagtccggttgtgcaaacacagctcactgcagccttgacctccaggctcaacaatcctcccacttcagccttccaagtagcttggggctaccagcacatgtatgcctggctagttttttcagtttagtagagaagtctcactatgttgcccaggctggtctcgaactcttggcctcaagtgatcctctggccttagtctcccaaagtgctgggattataggcgtgagccaccccacctggtgatcctctggagtttagacacaactgaccagcatgaacattaaaacacagatagtaagactgacaaaacaaactctctgtagcaataagataccaaattccaaactgattctggtatagcaccatatgacagatagcaggccctaaaggaaatcaaagtattttaccccaaaagatatttctttgacatattttgaaatggccctgcaaaactctcttgtggggggaaatttgcattctgtagagaaatctcttccccacactaagtcttttctggaaagtctgacaccttttaaggtcagataacagacattcaccatcaattctctctgaagccagctacctggaggcttcatctacatgacaagaaccttagcttcagctgggtgcagcacctcacgcctgtaatcccagcactttgggaggccaaggcgggcagatcatcagatcaggggtcgagaccagcctggccaacatggtgaaaccatctctactaaaaatacaaaaattagcagggcatggtggcaggcgcctgtaatcccagctactcgggaggctgaggcaggagaatcgcttgaacctggaaggtggaggttgcagtgagccaatattgcaccattgcactccagcctgggcaacaagaacgacactctgtctccaaaaaaaaaaaaaaaaaaaccttggcttccacaaccctccttatcttaactcaagctgacttcaattcttcaggcagagtttaactctttcaatcaattgccagtcaggaaatctttgaatccacctagaacctagaacccccaccccctttctgggcaaaccaatgtataccttacttgtattgatttatgtttttgcctgtaacttctgtctccccaaaatgtataaaacgaagctgtaacccaaccaccttggacgcatgttctcagaacttcctgaggctgtgtcaggtgccatggtctttaaccttagcaaaataaacctctaaattaattgagacttgtctcagatactttttgttttttcaagatggagtctcactctgttgcccaggctggagcacagttctgtgatctccgcttactgcaacctccgcctccagggttcaagtgattctcctgcctcagcttccagagtagctgagattacaggcgtccaacaccatactcagctaattgtttgtatttttagtagagatggggtttcaccatgttggtcaggttggtctcaaactcctgacctcaaatgatccacctgcctcagcctcccaaagggctgggattataggtgtgggccaccacacctggcctcagatactttttggtttacatgcctctaactcactctccttcctttcatagccaatttcttgtaacagttgtctcttcttttgggctccatttcctaatctcccattccaattttaattccatactacatcatactactaaattccatatcacatcacacataatcttgctaagatcacagaagaccttcacgttgctaaattcagtgagtattttttagtcctcactccctcccagaagcattctcctcttttggtctcctttattttattctcttagttttcctcgtctctgcctgcttagctttctttgcaactgttcttatttttcctagtcattaaatattagcaatctttggggctctggtcttttgtcttcttactctacagtctccttaactgatccccttcagttgcttcaattactactatgagccagtaactcccaaatctcctgcttacgcccatacacagaaccgtgttcttgttatcaacccaatcattcaaactcaacgtgttcaaaataaaactcatgctcttgacttcttacttcactccccaaccatctttttcactgatagtttcactcctactacagtaaatggtaccatcatttagagttgttcaaggactccaaaactgctcttcaaccctcctatttctctctgcctctacatcaccacccaaatccaggccctatcagatcacaccaggattaccgtaacattctcctaacaggtctcccaaatctactcttactccctccaatccaagttcttttttatttttttgagacggagtcttgctctgtcacccaagctggagtgcagtgatgcaatcctgagtcactgcaacctctgctcccgggttcaaacgattctcctgcttcagtctcccaaatagctggaattacaggtgcccgccaccaggccagagaaatttttgtatttttagtagagatggggtttcactatgttggccaggctggtcttgaactcccaacctcaagtgatctgcccgtgtgggcctcccaaagtgttgggattaccggcatgagccactgcgcttggcccctccaatccatgttctaaaaggtagccagagacagtcttttaaaactcaaaaacttctttaaaactcattttcctttttacaaacctttaatgatttctttttgtcctatgacagtattggaaaaattctaacaggccagtgtaccccgataagaggttgtagtgtttcctcaagttacggttttgggaggctgtcagaaaccatgatagactgctggtttgaatcatgttttaccaggacttgttaaactcctgtgctccaagtcttttggcagctgatcccgcatgctcaagagcacccctgacaacgtggacacttggagggttctcaccatccaagaagatgtcacattacttagcctttaaaacctgagtgaggccgggcactgtggctcactctgtaatcccagcactttgggacgccgaatttggcggataacttgaggtcaggaatttgagaccagcctggccagcatggtgaaaccccgtctctactaaaaatacaaaaattagcccggcgtggtggtgcacgtctgtaatcccagctactcaggaggctgaggcaggagaatcacttgagcccaggaggcagaggttgcagtgagctgagattgtgccattgcactccagcctggccgacaagagataaactccgttccagaaaaaaaatccccaaaacaaaaaacccaattgagtcaattctaatagttttgtgtatttttagtctccaaccagcactattttatggagagagaataggaaacaaagaatctagctaggggaagcgtgcaaaaacctttggttaagactaagttgtaaatggaacaacccaaatgtccatcaactgatgaacggataaacaaaatgtatatccatacaacagagtatcattcaaccataaaaaggaatgacgttctgctaggtgcaaatacatgcatgaactttgaaaacattatgctaagtgcaaaaagtcagacacaacaaacatattgtatgattctagttacaggaaatgcccagaatacgcaaatacctggagacagagagtagattagtgtttctctaaggctaggagtagtgggtaataggtagcgtctgctaacgggtgcaagttttattagatagtgtgatggttgtggccgggagccgtggctcacgcctgtaatcccagcactctgggaggccaaggagggtggatcacgaggtcaggagatcgagaccaccctggctaacacggtgaaaccccgtctctactaaaaatacaaaaaattagccgggcgtgggggcggtcacctgtagtcccagctactcgggaggctgaggcaggagaatggcgtgaacctgggaggcggaggttgcaatgagccgagattgggccactgcactccagcctgggcgacagagcgagactccgcctcaaaaaaaaaaaaaaaaaaaaagatagtgtgatggttgcacaaccttgtgaacatactaaaacccactgaattgtgcactttaaaagggtgaattttatagtatgtgaagtacatctctaaaaagaaaaaacagaacaggctgtgtggcccaactgatttatcactactcttagaaggaagcccaatttaaaattgaacagaataaggcctgcaaggctcccgtgacttggtccctgcctacctctcttaaacaaataaataaaatgtatactatgtagaaacaataacaaaaaaaaggcagagcaaggtatggggcagttctggtgccagagggtttgttatttaaataaagtggtcggaaatcatgcgtcgctgataaggtgacaacagtcagaagcctgaaaaagttaaggggtaagcaatataaatatttaagtgcttcctcataactttgctcactccactccagctaaatttgccacaatttctgtttcctccatctgaaatgctctccctccttattcttccattcttcctctggttcacttctactcctgtagttcttggtaacaaacggaacatttgtggagtgagggggggggatccatttccttcaaggcgcagtttggaggtcacttcctcagggaagccttcccttctctctttccctttaaagctcccagtatagcatcttccagtacttacttgaaccgtaatgggtcatttttaacgtctgatccccttcagacaagctctggcaggcccttgacgtatccccagcgactaagcaccacgtctggcacttaataggggggtggaatgggagtcctggattcaaagtttggctccaacacaagacaactggacgcaagaggtgagcccactgtgatttctggggaacccagggaagggctgcttgattgactgaccgaccagcagtgagatctacaggctctctcagagctgcgccagcgccgagtccccggccccacatacttagaaccccgtaatggggctcaaaatcactgaacctcgggctcctaatccccaacggcgcatttccaacccccaggcctgacctgcaggttccgggtgataaggtgcagtttctcttcagggctgggagcgtcccccatggctccgctacccctgcttcccccgctcagcccggcaccagagccccttcctgggtcaccgtcgccgccgcgtgccgggaactgtcacgcgagtccagccaggttgcatcagctgggctcggcgctccgcttactcggcctggacccctccggcagcggccggaaaaagtgaggagcagcagagagtcgagcaggtcgatgagacgggaaaaggtggagccagtgggcacggtgggcggtgcggagggcggggctgaggcgcctgagcggggcacaaccctcctagaggcgggacggtttcctgccaatcactgctggtttgccctccccctggtgttggcccggctgactcggggtaggggaggtcggggagggggcgataaaatggcgcagggggcggagtgaggcgcagtcgttcgcccaggctttggcccggcttccggaggtgaagagcgggagggacgagggggtcggcgttacccggcttggagggggatgggggcgcctgttgcttctccagggggttgcgcacgccgtccgccccttggagggattgggaggcccacgccctgctgcgagaagggcgcgttctagctcctgaggtgatggcgagggaatgtccctgcccctccacctccaagtcggcgggcgacagatgcccctcaccccgctgaggaaaagggaagctccctggtcgtcttgagagtcggggagcgccgtctgcagtcccctgcccastgggggtgggggccgcctctgtcccggccggctcggcgggaggctgttgctggcgggaagatagccgcgggcttttctgccgcgtctcgcgggtgggggcaggaagaggacgacccattccctggggagatctgaggacggtggtccccgggagaggagcgcacagcacaggcctgctgaggggcgggtttgcccctactgggggaggggcggggagaaaactctcgcttctcccgctttccgccgggaggcgggaattcgcggtgtccccgggggagggagacgcaaaggcccttcctggaaggcgacaccgtcccgggccgttgcatttgtgagagagagccaaggcagtatcctccaaaggttgggcctgggccaccctttctccggctcctcaagggctggaggcggcgtcaccagttacttccagggcaagagggaaagcagttattacctcagtgggccctggaaaggtcctagaagtggttgaattgcccacggcctgccctaacctgatctccggtgttttgtgtatttattagggactccaagctctaccagacctgcctgaagtgttttaaagcacattttctttttgaaaagaaacctgttgctgcagcttagcgcatctgttctctgtgtccatgtgggaggagaatcctggcacyctcatctagtgaaatgttacctaaagcaaagatttgcagccctgggttgttttttccgtcctgcagtgtttttagttacttcgaaggaatttgcaaaactgttacagataatttcagttctttttgattttttgtaaatgttgtgcctattttttatggagtgataaagcctgctgagtgcgtttcgtgctgtgtgcttcacatgtattgcatttgggaaaggttggaaatcaaaggccagggggargtcttgtccactggaaataatctctgctcttggctgtacctgtcagaccctgcttggtaatggtcttgactttagagcttgaaagaggatgtgggcttgcatctggtgttgcagttttagtggcctcaataaagtaaggctttgtgctcgaaggcagtaggttttctgaggtgagataaaaatagaaagggaaccagtttctgaggttgcaaccaggaggttcgagaacagagagggggtggtaaactgaagtgtgaagaagggggtggacaggtgagagagatgtggaaggacagaatggggtcacagaaaggatggggtgtagaggaactaagaaatagaattagaagatcggaaaaatattcttcccttaaaaatgaagggatatggccagacatggtggctcacgcctgtaatcccagcacttggggaggccgaggccggaggattgcttgaggccaggagttcaagactagactggccaacatagcaaaaccccatctctactgtaaatacaaaaattagcctagcatggtggacgcctgtaatcccagctactgggaggctgtggcatgagaatcgcttgaaactgggaggcagaggttgcagtgagcccagatcacgccactgcatttcagcctgggtgattgagtgagaccctgtctcaaaaataaaaataaaataaaaaaataaaggggtccccatattttaagtggaggttaccagacaagtgctaagaaaggtggtagatggtagacagagaagtaagcaagccttcttttgacagagaagtaataagtaaggctgtctttggaatttcactgaagaacttcagttttatatgaggatttccccccttgcacattcattaaataccatgtttttttagtatagaacttttaggtttagagtactttcataaacatcctattttttctcatgataatctgtgtttgaagttaacagtatttaccccctttttagatgcatgttctcatctgtattgaagttcagagacttgaagtgaattgctgaggtccagtacctctataaaggatagttcagtgaacattaatttgcataatttgccggatatttcagatgtctacctagtctggtcttcagtgacaatatggttgagtgctggattaaactagataagagtagagtatattagataatttcaagcagggtctaggggaaattccctaccagtttagcactcttttttcctaccgttcctatgctttttttttttttttttttttgagatggagtctcgctctgtcacccaggctggagtgcagtggtgcgatctcagttcactgcaacctccgcttcctgggttccagcgattctcctgcttcagcctcccaagtagctgggattacaggcatgcaccacacacccggctaatctttgtatttttagtagagacagggtttcaccatgttggccaggctggtcttgaactcctgacctcaggtgatccacccacctcagcctcccaaagtgctgggattacaggaatcagcctctgcgcctggccctatgcttctcttaagactccagggatcggggcaatgatggtggtggggtgaaataataactatggccaccagttatttgtctcttatgccatgcctctagtgtgccacatttatgttcacgatctcatttaattcttgccacaaccctatcaggtaggtactgtgatatatgaggacatttgatacttcacagagtataatcattgtatctttcccattgacttcataattttaagatgtttttattatttcaagcatataaaaaagtatagtggctgggtatggtggctcaatgcctgtaatcccagcactttggaaaaccaatgcagaaggatcgcttgactccaggagttcaataccagcctgggcaacataatgagactatgtctctacaaaaaataaaaataaaaaattagctgtgtatggtggtgtgtacctgtagtcccagcagccctggggttcaaggctgcagtgagctatgatcacgccactgttttctgcctgggcaacaaacctgagaccctgtctcaaaaaaataacaataatttaacagtgtaaaagtaacataataatgaacattattatacctagcatgctgctttgtcttaggttgccatatttgtttcaggtctcttcttgctatttttttttccttatttatttattgtcatgtagcctaagatgagatattgttttcttaagaaataaaacattggccgggcgcggtggttcacacctgtaatcccagcactttgggaggctgaggcggacggatcacgaggtcaggagatcaagaccatcctgaattccggcctttcatgcatattttaataattttgtgatatatgtatccatacataatacgtggtattgtggcttttttgttgttgttttttgagactgactcttgctctgtcacccaggctggagtgcagtggcgcggtctgggctcactgcaacctctgcctcctgggttcaaacagttcccctgcctcagcctctcgaatagctggggttataggtgcgcgccaccaagcccagctaatttttgtacttttagtagagttggggtttcaccaggttggtccagatggtctcgaactcctgacctcgtgatccgccctcctcggcctcccaaagtgctaggattacaggcgtgagccactgcgcctggcctgtttcttttttctttctttcttttttttttttttgatacagttttactctgtcacccaggctggagtgtagtggtgcgatctctgcccactgcaacctccgcctcctgggtttcagcgagtctcctgcctcagacttctgaatagctggggctacaggcccgcgtcaccatgcccagctaaattttctttgtagttttagtagaaatggggttccgccatgttggtcaggctggtctcgaactcctggcctcaagtgatccgcccaacttagcctccgaaagtgctgggattacaggcgtaagccatctcgcgtattgtttttttaataaagtaattgcagggggaaaagatctgaaatttttagattaaaatacacataagacattatcagccagtcacattgtatggaccttacttggatactgattattttttagccttaaaaaaaaatatgacataagataattggaaatctgaactgtatattttatgataaggaattcttgttatttacagatgaaatgatacaatgcctgggatttgcttcaaaacaatctggtaaaggtgggaagtggatggggcaagattagctatgagttgatagtcattggggttgagtgatgggtatgtggtggttcattatactattatgttacttatgtatatgttttactttctttataataagtacttttgaaaatgaggaaatggccgggcgcggtggctcacgcctgtaatcccagcactttgggaggccgaggcgggcggatcacctgaggtcaggagatcaagaccatcctggctaacactgtgaaaccccgtctctactaaaaatacaaaaattagccgggcgtggtggcgggcgcctgcagtcccagctactcgggaggctgagtgaagcaggagaatggtgtgaacccgggaggcagacagagcttgcagtgagccgagatcgcgccactgcactccagtctgggctacagagctagactccgtttcaaaaaaaaaaaaaaaaaaagaggaagtaacatcagacatcagaaagagaatggtttgtacaaattaaaattatctcctcctctctatatataccatatatatggtattgttttgtatacttttgttcccagatctattggaacataagaagctcagaaaagcccatttttttgcatctgaatgtcatgttgtgtaggaattgattattgcaatggttacgaaggatattggtcctattaaggtggcttaaaatattttttccaagagaccaaaagccctctttggtctttactcttgcacagtttgttatagattgtactgaatttagaaggcctgagtttggattctagctctgccatttgctgaccaatcctgtgcaagtctgtcacagatgtagtgggaaaaacattgcatttggaattagacctgggtttcgatccttgttctaacattattagctatgtatactcagttaagttacttcatgcttctgaactttagtttcccaagagggaaaaatctattgaactctccatttggccaaccaagggcttgaactagaccttttgtaaggagttagaatggggggcaatggcccagaaagggcatctaagaaatgtagctgcttaaccccagtgcctgtgataacctgtgtctgacaaccataaattttcttaagtcaaagaatgttttccatactaaacttttttttctaactgcttcctaaagaaatgaataactcagtcactaatgcagagaaattacttttcatagaggcagctgcttcaacacctagaactctcaacaattgctggaatatagtattggtaaaataaaataagttttagcagctctaggtttaaatacaacaaaatgatttctttgataagattaattttacagaattgtgttgagaggctaagttagagtcgtaaaatgtgtctcagagcacctggtttataataggtatttagtatttctttttctcccatttcatttctaatatgagtaagtttaactaggtcccttctaattctagaactctataatccctccctttgcttctctttctctagtactttattgtccataccattttatattatctcatgttggtgtttaattttcagtgttgtttctctagcaagattatacattaagattatacattacgtattatacattatgagggcaggagctataccttgatttgttggaaatcataaagagacatatgcagcttgtggtgtgtgatgattgtagctcaaaaaatatcttctaaaagaatgcatgaactaggctgggtgcagtggctcacgcctataatcccagcactttgggaggccgaggcaggcggatcacaaggtcaggagatggagaccatcctggctaacacagtgaaaccccatctctactaaaaatacaacaaattagccgggcgtggtggcggtcacctgtagtcccagctactcgggaggctgaggcaggagaatggcgtgaacctgggaggcggagcttgcagtgagccaagatcgcaagatcgtgccactgcactctagcctgggcaacagagtgagactccgtctcaraaaaaaaaaaaaaaggaatgcatgaactaaagttaaagctcagggtgtggtatggagggtcatggagtaggggaaattttatagttaacaaggctacaagtacttttccaaatttttgagttcagtatttaagcatttcttatacttctcagatatgtgaaatactagcattttatcacctttcccatctggaaaataattatagattaggtctgtcattagctgtttaaaaactaggttttaattatacaactaactaaatattcaagtagaaaagtaaaatgatacaaagtccaaccttgacctacctttatggtccctgcgagttataatagtcatcaatttttgtttgtatcttttttttttttcttttgagacagggtcttgctctgtcaccctggctgkagtgcagcgatatgatgactgctctctgcagccttgacctcccatcctcaagtgatccyctcacctcagccccatgagtagctggaactataggcgtgtgccaccatgygccgctgatttttctgtttttttgtagagacagcatttcacgttgtgcccaggcttgtgtttgtatctctaatgaccttttttttttttttgcattttttctatacatatatatatatatatataaagatttgtgtgtgtgtgatcatgattaatttttagatttttggtggaaccttagacattgcctagcaccccttttccatccctttcccattttgtaaatgaggaaacaagtctaaatggtcaagtggcatacccaagttattggagctggctagtgatacaaccaggactacaccccaggtctttggactcccatgccagtattcatcctamtaaagtagatgatagtcttaagaaagtacaaattgttgggaggaacaaaactagtttgcttagttgcataatttttttttctttgaagatttctttggtgtgcttgactcagaaaatccaactttctggtattacaaaaaaaatcaagattaaaattaatacatcgagcaccttaaagcataatacagttgactttgtaattagcagagttgaaagtgatgagaagatcctctaattttctttttgcctgcaggaaggtgggagtcaatcattttgacaagtctcctgaaaggaacagctagcaggaactgaaacctttttccatttggtctcgtggcaaaggcagagattgctccagcagctccacacagtatggaagacagttatttaccttcttgtgttctcgaattttgttttatttcaaaagtaatacatttttgttttgtgttaaagtgtaaactgaatattcagacattttacataatatacatttgttttgtttgtatgttgtagatatcattccatgatagtacayacagatctacttcattgtgtttttaaataattgaaaagtactccatagcacaaacataccatgatttactgaacagttctcttggtaatagacatttaggttgcctccaggatttggctactttgaacatccatgtatatatatatgaagttctagaagtgaaattgctgggtcaaatggtrtagtcaaattactcttcacaaaatatcgtactgacttaacgcttttactgatagtgtgtgaatgctcgtttctccacatcctcaccaatccagattatcatggcatcttaattatcaccattttgataggcaaaagtatctcattgttctaacgtgtatttccatgtttctggtaaggttaaatatcttaaaattatttcttatgctacaagtcacagtgcaaagattttgaaatactagaacattacccacatatagtggactggagttggtataaggttattttctcttcctcagtgaaattgtctcttatttctccagaaatgatgtgctcacgggtgccctctgaacagtcttctggtacctctctcttgcctaaagacggtgccccattttcttgggattccttggatgaggatggattggatgactccttgctggagctgtcagagggagaagaagatgatggtgatgtaaattacacagaggaagagattgatgcactgttgaaggaagatgacccatcatatgagcagtcttctggggaagatgatggtgggcatgttgagaagggagaaagagggagtcaaattctacttgatactccccgagagaaaaattcatcgtacarcctgggaccagtagctgagactcctgacctcttcaaactacctcagctaagtacatcaagtggtcatggaccagctcatactaaaccattaaacagacgctctgtactagaaaagaatcttataaaagtaactgttgcaccatttaatccaacagtttgtgatgctctgcttgataaggaygagactgattcgtccaaagatactgaaaaactctcttcccttggagaagagatgagagaagatggtcttagcccaaatgaaagcaaactttgtactgaatctgaagggatcagccccaataactctgcctggaatgggccccagctctcttcttcaaacaataactttcaacagactgtctctgataaaaatatgcctgacagtgagaaccctacgtctgtattctctcggatctcagaccattcagagactcctaatatggagttatcctgcagaaatggtggttcacacaagtcaagttgtgaaatgagatctctggttgtttccacctcatcaaacaaagtaagtatattttattcaaggtgaagagaaaaatgaaattatttttattcagatgtatagcagagtttccatatacctgctatctccacacatacacaacttcccctgctgtgggcatcctacaccacagtggtacatttgttataatctggcagagctttgtattcagacaaattggggtttgaatcctgactagcactgtgaccctgggctaattatttagcctctatgtttccccacatttcttatctaaattggagtaaataatacttcatagtataataaggattaatgaaataatgtatttatatcacctggcacgtaatattaaattaccctctgttgaataattactaagatggtaattctgttatttttcttgtctttgggcttcagcctatgtctcaatctttattgccatgctatatattaagatacagcactagctctgaatcagccatgaaagagctgaaaaatcttgggcaatttatctaacctttttgagcccgattccctatctgccaaatgagtgtaataatccctgccacgtagggtttcttttttttttcttgagatagagtcttactctgtccctcaggctgcagtgcagtggcacgatctcggctcactgcaactcccgcctctcgggttcaagcaattctcctgtctcagtctcgagtagctgggattacaaacatgcaccaccatgcccagctaatttttgtattttagtggagacggtgtttcaccatgttggccaggatggtctcgaactcctgacctcaggtgatccacccgccttggcctcccaaagtgttgggattataggcatgagccactacacctggccagggttttttttttttttttttttttaagattacagaaaaagattacagttatctcatttgaagcactactgttatacgtggtacacagtagtgttcacgaataggcttttgtagcctttagttaaaaaatatttccataaatagtgttttcagtgcttttcttataactaagaatcacctttccttttgcattccttttcctcaaaaaagcaggatgttcttaacaaggattctgggaagatgaaaggccatgagagaagactaggcaaagtcattcctgttctacaaactaagaccaggtaatgtaaagtataattaaatattctgatttattttggttctcttcaatttctttcttcccctctccagtttcctcttagtgcagggaaaaaaatccctactccaggagtaagcaaacttgaagttctagcactaccaactatgtgacttttggcaagtcaattaatctcttacctcagtttttatgcatgaaataaggctaatgatgcctcctctgctgcttgacagggttattttgaaagcaaaatagacatattagcgaaaacactacaaaggtaagatatcttctcctgtgcatggggcagcctggtcacatatatgataagaggttagaataattttaacgaaaatgttaaaatacaagtagtagaaaatcattttgttgtccctcccaacttgcatacaactacccttgcggaaaaattccagtaggggttgcaaatttgcgtcatcttttcaatttattctctggttgccaggagatggcagtatctttacatggtccttttaaattgaatctactagaaaaagctttttttaaaatgttggatcagattagcttccttacagtgagatttaaaaaaattcttttgattatacatttattacattaattttgcttaaaaaatttaattaggccgggcgcggtggctcacacctgtaatcccagcactttgggaggctgaggtgggccaattgctagaactcaggagttcagtaccaatctgcgcaacatggcaagacgccacctctactaaaaatacaaaaaaatacccaggtgtggtggtgcacacctgtggtcccagctacgaggaagactgaggtgggaagattgcttgagcccargggacagaggttgcactgagccgagatcatgccactgcayaccagcctgggagactgaccttgtataaaaaataaaataaaaatttaaattattacaaacaaggctaaagtttcctttgactatcatcccgaatcccagtttcctggttttttattttgtttgcataattgagagaaaccttgtgaattgcttacaatgtaagtgataatcaaaagctcacaactcaggctacttgggacagtaataaatttgcaatctcaatattctcatccactgattcttagtacagtcagtcagtatgagtatgggccagaaattgctctcaccaaggtcaccattgctctgatggccagatctagtgattcttttcagtctttatcccatttaacttttcagtttcactctagaaagctattttctgactaaccttgaattactcaataaatactttctctagggactagtaatcttcacctttctattccttgttagcaggaggttgtatctatttccttctcttcgtctttttttaaattatttgatttttttagagacagggtctcaytctgtggcccaagctggaatacagtggtgtgatcatagctcacagcagccttgaactcgtggactcaagtcatcctccctcctcagcctcctgagtagctaggactacaggcacatgcagccatgtccagctaattttttaaaaaaatttcttgggtctcactgtgttgccctgactggtctcaaattcctagcctcaagcagtcctcctgcctgatactcccagagtgctgggattacaggtgtgagccaccacacccagcttctcttctttttctcttgattccatactccattttagttttttttgtgtatgactaatactgtcctctgcctctcgatcataaagataattttgcctctgaaacttagttctaatcaatcagcagtatatcacttctctctacaaaacgctatattcctgtttctaatgggctgtttttcttttttctggtttgctttattcaaggactaatgttccgacgttttcacagtcaaatctagaacrgcagaagcagctttatctcaggagtgtcattgctcatatagaagacccagaggacactaaccaaggtaacatggtacccagagaaaggcatataaaacatgtgatgtgactttctctttccggtgtaacagcttaaactgggagattgtttagaattttcttaaattcttgagaaagataacttccttacttaaaagattttcacttaaaaggattgcctaaccagataattctcgaagtggtttggttaaccagttttagagagggatctaagcacgtttacaacagtacatgaaaggtgcctccctcatggttgagggctttaacccagaccggtacatttttgctagggatttttttgtctgaaaaataacggaagtggatgaccaggtgctgcttactaatcagtggtttttaaaatttgaaatgttttatttctcctgttaccttcagcatttaaaagcaggcatttcaaacaccattctgcattttggcttctgaataaaagctcttgaaaggtttggctaccttccagatccttcaagttgtgttctccccacttcattagaagatattgcaaaccaaagtgactagattctttctccagctctcaagagastacagtccatgttatcattcagcctgaactattggctgatgggaaagctcctaaaggggagacttacgggaagaactgaaggtgaagaggttagagaggttttatactgataaaagaatcacttattaaaaagatcactccaggctaggcatggtggctcatgcctgtaatctcagcacttttggaggcagaggcaggcaggtcatttgaggccaggagtttaagaccagcctggccagcatggcaaaaccccatctctactaaaactataaaaattagccggatcatattcttttgggaaaaaaaaaattagccaggcgtggtggcacatgcctataatcctagctactcaggtggctgaggcacaacaatcacttgaacccgggaggcagaggttgcagtgagccaagatcatgccgtcgcactttaacatgggtgacagaatgagactctgtctcaaaaaaaaaaaaaaatcactccatattctgtcatcttcattcattcagcaaactttctcgagtatttcagtcgtggtagttttgaagataaggaattggaaatggaaatgtaaagaggagtaagatagggtcttggccctctgggaattcatagcctagagaagaagataattatactgcagtattgattagagttctaatagaattacatataaagtacagtaggagcagggaaggagcccttctgcttgtgtttgggaaaagtggaagatggggaaggaggatgccctaggtgagctccacagagaagataattagtttaattactctaagatctattgtaaatcactggggagggttttaggagaatttttggtccttttgcagaggagactcttctttcttttgacaaatcttgaattatgtagtagtttttcttgtttgttttataagattatgatgagacatcagtcagaagaattttttatcccgtatccttttatttttcactgaatatttcataagcaaccaaatattacttacactgatttcttagccctctgcttgtgagatccctttgctagaactattttaggtctgatagaagtagagaaacctctcctctccacctctccccccatcattggaggggcaaatttaaaagaaacctgtctatattcaagctctgtggaacaggcctagtcatgtcattgcttttccctctgtgagctgactcctttttttatatcctaggcagttgacactgatgatatccagttatgttttctctcatttggagcatttaaataaaatttcccaagaaaagcaaagagcagctgttcacactataacatcattttcaatcttttccccattcagcagttcctttcccagtattaccacaacaatctatatcccatgaagaatagctagaataactatagtgaataggcagcatactttagtggttgagagagtaaagtctagtctagagttaacatctgggttcacatcttggcaccactgcttactggctgggtgagccattaaatattgatttgtaaaattgggataatgacaaggcttaacttacatgaaaattatacgggtataaagcatagaacagtacctagctctagtaactaacatttattgaatagttgctgttaccagcaagaaaggatattttttcatactgaagttttttttttaggtaaaatagcgttatatctagtgtttgtttttaaatcacagccaaaaaatactggaaacagctttgataaaatgttgataaatgaaggtgagtggtgagtacactttctacttttgtgtatatttgacaatttccataattaaaaagttgttttttaagcacgtcttttagggcattcatttttttcagcattacaaattactctaaaaatttcacagacctctggcacttccttctgccttccaggaacccagtataatatgaagtttttctatcacttcccattgcccagtattcctacatccaaaatcataagatttgtatataccttattgcaagggcgggggtggtatgttcttcacctttcctccatttgtatgtgaattatagtgcagccagaagcacaaaaggggagcgtagtacttcttgtcctccttccttttgagatgtttattgcatttaaccttgaaaaagtgtaattcttcaggttatcagacacagagaaattagtaaggagtagattcaaatgtagttcttgccagttcagtttgaatcctctccattgggttagttatctcttttcactttatcaataatgtatatattattgatgtagaatgtaacaaagtaaatcatccttcaactccattattctaatgtaagtataatctctttagtttagtgccccatgggttttttttttataataacacttaaaaagaaataccaacaacttcctttctggtatccctgcaaatggaaaactttctatgaaattataagtacttaaagtagaaaaggatcattaagagcttctctttaatctcctaacacataagtctgttctatatatttttgccaagtgaccgtttagcctttgcttagagttctaataatgcaaaacgcattacctcataaggcaggtcatkcattgcttagaaaattttagttgttagaacgttattccttacgttgagtcaaacgtggcttccctataacttctagtggtagttcctagttctgccctctagcatcatgaaaaataactttgttctgtctttcattttttattattttcttttttttttttttggagacagagtctgctgcccagactggagtgcagtggcgcgatctcggctcactgcagcctctccctcccgggttcaagcgattctcttgcctcagcctcctgagtagctgggaccacaggcgcagacaaccacacctggttaatttttgtatttttagtagagacacggtttcaccattttggccaggctggtctcgaactcctggcctcaagtgatccgcccaccttggcctcccaaagtgctgggattacaggcgtgagacagcacccagcccattttttattctttcagacattagaaataatgattctctctcctacaaagaaaaaaacttaaaatcacctataaatctatcctgccacctagaaataacaaaattaacattttgataattatctttcctgtaaggtagaatatatacagggaaattacatattaatagtttataatctgctttctttgtacttaatgtattttaaggaccttttcatgtaaaatatttgaaattaagatttttaatgattacaaagtattttattatataatttatttcatcttggtaaattagattgtgtccattttcattagtaatgctgcagtgaacattctggtcaataaatgtttatgtacaattcttatttctataggatgaatccctagaagtggaattgctgggtaaagtatataaacatttaaaaaactgttacatgttaccagatggtcctgccccaaaaaattgtattaatttttagtgtcaccaatttgataggtaaattttaacatattttgttttaataattggtcaggttaaatgttttttgtttattgataatttatatttaatcataatttttaaaaaatcatgtaatatatattccatattccaatttccttagttgtcccaaaaatatattcttgtaactttggtgaaatagcatctaatcaaagttcacatttagttattgtctccttaatctcttttaatttaggtcacttgttttatagattgtcccacattctgaattttgtctgtttcttgtggtatcatttaatttgttcctccattctctgtatttcctgtaaactagaagctgggtccagaggtgggattagattcaaattaagtgtttttggcagggataattcctaggtgctattgtgtattcatcctacactataccctacactatatccttctaatcaaatcagcaggcatatatgacacttaatgacaggttgttccacaaatagtaatactaagtttgttaaggtgttaactgccatgtcttcccattgtaaagtacatttacccctttttaattagtaaattatctgtggggtgatgctttggtaccatgtgaatatcctgttccccaacaactaactgttcacctaattgcttgagcatttattgatgatccttgcttgaatgagctgctgcactgggagttacatagaaaatgttcttttttggccaggcgcagtggctcatgcctgtaatcccagcactttgggaggctgaggcagatggatcatctgaggtcaggagttcaagaccagcctgactaacatgatgaaacctgtctctactaaaaatataaaaattagctgggcgtggtggtgggcgcctgtaatcccagctactcgggaggctgaggcaggagaatctcttgaacccaagaggcagaagttgtagtgagcgaagatcaggccattgcactccagcctgggcaacgagcaaaattccatctcaaaagaaaaaaatgttcattttctaaatatataatttcttctacagttattaactagcattcttttgtaaagattttctattactttactattactataacctcatggatttttttaaagaatcaatatgttgtaatcaattatagctactgttcttggtttttctttttgatgctcaatttgtctcaaatttgataaatgggagctccttcaagatgactcttgttcctattgacatgatcccattaatctttttttttaattgtggtaaaaaaaatacatctaacataaaattaccatcttaaccatttttaagtgcacaattcagtaatgttacatatattcacattgttgtgaaacatatctccagaacctcttcatcttgcaaatctaaaactctatacctacacaacagttccccctctctcccttcagtctctggtaaccaccattctactttctttttttttaaatatgactactttagataccttttataagtggaatcatacaatatttatctttttgtgactggcttatttcgtttagtataatgtcttcaagatttacccattgtggcatgtgacaggatttccttcctttttaaatatttttatttttattttttttctatttttctcaccactcaatttccttcctttttaaggctgaataatattccattgtatatatacacaccattttgtttaatccattcatctgtcagtagacatttgggttgcttccacttcttggctattgtgaattgtgccactatgaacatgggtctacagatatctctttaagaccctatttttaattcttctggatatatatgcagaagtgggattgctggaccatatggtaggtctgtttttaattttttgaggaacttcatactgtttttcatagcagttgcaccattttgcagtcctaccaacagtgcacaagagttctaatttttccccatccttgccagcacttatttttttgtgctttttttttttttttgaggctggagtctcgccytgtcatccaggctggagtgcagtggtacagtcttggctcactgcaacccctacctcccacattcaagtgattctcgtgcctcagcctcccaagtagctgggactacaggcgcactccaccacgtctggctaatttttgtattttagtagagatggggttttgccatgttggtcaggctggtctcgaactcctgagctcaagtgatctccccatctcggcctcccaaagtgctgggattgcaggtgtgaaccactgtgcctggcttgtgtttttgtttttgtttgtttttttttatagtagctatcctaaagggtgttaaatcagtattcattgtttttgtgtcccaactaagtattgttcactgaaaagccaagtagtatattatggcttcattttctttcttgaattgtttatttttgtagagttgttaattgcttcagtttctttcattaaattttttttttgggagagctttttcctagagccttctgttctactgctccaatttgcactgcttgttctttagccctgcaacagagctgtcatcccaggattttcctctgctgccctcctgggttgaatcctgtttcttggatcctatatcttcctctttcttatttttggttttagtagaggacatcctctgagaatatctaagaaagggtgcatagatgttttctttgtgtttacatatctgaacatgtctttattctatcctcatacttgattgatagtttgatataaaattctaaatttaaaatcaatttttgctcagaaatttgaagacatggccaggcgcagtggctcacgcctgtaatcccagcactttgggaggctgaggtgggcggatcccaaggtcaagagttcgagaccagtctggccaatatggtgaaaccccatctctactaaaaaaaaaacatacaaaaattagccgggtgtggtggcgggtgcctgtagtccagcctgggcaacaaaacaagactccatctcaaaaaaaaaaaaaaaaaaaaagaaatttgaagacattcagtattgctcttaagaagtctgaagtctgttataagtttaacttttatttctttgtatgtcatctgtctttttctctctggaagttctttttgtttgtttgtttgtttttgagacagtctcgccctgttgcccaggctggagtgcagcggcgtaatctgagctcactgcagcctccacctcccaggttcaagcagttctcctgcctcagcctcctagctgggattataggcaccggccacctgcctgtaatcccagctactcgggaggctgaggcaggagaatcacttgaacccgggaggtggaggttgcggtgagccgagatcgcgccattgcactccggcctgggcaacaaaagcaaaactccgtctcaaaaaaaaaaaaaaaaaagataataagcatattggactaaaaactttctttgtgcacctttgtaattcctcccttctgcctatctctgcccsctctaatccccaggcaagattgaccactgatctagtgtctactgcagttagtttgcattttctaaagttttatgtgatggaatcatacactatgtactcttttgagtctggcttctttgtctcaagataattattttgaaattcatccatgttgcatgtttatttctttttattgctgagtagtattccattatatagatttatccctaagtgaatgtttacccattcacttagatgggcatttggcttatgttcaatttttggctatgacagataaaactgttaggaacattcatgcacaaatctttgtatatatatgcttttatttttcttaagtaaatatctagagtaaaatgactgggtcatacggtaggtgtgtgtttaactttttgagaaactgccagctgggtgcggtggctcacgcctgtaatcccagcacttttggaggccgaggcgggcggatcacgaggtcaggagatcgagaccatcctggctaacacggtgaaactccgtctctactaaaaatacaaaaaattagctgcgcgtggctcctgtagtctcagctactcgagaggctgaggcaggagaatggcatgaacccgggaggcggagctttcagtgagccgagatagcgccactgcagtccggcctgggcgaaagagcgagactctgtctcaaaaaaaaaaaaaaaaaaaagaaaagaaaagaaactgccaaactgttcccaagtagttgtaccgtttttcatttctattagcagttgtatgaattccggttgcccccagccttaccaacaattgggtatggtcactattttaaaatgtttcccccaactttttaattataaaatacacataatatacacataaccatctttttaaaacctctttataaaaacgttttggctgggtgcagtggctcacgcctgtaatcccagcactttgggaggctggggtgggcagatcacctgaggtcaggagttcaagaccagcctggccaacgtggtgaaaccccgtctctactaaaaatacaaaaattaaccaggcgtggtggcaggtgcctgcaatcccagctactctggaggctgaggcaggagaatcgctggaacccaggaggcagaggttgcagtgagctgagatcatgccattgcacttcagcctgggtgacaagagtgaaactccgtctcaaaaaaaaaaaaaaagttgtaagtgtacatttcagtggtattaagtatattcatattgttgtacagccatcaccatatccatttcaataatttcttggtcttgcacatctgaagctttgttttttatttttttaaagatgaaggtcttgctgtatttcccaggttaggctcaaacacctaggcttaagcagtcctcctcctcagcctcctgagtgtctgagactacaggcacacatcgctgcacccactacaaatccatagctctatacccattaaacaataactccccattcccctcccccttgagcccctgacaaccaccattccactttatgtgtttatgaatttgactactctaggtacctcacataagtggagtcagacaaagtggtatttgtcttttcgtgactggcttatttcacttagcacaatgtcctcaagattcatgtttgttgttgcatgtgtcagaatctccttcctttttaagacttaataatacagcatatggataccacattttgattatccatttatatatcaatggacacttggtttgcttccaccttttagctttgtgaataatgccgttatgcatatgcatctacacgtatctttttgagaccctgcttgcaattcttacataccaagaagagaagaggaattgctagatcatatgctaattctatttttatttttatttttgacatggagtctagctctgtcacccaggctggagtgcagtggcacaaccgtagtgcagtacagcctcaaactcctggcatcagtctcctgaataaggttaaactacaggtgcacaccaccatgcctggctaatttctttttatttttagagacggggtctcactgtgttgctcaggctggttgtgaactcctgggctcaaactatcctcccaccccagcctcttgagtaactgggattataggtgtgtaccactgcacccagactattttcttttacttatttgttttttgagacagggtctctgtcactgaggttggagtacagtggtgtgatcttgattcactgcaacttctgcctcccaggctcaagcaatcctcccacctgagcctcccgagtagctgggactacaggctcaccaccacacctgactaattttttgttttgttttgtttttttgagatggagtcttgctctgttgctcaggctggagtgcagcggtgcaatctcagctcactgcaacctctgcctcccaggttcaagcgattctcctgtctcagcctcctgagtagctgggataacaggtgtgcatccaccatatccggctaatttttgtatttttagtagaggtggggttttaccatgttggccaggctgggcttgaactcctgacctcaagtgatccacccaccttggcctcccaaagcactgggattacaggcttgagccaccgcactcggcctaattttttgtatttttggtagagaccgtgttttaccatgccaccgcacctggccccctattttctgtttgtttgtttattttattttgaggcagagtcttgctctgttgcccaagctggaatgcaatggcatgatcttggctcgctacaacctccccctcctgggttcaagcaattctccctgcctcagtctcccamgtagctgggattacaggcacccgccaccacgcctggctaatttttgtatttttagtagagacagggttttgccatgttggccaggctggtttcgaactcctgacctcaggtgatccgcctgcctcggcctcccaaagtgctgggattacaggtgtgagccaccacgcccgacctattttctatttttcaatgggagtcatcctaatgggtgtraagtggtcagtttttataattttagactttctaatatatgtgtagtgatatctcattgtagttttcatttgcattttcctaatgagtaataatgttgagcatcttttcatgtgcttatttgccacctgtatatcttctttggtgaagtattttttgctcatttaaaaaattggattattttcggccaggcgcggtggctcaagcctgtaatcccagcactttgggaggccgaggtgggcggatcacgagatcaggagattgaggccgtcctggctaacacggtgaaaccccgtctctactaaaaatacaaaaaaagtagctgggcatggtggcgggtgcctgtagtcccagctactcaggaggctgaggcaggagaatggcgtgaacccgggagacggagcttgcagtgaaccgagattgtgccactgcacttcagcctgggcgacagagcaagattccatctcaaaaaaaaaaaaaawaaaaaaaattggattattttcttattactgagtttcgagagttctttaaatacatgttccaaatgcaagtttctttgccagataagtaatttggaaatattttctcccagtatatgccttgtcttttcattcccataagtgtcttctaaagaacataattcttagttttgatgaagtaagtttgtttatttttatttatttatttatttttcttggtagtcactggttatagtagatgaagtaagtttaatcaggtttttaaaaattttatgggtgggaagcagtggctcacacctgtaatcccggcactttgggaggccaaggcaggcagatcacctgaggtcgggagtttgagaccagcctgaccaacatggagaaagcccatctctactaaaaatacaaaattagctgggcgtwgtggcgcatgcctgtaatcctagctactcgggaggctgaggcaggagaattgcttgaacccggaaagtaaagattgctgtgggccgagatagcaccattgcactccagcctgggcaacaagagcaaaactctgtctcaaaaaaaaaaaaaaaaaaaaaaaattacggattatgctttcatgtggtatctaaraaatctttgcttaaaagaaaaggccacaaaaattttctcctatgtttttttctagaggttttatagctttagggattacatttagatctatgatccttttaaaatttattctgtatgtagtgcaagatatggattaaagcctgtaatcccagcactttgggaggctcaggtgggaagattgcttgagcccaagagtttgagaccagcctgggcaatgtggtgaaaccttgcctctaccaaaaaaaaattaaaaggttagccgggcatggtgacatacacctgtagtccttgctactcagaaggctaaggcaggaggattgcttaagcccagaaragggaggttgcattgatgcaccactgcactccagcctgggtgacagagtgtaagactgtctcaaaaaaaaaaaaaaaaaaaacatatatatatatatatgtatatatatatatayacacacacacacacacacacacgtgggaatgtaaggcttattttcttggcacatggatattcaattgcttctttaccatttattgaaaagactgtccattctgcattgaattgcctttgtacctttgtcaaaaatcawttgtctctagaaaaatcaggtttccaggaaaaaaaagactaatgtgttccactagtgttcttatttttcagttgtgttggcttttgtagattctttgcatttccatataaattttagaattagcgtatcaatttcttaaggcttggtgggatttccattgggattgtattgagtctatataaataaataaaactgagagakaattaacattttattttatttttttgagatggagtctcactctgttgcctaggctgtcgtgcggtggtgcgatctcagctcactgcaacctctgcctccgagattcaagcaattctcctgcctcagtctcccaagtagctgggattacaaatgcctgccactacactcagcttaatttttttatttttaatacagacagggtttcaccaagttggccaggctgttctcgagctcttgacttcaagtgatcagccctcctcagcctcccaaagtgctgagattacgggtgtgagcccccgcgcctgactgagaattaacattttaatattgagtgttttgattaaagtcttctctaatttccttcataaatgttttgtagcttttgtacagtcttgcacatcttttatccaatttatcccggagtgtttcatattgtgatgcttttgtaaaatgatttagtttttaaaatttcagtatctgttcattgctattatatagaaatgtaattgatttttgtgtcttggtcttacattctataaccttcctaaattcttttattagttttagtaactttttaatagatttcatcaggttttccctgtaggttatcttattgtcagcaaataaagaaatttttacttgtttctttctgacttggatgccttttattttcttttctggtgctgcctagaacctccagttaagtacaaatgagatcttttctttttgtttgttgttgttgttgttgttgttgttgttgagacaagaatctcgctctgttgcccagactggagtgcagtggcgtgatctcagctcactgcaacctcagcctcctgagtagctgggactacaggcatgagccaccacacccggctaatttttttttttttgagatgaagtttcactcttcttgccaggctggagtgcgatggcacaatctcggctcacgaaaacctccgccttccatgttcaagcgattctccttcagcctcctgaatagctgggattacaggcatgtgccactgtatctggctaattttgtacttttagtagagacagggtttctccatattggtcaggctggtctcgaactcccgacctcaagtgatccgaccaccttggcctctcaaagtgctgggattacaggtgtgagccaccgcacatggcctaattttttgtatttttagtaaagacggggtttcaccatgttagccaggatggtctcgatctcctgacctcatgatctgcccgtcttggcctcccaaagtggtgggattacaggcgtgagccaccatgcccggctgagatcttttcccatccccttgttgactttttttttctttttttgagatggagtctcgctgtgtcacccaaactggagtgcagtggctcgatctcagctcactgcagtctccgccttccaggttcaagtgattctcctgcctcagcctcccgagtagctgggactacaggcgcctgccacyatgcctggctaatttttttgtatttttagtagagacagggtttcaccatgttggccaggctggtcttgaactcctgaccttaggtgatccgcccacttcggcctccgcaattgctgggattacaggtgtgagccactgtgcccagccaattttttgtatttttagcagaggtggggttttgctatattggccaggctggtctcgaatttctggcctcaagtatctgcctgcctctgcctcccaaagtgttggggttacaggtgtgagccattgtgcccgaacctgttactgattttagaaaaacatttggaactgggcacggtggctcatgcctgtaatcccagtgctttgggaggccaatgtgggaggatcacttgtgcctagcctaggttacagagcaaaccctgttttgttactaatttttatgagatggggtctggttctgtcccccaggctagagtgcagtggggccatcacagcttactgcagcctctacctccttagctcaagtaatactcttacctcggcctccagagtagctacaggcacgtgccactatgcctagctaatttttaaatttttttgtagagatggtctccagctttggcctcccaaagtaatgggattatgagcatgagccaccatgcccttcctgttttctgatttctattccgagatagagatatatatagatatctatagatagagatatatatctctgtatagatctatagagagatatatatctctatatatctatatatatatatctttttttgagatggactctcgctctgttgcccaggctggagtgcagtggcgtgatctcggctcactgcaagctgtgcctcccgggttcacgccattctcctgcctcagcctcccgagtagctgggactacaggcaccccccaccatgcccggctaatttttttgtatttttattwtttatttatttatttatttaatttatttttgaggtggagtctcgctgttgcccaggctggagtgcagtggcgcgatcttggctcactgcaggctccgctccccaggttcacgccattctcctgcgtcagcctcctgagtagctgggactacaggcgcccgccacctcacccggctaattttttgtatttttagtagagacggggtttcaccacgttagctgtgttagccaggatggtctcgatctcctggcctttcttttttaaaaaatagagacagtagccgagtgttgtggtggcacatacttgtagtcccagctacttgggaggctgaggtgggaggaacccttgaacccaggaggctgagtgaaccaatgtcgtgtcacggcactccagcctaggtgacggagtgagaccctgtctcaaaaaaaaaaagttaaatagagatggtatctcactgttacccaggctagtctcgaactcttggcctcccaaagtgccacaattacaggcatgagtcaccatgcctggccttgttttctagctttttaatgtggaagatcagatcattgatcttgagaactttctattttctctaagcattttaagccataggctcccctttaggcactgctagctgcatcccacacattttgatatgttttcattttcwttttttttttttttaagataaagccttgctctgtcacccagcctgagtgcagtggtacaatcatggttcactgtagcatcaacctcccgggctcgtgatcttcctacctcagcctcccaagtagctgggactacaggtgtgtgccgccaagcctggctaattttttgtattttttgtagagatggggttttgccatgttgcccacgctggtctcaaactccygggctcaagtgatctatccacctcggcctcccaaagtgctaggattacaggtgtgagccactgggccttgccttaattaatttatttttttatttttttttgagatggagtctcactctatcacccaggctggagtgcaatagtgtggtcttggcttactgcaacccccacctcctgggttcaagcaattctcctgcctcagcctcctgagtagctgggactacaggtgcatgccactacacccggcttattttgtagttttttagtagagatggggtttcactgtgttggccaggctggtcttgaactcctgacctcatgatctgcctgcctcggcctcccaaagtgctgggattacaggcatgagccaccacgcctgccctccttaatttacttttatgtttaaagtaaatgtcttatagagagcatataattggtagctgggtcttgctttttttttttttttccagtctcacaatctcagtctttaattggagcattaatccatttacatttaatgtacaatcccatatggctggatttaaatctgccatcgtgttacttgttttctatttgttttttgtttccacttccatctttccctgactcatttaatttttgtagtattttttagtattccattttatctccatacttactgcctatacctctttgttgtatttttattatcttattaaatttattattattattatggagatgggatctcactctgttgcctaggctagagtgcagtaacatgattatagctcactgtagtcttgacctcctggcctcaagcaagcctcccacctcatccttcaaagtgttgggattacaggcatgttatttttactttaaacagtaaattatctttcttttttttttttttgagacggagtttcactcttgtcgcccaggctgtagtgcagtggtgcgatctcagctcaccgcaacctccgcctccaggttcaagcgattctcctgcctcagcctccctagtagctaggattacaggcatgtgctaccacacctggctaattttgtatttttagtagagacggggtttctccatgttggtcaggctggtctcgaactcccaacctcaggtgatccgcccaccttggcctcccaaagtgctgggattacaggcatgagccaccgtgcctggccgtaacagtaaattatcttttaaagacatcatctaaataggaaaaatagccttttatatgcactcacatacttacatttccagtgcttttgattattttgtatagatccaagtttcgatgtgatattattttcctttttcctaatgaacaacttgtaatgtttgttgtagtgcacatctactgatgaagtctctctgcttttatttagaacctgtttattttgccttcatttaaaaaactttttattttgaaaaattatagacttataagaagtttcaagactcacctcagttgtttctctttcctcggggatcacaattttcagtagtctgaaagcactkgtttcataattttgcctagtttctagtagcttacagtgagaggttaagtcccccattcatcttagctacaagtggaaatatctgctttgatttttattgaagatcataaacagcaatggttatataaattctgattctgaatttcccagtactgttgaggacattcatatatcattcagtatcccctgtatcacttcataagtgaattacataataactcctgtttcttctactttttcccttgcctgcaaggaaaatcagtcaagatttctactagatcatcgcagttttgttgacctagaggtgacacatttgcattcttgccttctacttattttttcttttcatttatattttattaatctatttataaaagcagtagcccatgtcccctgtagcacattttttctttccttctctcttcattccctccctggtattaagtactttacattgcatggaatagagayattatgatagcctttaagtaactgagtttaaggatttacaggaaaagatgattagatgagacttttcaccaggtctcgtagtgaaaagaattaaccgtagagccgaactacacgctccgtcagaaatgtgtgcctctaactaggtgctgcagctcacacctgtaatcccagcactttgggaggccaaggtgggtggatcatgaagtcaggagttcgagaccagcctcgccaagatggtgaaaccccatctctactaaaaatacaaaaattagccgagtatggtggcgggcacctgtaatcccagctactcgggaggctgaggcaggagaattgcttgaaaccggaaggcagagtttgcagtgagccaatatcgagtcactgcactccagcctgggcaaaagagcgaaactctgtctcaaaaaaaaataaagaaaaaagaaatgagtgcctctgttccctattgggattttccctaatctaatctgcttctgtgaccagtacttttgctgctatttagctatctcaagtaactgtttttcctagagccctgcatgtgtactgttctctcttgttctcattactaaagctcacattgacatttcaaagaagagtatctgattggtttacttaatgacctgctggtaccaggcagccttctaggtcattatgtcattagccagctgagagagtctctgttctttggtcaygtgccacacttgattgagttagggtcatgtgggtggtaaaaagtattatgtcctataaaacctgtcagaattggcatagcaggtactcagcattatccrtcctcctccattatgatataaaaattgattcactttaaacttactaagaacagttattaaactggatgtttccccaaaaccagtcaccttcatatttatagattaagatttagatgaattgttgacgtcattcctgaaatattgggggtttttccctcctttatttcattcttagtcacaaaacaaaggacagtctttaccacctttttgccacaacttaaaataaacccatggtactgattgttggtccaagaaagcccatctgttagagactatgaagagaagagaaaattcaaatgttcccattcttgttagcatctctaaatttggaggaagatgaggttcaaactataagctaaaatgaggtttttggattattagccccacctgggtttgaatcctgrctttcctgatttactagatgatagatgagtatcttttctttctttttttttcttttttttttggagacagtgtcttgctctgtcactcaggttggagtgcagtggtatgatcatggctcactgcagcctccacctcatgggctcaggtgatcctcccacctcagccccctggagtcgatgggactacaggtgtgtactaccacacccgggtactttttgtagagacggggtttcaccatgttgcccaggctggtcttgaactcctgggctcaagccatccgcctgcctcggcctcccaaagtgctgggaaagtatttttttctaagcttcagtttacttgtgaataaaatggaggttatagagtttgccatctgtgattgttagaattaaattgtaggatacatgcaaagcagttagcaaagtacgtagcacgtaagaagtgcttgataaatgttagctcccattatctctagatcattaagtcttattcataataagagttaggctagtctaacaataagttagttattagtgctaaggaaaattaaaattttttggtacatgagctgagatctaattattgagccattgtttacaagagacatatggctatatgatttttactttctaatctcaactatgaaatgttgctcccagaaaattttttaaggaaagtcaatcctatgatagttttatattgttggaattctggctttgtcattasasatgtgactttgggcaaattagttaacttttctgtgcctcggtttctttacagttttatatacttttgtctgtaaagcggggaaaataccttataggattgttgtaaagaataaatgagttgatatatataaactagcacataggacagtgcctttatttatttatttaaacaggcttgatatataatgttatataaattgctgctgctggatttgattcctagaagttaaatatttgaatattaggcccctttggctaactggctattcttctcatcatttaatgtgaatagatatgtttttagatttattatctttagtttccattgccagattaattttctaaaatgcaggtgataagaaatgagtgagctgaaggacatgttctatagataatcttgtggttccattttgatggacacagaatttccatatattgctagccctcctttgtgaagctttggtaggaaaaatgtatcttgaaatttttataaagctgattctcccctcccctgcctcccactgaaatgtcctttttgggtgaccacagggagtggagtgctagcgaggtgaaagtggggtattggaaaggcaatttgaattgagacctttgattttagctttacaaatccagcaggtaaggaattttctaatcaagagttacttcccttcatgaggaaactcatttctgatttatttttccttctcaaggagtgacagtaatgccttttctttccatgaatgagattgaacattgtttttatcatgtttattgatcacttgtaataattttgcaagttgtctattcatgcccttgaccttttttaaaaaataaagagactgtagataaaggacattaaacttttgccaagtatgtttcaaatatatttttcattttgtcaattatgtttcatttggtcgtgcttttttaacagtagagaaacttttaatgaaatctataaatttttcctaaaaagtgttatggttagaaaaatatttgagtgccataaaatgtcatagtttatgtgtggatggatccatttaataaacgtttttccttaaaatttcacaggatttgcagagtctttgcaagctaacatagacctgaggtgctaacatcataatagctaccactcactgcacacacgctgtgtgccatagcaatgtgctaggtcttttacgttcaatattcctaaaactcagcttcaagctaaattgtattatctgcttttcatagatgagtagtgagccctgaagaagtgaaataatttgcccagggtcacagagctaattgatggattggaattttaactcaactctgcctaactccaaagtatacagtatactttctctacaaagctctactttttgaggcttcaaataaattacatttatcctaaaagtgacattacttttactagaacttgaaaatatgagtctgtagcctactgagactgcttttgattcccgaaagcacagtagataaggtaatgaaaaacatgtaaacgagctgaaaagtctccactgtctagggctttgattttcaaagtgtgcttctcagctgggcatagtaactcamgyctgtaatcccagcactttgagagagcaaggtgggtggatcacttgaggtcaggagttcaagaacagcctggccaacatggtgaaaccctgtctctactaaaaatacaaaaattagccaggcatggtggcaggcgcctgtaatcccagctacttaggaggctgaggcaggagaatcacttgaacccgggaggaggaggttgcggtgagccgagatcacaccactgcactccagcctgggtgacagagtgagactccatctcccaccccactacccacaaaaaaaagaaaaaaaaagtgtttcttagaccaccagcattagcatcacttgggaatttgcttgaaatgcaaattctcaggccctacccagatctgtagttttctgattatgtataatcagaaagtctggaggctaggcccagcaatctgttttacaatacctccagttgattataatgtatgttaaaatttgcgaaccactggtctagggaaattatttcctaactagtgttttatttctgcttctattgagttttagcctaagtctcaatcgttgagtgcaaaattagcattattgcatagtggcaaggacatggagtcacacaggagctagttgaatcctgggtcatcaagaatttcagggccatgcatggtggctcacacctgtaatcctagcactttgggaggatcatttgaggtcaggaattggagtccagcctcgccaacatgatgaaaccccatctctactaaaaatataaaaattagcctggcatggtgataggcgcctgtagtcccagctacccaggaggctgaggcaggggaatcacttgaacccargaggcagaggttgcagtgaaccgaaatcatgccattgcactctagcctggacgacagagcaagactctgtctcaaaaaaaaaaaaagtatttcaggcaagttcacctcccatagtttcccatctttgaaatgatattaataacatctatctccatgtaagattttttttagaattaagtaagataatatgtaaagtgtctagtacattgctaggatcccaggtgtttgagaaattgcatctagcaatttttcttgttagcaaagagcgcccacctccatctgttctaaactcctcttgtttcttgaatgtatttgctgtcttktgtctctggggctttgtattaactgttatcttttggcatccaacctcctacccctctttacctcactaattttatacatcctttagatccctgctatagttactccccctggagggggctttccctaacccccacccccccagtctctatagcagtctgtatttctatcactgcatttatcacaccactttggaatcatctgtctcctgtataaacttcattgaggtagtgtcttgttcactgccatattcctagggacaagtaaagttccctgtatattgtaggagctaagtgttgaatgaatgaatggtggctgctattattgcttcaccttcaccctccaagagtaatctccccattctggtttatagtttctgtgctcactgcttgtgataatygtaagtatatattgttgagaacagtgcctgttttctctttccctgaaaacacatactttgacgttggctgacrtagttcactcagctgttcctaaccactgatccctctgtatcacaggtatctcgggggagcwttgtgccttgatggatcaagttcatcatatgcagcactcaaaatggcagcatccttcggacctcaccacgcggtgagtgggtgattagaagaagatggaaaagggtagaatggctgggcgcggtggctcacacctgtaatcccagcactttgggtggccaaggtgggtgggtcrtttgagaccatcctggctaacatggtgaaaccccatatctaccaaaaatacaaaaattagctgggtrtggtggcaagcatctgtagtcccagcctcaggaggctgaggcaggacagttgcttgaatctggtggcgaaggttgcagtgagccaagatggtgccactgtactcaagcctgggcggcagagcaagactccgtctaaaaaaaaaaaaagaaaaggcggtggggggggcgcgtgaaatttggctgcaggaggaatgtagtggggagtaggggttggaattgtttaattcaagaggcagggggaaaaagtgatgcagtataatggaataagaactggactgaggctgagcacagtagctcacgcctgtaattccagcactttgggaggccaaggcaggaggattgcttgagcccaggagttcgagaccagcctggccaatgtgagaccccgtcgctacaaaaaatacaaaaacttaactgggcatggtggtgtgtgtctgtagtccctgagagtgcctgagagaaaaggattgcttgaagcccaggagcttgaggctgtgatgagcaatgattgtgccactgcactccagcctgggcaacagggcgagaccctgtctcaaaaaacaaacagacaaaacaaaaactggactgaaattcaggaaacctgagttctaatactagctttgcaacttggtgtcaaaggaccttcctaattctgaaatcttctggaattttttttttttaagactcaaatttagtawtacagttttctggattcttgatgcagtgtggctgtacaaatttattcagttactttgattcagataytcaaaaaccttggaatcatcttttacttttttctctctcaccccatattcagtctatcagcaaatcccataggttctgcatatacagttgtccttggtattcatgagggattagttccaggaccctctctggataccaaaatccacagatgctcacgttccttatataaaatgccatagtgtttgcataacctgtgcacatccttccatatactttaaatcatctctagattacttatgataactaatacagtataaatgctatgcaaatagttgttatactgtattgtttaggaaataatgacaaggaaaaatgtctatacatgttcgatacagatggaaccattcatttttcttctttgaatatttttgacccatggttggttaaatccatggatgtagaacccatggatatggagggtcagctgtatatccaaagcctaactatttctcatcatttgacctggattgttgcaagtctcctaaatgscctccctgcttctgcccttgccagtgcactgttcacaactcagcagccaaagaaagagattcttttaaagcataaatcacatttgctcaatatttcccagtggcttcccatctcacatcttcccattctcgtaatcccctacaaaggcctatatgctttggcctatgctcaccgacctcatctcctaatactcttcctcttgcttcagggcctttacagtcatattccctctgtagttgtcaaaatcatagcatttctcagaaggaaaggcagtgtagtgtaattgttaatagataaattctggagtcagatgtgaattcaaatccagttctgcttactctactctatgaccttgggtaaattattaacctgaggctcaatcaatttccttacctatacaaggacttaatgaaaatactagtaggattgtcacagtattaagtgaggagaggtatttaaagaattcagcaagtacttgcatatagggatagataaatgtcaggtactgttacagttattttcaaccctggcgactactcataattacctgtggagatatctaaaaatacagatgtttgtatcctgattccaggtattctaagtcattaagtctgggaggagggagaggccaagaatccatatctgtatttgttttttctttttctttttttaaattttagaatgcgtatcttcagaaagcttcctagattattaggagcactttcagagtcaaaaatgggatcagattatctcagagcgtcttgctcagaactgcagcccagcacataactaaatgagacttttaagaaattttactgtgagtctgtgctgttaatttttcagtctctaaactcacatgatgacttacctttctgggaatttattctaattttaactgctgtgtcctgagcaaccttgagctgtgtcagacaatgaggtccttttggaggtacaggtgtgatgcaaacaataaaatatagatcctatcctaaattcttctggaggaataaaatggttttttttttctcccctacttaaacattattctacattagttttccttagaatattgtgtatatggcacatatcaccataatacctatgggaattaggtggctttgggagttggaaagaaatagcacttacggtgtggtgttcatataaatgaaatagtataaaatttctaaaattgtgagaattgaaatataaaattaatatctgatttccaaaagtaaagatcttcttaaaattgttgtgctggcctttttttgtgtacaaatagccattctagttgaaatagccttcctgtttgtactctccctctctcgatagaaactacgcccgccgacagaaacatctgcaaagatacagtctgactcagtgggttgacaggaacatgcgaagccaccatcggttccagcgtctcccagacttctcgtacagttaatttgtgtcatcccatcagcaatgaaggtccctatccagggtcctgcttggagcagcatttcatgttcttttgctgttttgtgctttgccgattttggattttatttttcacaaaatttttatttaaaaaactcgtcaccttttggaaatgcccattrccgacttgaatttttttgtatgaagtccctcctgattttgtgtgtgtgtgtctgtgtttaagcaagcgttcggttggtatagtttttttttgtttttttaatttaaattgaaggtagctgcctcctgaaagccagcattaagccagaacacccaggttcaagcaaaagacccacctctctgcagaggcaaagtctactttctggtacctcaaagaaatcattgttcaatcttccataaggaagagattctttaccaggctgtgagccagtgttagataacttgtgaatggatataagttacttttaacaacccctcttacttttttatttgaatcctctgaatacctgtcagtattttaaagttggcaatccaggacattataagtaggatggagcaggagaagaatcctattgaaaggacaaattaaaatagtaaatcctctcctctcccttctgtaggtactagctgccttgatttttttttgtgggtgggggggattttttcattccttattgaacttattttgcacaatagtgtttacaaatcttatacatcttactttgacagaagacttataataccttgtggtcttgagactggttgtctcctttgcctttcttcaaggattttcctttttctttttaccccccagtgaccactctgctctttaggattctagtggcagtattcttgtaacctgttagacgtggatatacctcttcaggatggcctccttgctgtctttattgaagagctgcccacccagagtcttgactctagggcaggctagtgctattgtggtgtcagttgatatttagtttcatttgctgaaccccaaatttgagtgttagttagggagcctccattctgtgggagagtgtggaaaggcactcttttttctccatattagttaacaagaggtgtctttaggccctggatgttaccatctcatttggtcaagcccctgatacctagtttcacatggatgctaacgtggatgtaatatagttgtgacagcctatgcacaaaagcattacctgatcttaaggtttggtattctaaccaaagttgacagactgtgcgtctgtcttaatggatgtcttaggagttggttattctctcttttttttttgagacggagtttcgctgttgttgcccaggctggagtgcaatggcgtatctccactcaccacaacctccgcctcctgggttcaagggattctcctgtcttagcctcctgagtagctgtgattacaggcatgcgccaccatgcctggctaatttcatattttttagtagagacaggatttctccatgttggtcaggctggtcttgaactcctgacctcaggtgatctgcccacctcggcctcctaaagtgctgggattacaggcatgagccactgcacctggccggttattctctctttacagatagctatagacatcattttaggaagtgttgcagtctggcatttgtgctattgttcattctctgtgaaggctgttcatagttgctatagcctgtgtttagttttgtgatttcatcaatcccatctttctgtgtgagtaatgcattctaaacatcctaccccactttagaaacggacgtggggaacgcttggtcatttaagccaacaataaatttaggtgaatgtccctaagtgtttactgtttttatccagtcaaggatttgcttttccttgaacatttgttttaaattctggggccaaaatgcaaaggagaagttctattcaaaggcagtagttgaaatctattattttagttagcctacttggcatttactacatcggtcacttctccaggctgccctaaattaggttgatggagtgagacatgccaaacatccacctttgggaccatagcatagttaaaattaaatgtagttggaatagctagcattgcagctacagtagggaactgtagtctagttccctacagaaaacccaaggagtgaagggacaggattttgcctaggcaaaaatctaagactcgtgccctcctggtacatggggttttaagactgaatgtgtaataggagcactgcctttgccaaatcaaatgagtgacaggttaactagaaaatgtgacaatcacatttcctcttagctcaaataattctgtttttccaaagctttagcagcttaattaaatctgttggactgggggaggagagagctgttctctagtggttaacatggtattctttaagaagaaaaaacaaagccaaagaaaactcattatctggcatgttcgccttaaagatggtastgrgtagaatctggagttttcatctcttttcaaagctgcatatctctyatatttggtattggcctctaagtctaatattgcagttggaattcttgctgtattattttttaagcaagtgttaggtgcatttaactgctttcttcatccatgacgacattcccaccatgggggtcttgacaaagcagagtaaaaatatgctgtttacattgtttacttacaagtaaggagcctgaaataacctgtagtttcgaatgcaggccctgatttactggcgttgtcagtttcaattatgaaactgaagtttggtgcctcctctttatcatgttttttcccttgtagcagttgtgtttaatgtcattaaaaagaaataaaagttctttgtcagtgacatatgtactgtggcggtctgtcgtaggcttcgatggagggttatttgccttcttcctttgcgtaggtaggttagtggggtggggaggggggcggcagttagtagaatgtggtactggaaaggcgagggtgcttgctccctattcttttgaaggtaaattacagtgttgagaaaggtgttctagcagttaagaaatgttgaaattgattgggatttgcagctacatatggtgcatgtcaggagcctgacatagggagagcctgaaatatcattatgcctcagtttttgcagagggggaagatggctcagccgtgatcaggcaggcattgccttttattccttcccatggctgtgtgattggcctccctatctctgcttctccagagctagcattgattgtggaagaagccatgctatccaagagcattctctctttgaaggggatgtaagaaaccagaatcagtggtacagaattgatggttgttcataacccagtttctccagaaactgcggcttctaaaaactgggtgaaggttggataagcgtgggtagatgtgggagacacagtgttccttagatccctttcgtgaaccaaagcttcttagacttacccccagaagcaaggaaaaaagggaaggcaataataacttgtcacctatattagccagtgctttaaaaatctgagttcatgctgagaaaacaagtagcaacatgtttagccatgctatctggcctgctgtgctataagttttgtctataaattctagacaaaatataatattgagtccatgcaaaagactcaatataagtttgctaagtactcagcaacttgacattcttgtctcaatctgaggcactctccttaacctatgcatatctgttttgttcctatcaggtgtagataggatcttttgtccattttacattacggaaaagtgaagaggaaaaggagagatggaccttctccaagaggaagggggtcattctctaattagcctattttgagcttttataggaagaaaaaacccaaccacctaaagctagaaagtggagttccctgcttctcttagtaatgttctgcttttctaagagaaaacaattattcctaagctgattttagtgtatgcttgctttgtatgccagagcacctgtcagggaaaaaaaaaaaaaaattccacttgtcacaggaagtatcagctggtcagtggtggaattcctaaatgaataggctcctgccttgtccttcctccccacctgtcctccccctgtgacaactgggacatgccatagacggaaaatctggcccttcccagcacccattgaaagggggtggaatataatattttggataacctttaaagcagtctaagtgatagtcctgaaatatatcactaaggaactatttgttttgagacagcgtctcactctcttgcccaggctggagtgcaatggcgcgatcttggctcactgcaacctctacctcctgggttcaagtgattttcatgtctcagcctcctgagtagctgggattacaggtgtgcgccaacacacctagttaatttttgtatttttagtagagacagggtttcaccatgttggccaggctggtcttgaactcctggcctcaagtgatctgccccaccttggcctcccaaagtgttggggttataggcgtgagccactgcacctggttaggaactatttgtgtacagttttccttcaacttaacttcaagtcacatttgaaggtttggtaatattttgtatggatggagcttgatggagctgggcaagggaggagggtgagcagggtgtcccatttatagaagcaatttgttcttggaggctacttaaatgcacattccagtaaccatcaaataggtttaaagagagtcagaaatctaaagctcatgttaatgggttggtgagattttgcacatttttgtaaagggttgaaccaaaactcttaaaaatgcattcttgagaaggcccattctgaaaaactaggggacaagagtaggaggagaaaaggactcttgcctcatagaaacactcaccagtctgtcttccttccctcagaccctgaggtttccctcgtgctcctaggaggatgcaccttggctcctattgtaggaagtaggtagagtctgggaatcttctaaattctgtttttggcagataaggacaccacgacctaacctcagagaattaacttgcctgaggtgttaggtgattacaaggcagggtctcctgtctctcagaccagcatttctcccacaggcctgtggtagtctccaagtgaggtctcttggtctcaaagacctgcctgtgcctttccacagttgtgagaaaatgtccatggatctatgtgatggtggtgaaaggatcacatcccaagtctagctgtgtagggttcgactttgcaactacagtggattcagggaaggctcaattgttatacaattgggagtttagggaggtaattaaagggaatggagttttatctaagccaagagtgttacctccttttctctcataccctttatgatgtaccacaggcacagattaagttgaagactggaaacccccattagcagagctccctgagccccactgactatactatacctagtgctgatttgggggcttttccatcatttggcactagatgggtacagagggcctaggaagtacctctctgaggtttggcttagagtcggtgtgcaactcaagtttcctactttgctgtgcagcctctaaaccttctttccctctgctttcaaaacctacagcagtcaactctaagccctgctcaccggacattttctctccaagcttcttcctggctctggacaggaatgttcgaggtaccccatttactggtttttgctccttggctaatgtcatcattactctttcagcctactgttgggatcataatggtgttcctttaacagcctagaacagcacgctgtgaatactgagctgcagaaagcagcttttgctgttccccttcacttccttccttaccctggggagaaacaagaattgtattcctttggccaggaaaagcacccagccccatccagaggggaaaaccctttgttttaaaaactaagtaccagcctgcatacctatctagtgaggcagcccaagcttggtttgggggagcctcagtaataggatgatggagcagctattttcttctcctacacgtgcacccccatctgtttgagatttcccttccaactccagcttggctggcaggcatgtccctaagaagctgcaggccaaaatggagagaaactgactccctcctccacacatcctgacttgctgccaattgccagaaaaagagggcaacatttgggcatttaccagaagacaaggatgtgccttttcatttgtctttttattttacatttaaaaagtggttattgctctaagtggatcagaggtaaggacctctcccctaaggagccttggccttgcagccccattcagcagggatggaagtcacaagacaatgagtggagcctcatgccctcccatgaggaagcccttagtattgctgacatctgccctttatcctgtctctcctccccagtgctgtcacacttgggcaaagcagagtggtggcagacccagccttgagagctcttgtagaccggaaggaaggggcggtcattaggtgatggcttctggctctctggcttggggaccaatgctcttatcattcatttcaacaaatatttactgagtaccaggcttgcactaggtgtggttctcccacacccatccttgaccaccaatggaagatgcagatgtccacctcttcccatgcaggcatctggcagccgtaactcgtcagtcctagggaagagtctaccttccctcatcaagcaccatttttttaaaccagaaaggggcagtggagagagagacctgtcacctcacaccactcaggctctaaggaaggacatgaggaccctgggtaactttcatggaaccctggatgagatggcaagatatgaagaccccagaggccagtggtgatagccagagctgctcttcctgtccgtggtgaatggctcaggcctgccttccagcagcttctactccagaaggggtgttttggtagcccccagaatgccagctgtgatgtgacttttcagttgtccaagctagcatttctgaaactccaagagatacttcctaaataaattggaccagtaccttccaaactgatgatctttcagtcataagggtcaaagaagatagaggatgcaggcaaccagctcagtcttcgggggaatttctctgccctctagaatgcagccttctgatttttgttttccaaaagagacaaaccaggtaacatcttacacgcttgcaaaagtgtgcatcacaccacaaacatgtccttgatggctggatccagaaaaggcttgatggcagccatgatcctgcctggcaggcagccccacagcttctctgatgttccttggtctgaaagacacagcttgagtcagtccttgtgcttgtcatctcccagggctttgtgcattttctcaaagaggaagccagtccaggagaggcgaggaggcagaaggctgtgtctcatgcagctttgccttttccagaatggggccaggccttttagttttgtggcttatttttatttttttgcagaatttgggtttgtagtgcagcctccttcatctgactaggacaaggagaagagagaactgtgcagctagctgtgcctcctccccactgctgcagttgtccctctccctgtgcccgtgggcctggggaccagctgagaagaaaaatggaatccttctccctgcagacaggcagtcacgcttcaatgatgttcactgagggcttgtttggaaactgggaggaaaaaaatgagagaagcagccaggcctaattgtgaatagccttcttgcaaggctggaaacaggacagaagaaggaagggagcagcagcagggctgtagcctaaataagccaagctcttgtcccttgtggaaagaaaagagaagccctgcctggatgtcttgtctttttgccttttcaaacccagccttcagcctcactcaactgaatggccaagactgggtcctgggcccatggcccctggcacccagtctacccccagcagtcatccctctgagtgcagcctcagccactgacattgttgaggtgcttctggagatgggagttaataagaggcttcaggaaagtgcgccagagagaggacagtaagccagagggtacaaggagatggagggaagagatgtagagagggccagatgtttgttggataatcatcatcagaaccatgagatcctctcacattctctactgtctgtcttcttagctgctgagggcaagcactgaaaaggttttcatatctgttttacagaagaggaaatgaaggtacagcggtaaagcacctgcccaaggtcacaaggcacagcaggagcaggaatgggccagacaccccactcctattgtcccgcgccaaccaagaattctgccctccccactcactgcttttttttttttttcttcaaatcaccactggcccctggcaccctgcaaaaggagaggatccaaaatcaacttgcagtgtccctgtgtcacacaggcagcagccaagtctggctctgcccagctgtcgccatgccagtccccgagctgaccccctctgcagtccagggattaccagagcatgaggcacagggtggcccacccaggcccaggtcttgccctcaccttgctgcggagaagccccccgccctggtgctctggtgtgctggtttctgatgcactcttggttttttccttgttgttattgggttcattgtccttgatgatgtcatactggcggcagaagagggcaatgacacctgaggggggacaagtgagcagtcagaggccagggcctgggttcctgcctcccctgcttctttcccactagtgcttgccaat

SEQ ID NO: 98123 - DNA, 63799 bp, Homo sapiens
atgctagcaatttgggaggccaaggcaggtggatcacttgaggtcaggagtttgaaaccagcctagccaacatgaagaaaccctgtctctactaaaaatatttttaaaaattagtcaggcatggtggcgggctcctgtaatcccagctacttgggaggctgaagcagaatcacttgaacccaggaggtggaagttgcagtgagccaagatcccataattgtactccagcctgggcaacaagagcaaaactttatcctccgccccccgaccaccccccctcgcccaaaaaaagacaatttctgcatcttatgtttatgagagtcacttaattcaatatatggctgttggtgacaatgtacgttgtactgtaaaatgtctgagtgatacattctcccttgactttggttctaggtaagtttgctttcatggtgaattgctgcctgctttctttataagaagaactctatttacctttctgctttgactgtcaggaactgagacaccttttatgctgaattgaagtgattagctggtcaaaccagtatttccctggagaatcattaaccatcattaaataaataatatcctgttcctattcactttgaacaccatgagtgaagtggcttggttggagtacagtgtctgaaattgagactgctggcttttgtgactttggaccttgtccaaatactttaacagcatgattcttcctcttgttgtgccccatttctagaaaatgatttcctgtatctttgaggtttctctaatgttacgggaagtcagggaccctaaacggagggaccggctggagccgtggcagaggaacataaactgtaaagatttcatggacatttatcagttcccaaataatacttttataatttcttatgcctgtttttactttaatctcttaatcctgttatcttcataagctaaggatatacgtcacctcaggaccactgtgataattgtgttaactgcacaaattgattgtaaaacatgtgtgtttgaaaaatatgaaatcagtgcaccttgaaacagaacagaataacagcgatgattaggcaacaagggaagacaaccataaggtctgactgcctgtggggtcgggcaaaaagagccatatttttcttcttgcagagagcctgtaaatggatgtgcaagtaggagcaatatcactaaattcttttcctagcaagaaatattaatattaatatcctgggaaaggaatgcattcctggggggcggtctataaacggaggctctgggagtgtctgtctcatgtggttgagataaggactgagatacgctctggtctcctgcagtaccctcaggcttactagggtggggaaaaactgccctggtaaattagtggtcagaccagttctctgctctcaaaccctgttttctgttatttaagatgtttatcaagacaatacgtgcaccgatgaacatagacccttatcagtagttctgcttttgccctttgcattgtgatctttgttggacccttattagtagttctgctttttgccctttgaagcatgtgatctttgtacctactccctgtccttacactccctccccttttgaaacccttaataaaaaacttgctggtttgaagctcaggtgggcatcatggtcctcccgatatgtgatgtcacccccggtggcccagctgtaaaattcctctctttgtgctctttctctttatttctcagccagctgacacttatggaaaatagaaagaacctatgttgaaatatcgggggcgggttccccatactctaaggtttttgcaaatgcattttacatatgccacattccttgggttttaaattagatcatctcaatcatgtctcccaaatttggttttaaaatatccttccacatgttttctagtggtgtagtattagataaaaccaaaaccaaaattttattttattgatatgggtaatgctctccattcatacattacagccctggtccctcagtcactaggttccacattttggcactattaaaaaaaaaaacaaaacttttattttcttcccttgaatatccaatcaggtgccatgttctatagtttttatttttaaaattattgttacatctgattattcctttctaatctcaatgttgtattctcccatctttcttcttcaggtctttgtaattaccccactacctggattattgcaatctccttccaacaggattctctctcacacctatcctctggacagccagttctctatgccgttgccagatccatcttgccaaagcagaactctgttgtcttcactcttggcatttacaaaggccttcctcaatgtgcctcaagccaagggtctggtctaattaccattattcctcttggcatagcctagccaaactgaaacactcactgtccctgcaacatgccctgcattttctcatcttaatgctttggttcgtgttgttaggtcttagtgcaaagtgcttttacccaccccaacctcaatctctgccagtcaagaaatattacccatcctttatatgtggcctccataattaaacttttcttgattctttccaaagatgtactgtctcctagtttgttgttgcttttgttgttgttggtggtggtgtttgagacagtatcttgctctgtcactcagtctggagtgcagtggtccaatctcagctcactgcaacctccacctaatgggttcaagtgattctcctgcctcagcctcccgagtagctgggactacaagcacgtgccaccatgcctggctaatttttttgtatttttattagagacgggctttcaccgtgttagccaggatggtctggatctcctgacctggtgatctgcacgcctcagcctcccaaagtgctgggattacagacgtgagccaccgtgcccagcttctctctcctagttttaaccttccccctgccttttatatctggtcatctcttgtggcaaaaagcatattcttcatatattaaacttacttatgtatgtctctctcctacataagctcttaagataatgaactatagctctttgcctacttacctttatgtttctttatgttttctgattagatcaatgtattctattccaaaggtactccaaaatttaattgaaaattttaaattgaaaattcaatttaattgaaattggcataaatccaatactgacaacatgccccaaggaaaaaactcaaagggagttttttttaaagagcactacttgtgtaaaaatattcactcagccaggcgcagtggcttatgcctgtaatcccagcactttgggaggccaaggcgggtggatcacgaggtcaggagattgagaccatcctggctaacatggtgaaaacccgtctctactaaaaatacaaaaaattagccgggcatggtggcgggtgcctgtagtcccagctactcaggaggctgaggcaggagaatggcatgaacccgggaggtggagcttgcagtgagcagagatggcgccactgcactctggcctgggtggcagagcgagactctgtctcaaaaaaaaaaaaaaaaaaaaaaaaaaccaacatatatatatatatatatatatacacacacacacacgtgtatacatttactcagaacaggcagaagcggataagatggcagcagcaagcagctgatcagggtgggagaaccagtggtagtggaggcagtagtggggctggcggtggttccaggtgcggcacaggcagtggccatagcagcttgttggataagtggaagacagatgataagcctgtaaaaattgacaagtgggatggattagctgtgaaaaactctttggatgattctgccaaaaagttacttctggaaaaatacaaatatgtggagaattttggtctcattgatggtcgccttaccatctgtacaatctcctgtttctttgccatagtggctttgatttgggattatatgcacccctttccatagtccaaacccattttggctttgtgcgtcatatcctattttatgatgatggggattttgaccatttatacctcatataaggagaggagcatctttcttgtggcccacaggaaagatcctataggaatggatcctgatgatatttggcaactgtcctccagtcttaaaaggtttgatgacaaatacacctctaagctgaccttcatcagtgggagaacaaagcagcagcgggaagccgaattcaccaagtccattgctaagttttttgaccacagtgggacactggtcatggatgcacatgagcctgaaatatccaagctccatgacagtctcgccgtagaaagaaaaataaggccgggtgcggtagttcacgcctataatcccagcactttgggaggccgaggcgggcagatcacaaggtcaggagatcaagaccatcctggctaacacggtgaaaccccgtctctactaaaaaatacaaaaaattatccaggtatggtggcacgtgcctatagtcccagctactggggaggctgaggcaggagaatggcctgaacctgggaggtggagcttgcagtgagtcgagatcgtgccactgcgctccagcctgggcgacagagcgagactccgtctcaaaaaaaaaaaaaaaaaaaaagaaaaataaaatagccaattctaaaagtagccctctttctgttggatcttgctgaattactggtttgtggggtgggggagataaaaagaatttaaaatggataaagtaaaaaaagtttaaaaatccctgttttgtcctgaaattttagtctgttctggataaataggattttctgagagagatatgagaagttgtagctctgatgtctagctgtagtctcctgggtctgctgattgcattattttaatttgcttttctgggaaagcagttttgctaaaagctgtacagactttcctttgtacctagtagtactttatatagtatagctttgggctatgtagcattttaagactcaattaataaaaaattaatctgttgctgactctgttaattcctatttccacatgtatttccttgaagaattcaggatacgacttcttgtgtatgacagttttccttcacacactatttttgtgggtgtgtatatatctgatttggggagaatttaaaaaacacatagctttttaatttgtttgaaacagaccttttgcctgttacattttgtgctcttaaccaattaaagaagccaatgacatgttagttttatattgtgttttccactagtatatccctgttgatttgtttgtgccttttattaactgccattttctaaaatttttttcaataaagggaagacgtgaaaaaaattactcagaacagcaatatataataaacaattaaaaaatcaacaataagggagttgttagataaattaaggtagggctgaatctaattctcctgggtctggcccataggaagtatttaatacttattaaatgaatggtatactaccgtgttgcaatattatttactcaggtgcatgtgaaatcagtttaagggaaaaataactttcacaaaacataggaattacatctatagaaaacctatgctgccgggcgcggtggctcagcctgtagtcccagcactttgggaggcggaggcgggaggatcgcttgaacctaggagttccgaggccagcccgggcaacacagacagatcccagtctctacaaaaactatatttaaaaaattagctgggcgtggtggtgcgagcctgtaattccagctacttaaggtcagggaggtcgaggctgcagtgagccatgatcgcgccactgcattcctgcctgggggatagagaccctgtctgagaagtgaaggaaaggggaatggtagagggaaggggaagagaaagaaaagaaaacctatggaggtacgttaataatcagaaggggccagaggaagccacctgacacatttgtgagacaatttaaaaggcgttctcatacattctcactttgatacaacaaccctgcaaagtgcgcacggaaggtgttattaactccgttttacaggtaaggagatcgacccactgaggtcaggagtgactgaccaaggcggagccaggactctagcccccgcctcccggccactggtcccggtctccttccccgccaccactcggccaccgtcattggtgttcagagtttcggttctcttttctgtgatcgtattacttatgcaaaacgagcccagtcacttgcgcggccagagaggggcaggtgctgggcggcggctgacgggcgcagcaccctaggcccagtgtctggctccagccccgcatccggcgccggccccgcatccagctctggccctgcgacaatagagtccggaagtgcaggcaaagcggctcccgggagcgccgcgcggtcctgcgcgggatcagcgagggccgcgccccggcgggcgggcggcatggctgcagtgctggctctcagggtggtcgcggggttggcggccgcagcgctggtggccatgctcttggagcactacggcctggcgggccagccctcgccgctgccgcgccccgcgccccccaggaggccgcaccctgcgccagggcccggagacagcaacatcttctggggcctgcaggtgacgcggcgggaagccgggccgggaggcaggtgcagatcgggcaccgtgcggtgggasccttgcgggtgttgggccccacgctccaggctggggacctcagtcagattgtaactcgaggctctgtctagtgctggccctgtccttacctggggggttcgttatgcattgcctctttgccttttccttctgcccgagagagccgctgagccgcccctccccatgctgcctcttcctggctcagatctctctgttcaatacctgttttcggcagatatccgacattcacctgagcaggtttcgagatccaggcagagcggtagacttagagaaattctgttctgaaactattgacatcattcaaccagctctcgtcctagcaacaggtagggaggcttgccgtgctgtggtggtggtctgtggtccgcatggtagaactctagccagggctgtggcttttcattttggggacgttgggagcagtatagccacagccccaggtgagctctgtgaggtggaagagattggacattctaacccctttgcctatggataactgaatgagtcaagatccaggcaaaatgatttgacgtagcaaggttttgtcaaagcagtagaagcaaggctcctggttctcatgtcagtctgttgtctgatatatttgtatctggtttttgttcttgttgttgttacagttctggttgtgagaattagggaaaagcctgtaaccacgaatcagaagttctcttcttttgctaacttttctattttctttacattattaatcttatattttcagttgtttgaggcttccggtgacccagggcactttttyttcatcctttgatagttttatgacttaagttttctagactcttcaaacactttatttgctttcaaactgtaatggggagaagaagctaaaggagcatctatctatcttgcttactggggaattcatcactcatccaccttattraagcatctctgctgacatgaaagggtatcagttctgatttaatggatgagcctccataaaaagttttctgtttagttctctataaattttggtattttgttgtccaattccacctgccacattgcttcttgctgtaaaaataatacttggtcaaatcacatattctgattttgtggtttggaaaatatggttgccatagatattaggcagccactcagagtactggaatttcttataaatcattttcattttatcagagtctattgatgcattttgtactgttctctttaaagatttttttaacaacccatttcgaatatcacaggagattgaacaggcatttgctaacctataagaaacaaagtccttgctgagaaaatcttgttagtttagatggctcgatttggacattggtggtctcrtgagcagttatgcttatacacgttgagtgctttaagtatccttgttccttcagtgtacatatctaaaaaaaatggaacccccagtagtttattttgcattgtgattcaattcttgtgtaaacctacaggagacctgacagatgccaaaacaaaggaacagttgggatccaggcagcatgaggtagaatggcaaacctaccagggtattctgaagaagacaagagtcatggaaaaaaccaagtggctggatatcaaaggaaatcatggtaagagccaagagccagatacaataaagacaagagtttttttcccccttcaggaacctagattttccaacttagattgtaaaattataaagtgggacatttacatatactaaaggtcacatctctgaaatacaactatataatgtggttttaaaacttcaaatgtcattgttagcctttgagatgacaattggtatggtcctttttttgtgacatatgctgcttctttttttattattattattatactttaagttctgggwtacatgtgcagaatgtgcaggtttgttacataggtatatatgtgccatggtggtttgctgcacccatcaacctgtcatctacattaggtatttctcctaatgctatccctccccctgcccccatcccccagtccttttttctgtacatggaaaaaatatgagttttagcaaaactcatgcagacagatgttttaataaatatacattttgctaagtgaaagaaggcaaacccgtaagtctgcatactgtatgatttcatttatatgacattcaggaaaggcaaaacaatagacagagaacagattgtagttaccagaggatagggattgggagagagattaactgcaaacaagcatcatggagaatttttggtggtgatggaactagtctgtattttgattgtggtggtagacttcaggttcactatatatttgtcaaaatccatagaactgtaagtcacaaaggatgaattttactgtgtgcaaattttaaaaacttagcttttattttttctttttaaaatttactagtattattattattattttgtgagacagagtctcactctatcacccaggctggagtgcagtagtgcaatctcagctcactgcaaccttcgtctcccgagttcaagcgattcccctgcctcaacctcctgagtagctgggattacagacaggtaccaccctgcccagttaatttttttttttttttggtatttttagaagaggtggggtttcaccacattggccaggctgatctcgaactcctgacctcaaatgatctgcccctgctcagccttctaaagtggtgggattacaggcgtgagccaccacgcctggcttattattatttttttgacagggtcttgctctgtcactcagcctggagtgcagtggtgtgagtatagctcattgcagccttgacctgagcttaaatgatcctcccacctcagccccacaagtagctgggactacaagcatgcatcaccataccctgctaatttttgaagtttttttttgtggagttgggttcttgctatgttgcttaggctgatctcaaactcctgggctcaagtgatcctcctacctcattctcccaaagtgctgggattacaggtgtgagtcactgcacctagcttaaaaagtttaaattgcaaacaaatctccataggcatgaacagggaaatggataatcctttccctttttaagattatcattgtgttggtaaggaaatgaactcttctccaaaagagtcctgatggtagtgtatttgtttgatttataaaggttgacttttttattagctaagtacttcatttgtctactttatctgatcagtagatcaggcatgaatccacttcttgctggcttttagaatcacatgattaagacaagagcaactacagttcaatcttataatttcaaagttatttattctgagtggtatagaattcaaagtacctgtttttctctagtatactaagtgccttaaataagtttctagataatctgaattttgttaagatatcaaaattttaaagtatcaatctaattgattggcattctgccattaaaagtgttatagaaagatgacagaggctgctacagtcacgccatgcctagctaagtctgtgccagcagaggcagagagcttgcggtgggccagttgcccctgctggagcctcagttaaatctgaacatcccactgtcccaaccctcccacagatgtgcaccgggctgtactttggcttaagactgcaggtggacatctccactgcccgggaatcatggagtgtgtagacaggacagcctccatggaaggctggtcataccagagtcccaccttggcacaggccttgccattgaggcagctctactgtctgtgctggtctgagggtgggctgcctgtcatgggggcagccatttcccagggggtgttcattgccgtcatctgcaacgcctcataggcttcttgctgcttctgctccgagtcattctctgccgggcctacactcttgctatgccaatattgactgtctctacagatttagtcccaactccagccctggcccctatcctgaaaaggtaccactgcccaagaaacctagccatgaaggcagctacctgctgcagccctgaaggcccctggcttagcctggagcttgggacctaagtccatcccacccacatcctggaatcaagattccagggttttagccagactagggtctagaacttggagcctaacctgcttggattggactcagcaaccctgagtctagccatactggttctaggagaggctcagtggccctagagagatgggccatggtgggagttcatgaattgctggtagggccagggccatctggactctgttctgagtcaggggctgagtctaccctttccttaggctaagcacttctaggtgggggaagcaaactgaaacccatggcaataatgggaggttgtccaggatgtgcccctctcctagtcctcccactgtttgctgaataataaatggaacggctctaccctgggggtgtgtgtggaagaattgttatagaaagaattattttcccttagtcattaaagaaaatgtttgtattctttttttaatgtggatgaatgtttgctttttttttttttttaaattagatgcattcaatattccaagtctggacagcatcaagaattattacaggtactgtaataaacagaagacagaccactatgtagagtcagtgttataaggagggtgtggtcaactcaatgaatgagagaaaactttaaaaaaacattttaagaggcaggggtctcgctattttgcccaggctagctctgaactgagctcaaacgatcctcctgcctcagactcctgtgtagctggggctgcaggcacatgctactgtgcctagctgaaaacattttttaacaggtaaaatttttctataaagaatctctagtaatttaaaaaatgagcctttttgtctttttgtgacagatgcatttctttttgtttagagtttttctttcctttaattctttctgtttcatatacaggcatacctcgttttattatgcttcgccttattgcactttgcagatgttgcattttttcaaattgagagtttgtggcaagcctgccttgagcaagtctatgggagccatttttccaacagcatgtgctcacttcctgtctctgtgtctcattttggtaattctcacaatatttcaaactttttcattatatcttttatggtgatctgtgatcagtgacctttgatgttactattgtaattgttttggggtgctacaaaccttgcccatataagtccaggaacttaatcaataagtgctgtatgtgttctgagtgctgcaccaatcagctgttctcccatctctctccctctcctccagcctccccattccctgagacacaacaatattaaaattaggccagttaataaccctacaatggcctctaagtgttcaagtgaaaggaagggcccaacatctctcactttaaatcaaaaggtagaaatgatgaagcttggtgaggaaggctgttgaaaggctttcagataggctgaaagctaggcctcttgagctggagcagtgagccaagttgtgaaggcaaaggaaaagttcttgaaggaaattaaaagtgctcctccagtgaacagatgaatgattagaaagtgaaacagtcctactgctgatgtggagaacgttttcgtgttctggatagacaatcaaaccacctacaacattcacttaagccaaagcctaatccagagcaagatcctaactcccttcaattctatgaaggctgagagaggtaaggaagcagcagaagaaaagttggaagctggcagagtttggttcatgaggtttaaggaaagaagttaactccataacataaatatgcagtgtgacgcagcaagtgctgattgatggagaagctgcagcaagtgacccagaagatctagctaagataattgatgaaggtggctgcgctaaacaacagattttccatgtaaatgaaacagccttcttttggaagaagatgccatctaggacttttatagctagagaaaagtcaatccctggcttcaaaggatgggctgactattgctagaggtccatgcagctgatttttttttgttgttgttgagaaagttgcacaataatttatttagggcctcctctccccacccttgcagtctctaggtcactttttccgcttgtagattttgcgcgccaaccccagaaagatgactgggggcaggggagctgcgtactgttcaatgagacccataacgtggctgtaactgtcttcctattattgcaagaacatggccggcagatccagctcctcatatactgccttcaccggggccaccttctcggcctccttctgcccaaaattctccttcagaatctggtactgttctggagtggcccgttgcagacactgaaccaccagccagctgcatttgttgtcctggatgtcagtgccaactttggcggtcacattggggtccccaaagaggtgagggtaatcatcctgatctgaaagaactctccctctcccatctccagcaggatcttcttggcattggtattctccttctctctatcaatacctgcatatacatggctgcagctacaggaaggtagaaggagtagaaactgccttgtacgtgacactagatttgtacctcttttcagtgaatctgccaagatccacattgccctggggggctatgatgagatccagggtctgcccaatctcagtctgatagaaactctgccggaagagctggatcaggttcaggtaatagggctgctcatggcaatagagcttcagcaggcggtacatacatgcttcccttccagaagcatagcaacattgatggcatccaaacccgcgcccggcttctgatatcagcagatctgtccccagtgggtgagggatgaatccatgatgtcatttgccaccaggaagaaagcttgcagcagttccacacacgagcccatagtcagggcccgctggagactctcagtatcctgtttcctcggctccaccagctcccagaatgctactagcaccatcaaagcccagtgatacttgcctccaatggcattgtactacaggacctccgtgagctgggtgatagcatctcctgtctctgggtgccccatctcatcctcagtcagcaccctaacaatctgggagaagcactgaatgaaatcctgcttttcttggacagaaatgtctgatttctggtctccattcattctgagggaggagcaaagggctctgttcctggatgtgggttcctgctccatagctgatgactttaagtggagccaatgcccacttaccattctgaaaatccttgggtgcttaagcgttatgctaaatctactctgcctgtgttctatatatggaacaacaaagcctggataataatagcacatctgtttacagcatggtttactgaatattttaagtccactattgagaactactgctcagaaaaaaatattcccttcaaaatatcaatggtcattgacaatgcacctggtcacgcaagagctctgaggaagatgtacaaggagatgaatgttattttcatgcctgctagcgcagtattcattctatagccaatggatcaaggagtaatttcaactttcaactcttactatttaagaaacacatttcataagactatagctgccttagattatgattcctctgatggatgtgggcagtcaattgaaaaatttatggaaaggattcaccattctasatgccattaagaacagttgcaattaatgggaggaggttaaaataacaacatgaacaggagggaagaagttgattccaaccctcatggatgactttgaggggttcaagacttcagtggaggaagaactgtaaatgtggaaatagcaagagaactagaattagaagtggagcctgaagaggtgactaaattgctgcaatcttatgataaaacttgaacagatgacaagttgcttcttatggatgagcagaaaaagtggtttcttgagaaggaatctactccttctaaatatggtgtgaacatttttgaaatgacaacaaaggatttagaattatacataaacttagttgataaagcaataacagtgttggagaggattggatttctttgggtaaaatgctatcaagcagcattgcatgctatagagaaattcttttttttttttttttttgagatggaggcttgctctgtcacccaggctggggtgcagtggtgcgatcttggctcactgcaacctccgcctcccgggttcaagcaattctcctgcctcagcctcctaagtagctgggactacaggcgcctgccaccatgacccgctaatttttatattttagtagagacagggtttcaccatattggccaggctggtcttgaactcctgacctcgtgatctgcccacctcggcctcccaaagtgctgggattacaggggtgagccaccgcgcccggccaagaaattcttgtgaaaggaaaagtcaattgatgtagcaaacttcatggttaccttattttaagaaattaccacagccaccccaaccaccaccctgatcagtcagcagccaccaacgtcaaaacaagaccctccaccagtaaaaagattttgactcgctgaaggctcagatgatcattagcatttttagcagtaaggtttttttttgtttttttggttttttttttgagacagggtctctctgtcacccaggctggagtgcaatggcgcratctcagctcactgcaatctccaccttccaggctcaaagtgatcctcccacctcagcctctcgggtagctgggaccacaggcgtgagccaccatgcctggctaattactgtgttttttatagagacagggtttctaaatgttgcccaggctagtcttgaactcctgggctcaagtgatccactcacctcggcctcccaaagtgctagggtaacaggcgtgagccaccatgcccagtcagtagaagtatttataaattaaggtatgtgcattgtttttctagacatgatgcaattgcacactaaatagactatagtatggtgtaaacataactttttttttttcttttgagacaggatcttgctctgttgcccaggctggagtgcagtggcaccatcttggctcactgcaacctccacctccctggttcaagcgagtctcctggctcagcctcctgagtagctgggactacaggcatgtgccaccatgcctggataatttttgtatttttagtagagacagagttttgccatgttggccaggctggtctcaaactcctgacctcaagtgatctgcctgccttggcctccaaaagtgctgagattacaggcataagccactacgcccagccgtaaacataactttcatacacactgggaaaccaaaaaattcatgtgactcgcttttttgcaatatttgctttattgtggtgtcaggaaccacaatatctctgaaatatgcatgcagtttaatgctttgttttggctaatggtacttttaatattccacacgggcttaaaaaattgtttaagtcattgatacataggaaaagtcatttatatcagagcttgtcagccacactactgaggtcactgggttttcagaatcctgagatactgattctcctggcctctgtggtggctggagagcccagttagtcacctggctgctttatcttttcatcctgtgtcatacaaatattaaaataatctttatttgtcacaaatgtgaaaaggcaagggatctctgaattagaaaccaattgtctagtttcattatgtttagattcctcttttggttgcagtgcacttttcagcctcagggtattcagtagctttgttctgcattgtcaatcaatcatgtagcaaatatttattgagaatccatccctagttggatagtgtgagagatacatgagttaatgttaaaaatttggcttttgccttcaaggaactgatagtgtagttaagggacatcagaattatttaggaaacaattagaaaataacatgaagaaatggccgaggaaatgctagattatttggtacacatgataatcactatgagaaattagaaaagcatgggggtggacatagagaagactttataaaagaagcaaaaagtgtgtccaatcttaaaagatgagtagcatttgaagaagtaagacatgccaaggaggatattttaggcaaaaagataggtrtgaagagatctttaaaagctacagactgggaaaccaaaaactgaactttgcaggggcagtaagaaaactggtgtcaccagaattaacattcatactgaggactagtatgacactggataggcagcctagggctaatttatggaggtcttaagtaacaagcatagaagttgagatgtgatgggtaatagttcataattcagcataggttcttaaggaggcaagtaacataattaaaatagtgttttataaatggcaatcccrcaataaaaaaggaaaaagatgggataaaaaggaaaaaagagatattggagttatgtggactaaataggagggtcctgcaatagtctagtcatgataatgaaaagtcatacccatctgaactaagttcttggatatggagatggtgacatcaatttgaggatgataggtcaaaaagcactggttaactgagtttgtatgattagagtcaccatacattggaagaggaggttgttctcttttgttaatgtgagaaaggaagaggacagagatgaaaatctttcacttcctgttaactgtttgtatctttcatggtgactgtggggagttaggagacatgttcaaaagtaattaacaggacttggggctgagtggttattgggaaagtaaagtgaatagtcactttaaagtttcttacctttgtatttttgtttttagccacctaaactttatctgaatttaataaatggcattttactaaaaatataaatattacagaaataccaatctgaagaaaaaaaattaaagttaaatcttgatcttaaaaatgtcccagagaggaggcagagcttgcagtgagccaagatcgcgtcactgcactccagcctgggcgacagagtgagactccgtctcaaaaaaaaaaaaaaaagattctgaggaataactgaacataaaataagcaagaaaaaatataagtaaaaattttaatttagaataaaaccctgaaatagaatttttttttttttttttttgagacagagtctcattctgtcatctaggctggagtgcagtggcacgatctccactcactgcaagctccgcctcccgggttcaagccattgtcctgcctcagcctctggagtagctgggactacaggcgcccgccagcacgcccggctaatttttttgtatttttagtagagatggggtttcaccatgttagccaggatggtctcgatctcctgacctcgtgatccgcctacctcggccttccaaagtgctgggattacaggcgggagccaccgcgcctggccctgaaatggaaatttaaaaaataccaagaagaaaggcagtagaactaattgacattgtttaaattgggtttgactaatttctgagtattagttgtaatgtctatatcatatatttactcgggttacattatatttgatggttgttgtggcccactagcatattaaatttcaggagtttatttgtatttttaaatatatgctgttaggtaaaaatcatgtaagacacttagataaatgataataccaacttttcttataatgttctgacatttgaataatataggtatgccctccaataaaatctatactttccttcttatttattcaacacatacttaatgagtgcctgccctgtactgtgttactcatcctttcttcctggtcttcactctgcagttttatggacacctgaacactgttgacgcttaaggtggtaaactttcattagtggatatagaccctgtgtatgttatcaatatatctttaggaactgaaaaagatttaacaacccagacctagactaatattttttctccttgcttgaagacttcatctttgcaagtctttcttgtgaattaagcctctgtagtcctgtttcaagaagtagacagcttttttatctcactacaccaagaattctaggtacttagtatgccctcactaaatctgcaaatgattgataaatactgttccactggattttgatttctttttgaacatttaatggactccctaaaagagccgtcttacttctgaacttggtgaacttgtatttggttattgaatgagtttgcatgagtctttggggacaatgggagaaaaactttgaaatttcatcagtttatccattgtggatctagtttagtatatttctgtcagatcagcaaatctcgttttcaaaggaaggtaaaatctagcgtattagggaaggaattttaaagcattgtctttttattacactaacaccctcctgtcttctattttttaggaaatattctgctgtacgtagagatggctctttccattatgtccacagtactccctttggcaactattcgttcatctgtgtagatgccactgtaaatccagggcctaagagaccctataatttctttggaattttagataaggtgcagtaaaaatcttacttccctttgtagcttacttattttttcatggatacgtgtgratcacttaaagttatcaaaagtaaactagttgttatctaggaatgctttggagaaatttaacttggttacaggtatggctagaagttactggctatttcagcactatttttgctatcctttttcttgtcccaaaatctgagaaagragtacctcacactttatggagtaaacatttattaaataggtactgagtacaggatgcactttgcaagttacaggacatacagctttgtgtggtatattcctaagttcccacaattgccagttctaactagtgtttattttttgagacggagttttgctctgtcggccaggctgsagtgcagtggtgtgatttcagctcactgcaacctccacatcccaggctcaagcaattcttgtgcctcagcctcccaaatagctaagattacaggcacgtgccaccatgcccagctaatttttgcatttttagtagaaagggggtttcgccatgttggccagggtggtctcgaactcctgatctcaagtgatccacctgcctcagcctcccaaagtgctgggattacaggcatgagccactgtgcccagctggtctgtatttttttaaagaagagaaggatgactattgaaatcaataagtttattttcaagtattttgacaaggctaggtgattgctggatttaaactgtgtggaaagtctcatttgagaacctcttattatttcttggtacagtaaatgccaactcattatttaataagcatatgcccctaagtaagacatatgtgctcatatgaaagaatacaaaagtgataagatcaagttcttagactcttagagtatttaatctagtggtgaggtataagaccagtatagaaataaatataataaagagcagaatttgctaaattagaactaagaggttcagagttatacgagagttcgaaagaatgtgaaatcaagtgaacagaatattgtcaaatgcattgtgttactttaggcattttatttaattaggttctattttgtttcttatctatcaagtgtctttagtcagggttgatgaacttatattaaatcccattccttagtatagtgttttttaaaggtagaattcaaggatcatgtacatgaaaaccaactggagtgttacaaaatacagattcccttgccttgccccagacttatcaaattaaaaaccctgagggtagatcccagaaatgtattgctgtaagcaccttacatataatattaatgcatatttacataggtaccagttattttttgaaatcaacttttgaggtatgatttgagtactataaaataccctcattttaaatgtttgaagagttttgacaaatgtatatattggtataactgtcaccacagttaagacatagaacatttccatcatcctaaagtcttgtcatccttgtacagtctgtcttcacttcctagggaattactgattggttttctatcagtatagattcattttgtttgttctaaaattttgtataaatgaaatcatacagtatgtactcttgggtctggcttcttttgctcagtataatgtttctgagatccatccgtatgattgtgtgtatcagtagttctttcctttctgttgctgagtgctgttccatcgtgtggatgtattacaacttgttgatggtttctagtttttggctattatcagagctgttataaacatttaggtagaagtctttccatgatattattttagaagtttagtttctgtatcctctttattaatcgtaaagtrttatacaaagctgtaaagattagtgatgacttcatttcgcagtttccttatctattaaaagaggataatacctaccctacctattgcagagttatttttagtatcaaatgaaatataatgtatgtgaaaacaatttgaaacttacagaggtccatagaggtcattaactagtaaggtttaaggcctagacacatataataattattataaatcttcagaggagttttctaatctgttgacattagattttagcctgagccctaatttaagatccttccatttttctcccatctcagaaaaagatggaggagctcttattactggccaaggaaagcagtcggagcaaccatacaatttggtttggacactttacaacatccactattctttctccatcaccaggaatccggtcaataatgaggtgagacaagcttccaaaatcagaattaatttgtttttagtttttttattttgctgttacctattctgcttttctggcaagacatttttattagtttggcctcacgcgttatctttgttcatttatttcatttatttttcattggttagttcggctatagcttatttgtgtggacatctccatacacttggtggactgatgcctgttttgcacactcgtcacttccagggcactttggaacttgaggtgggagactggaaggataataggaggtaagggaacctccccayagaagaaaacttatacacataagttttgccaaagcaatgatagttttcttactgatatcatgggtgatcacagttaaagaaaaacttgtgatatttctgtttttttaaagtaatatatgtctctgaaatctttgtcattttgcggaaaccttgtcatagcagggatgtttactatcactatgttacattggattttcaagatatgtccattaggaattggactcaaactctagtgtgcacaagaattatggaggagcttatgaaaaataaaaattttcaggcgctgcctctagagattttgattgtgttggtctggattagggtccaacaaattacatttttttttttttttgagacagagtcacgttcagctgcccagagtagctgagattacaggcacccaccatcatgctcagctaatttttgtattttagtagagatggggtttcaccatgtttgccaggctggtcttgaactcttgacctcaggtgatccacccgcctcggcctcccaaagtactaggattacaggcgtgagccatggcgcctggcccaaactgccttttttaaaagccctctgggtggtctatgcatgacaatttgagaaatactaggactagaagtgtcatgtttttcctcctgaattttgtatctaccatactggttattgttacaagatggtagtgatttaacttcttcaaatagatgatagttggcttttttaaggttaaagtctctctaagagaaaatatgtttatcaaaagcatgtagtgtagttaaatatatggttttttcttttttaaaaagaagtatttaagtgaaatagtttatcaagttttgaggagtatcatcttattgtttaactattacagttatttaatttacacaaaccctgtgctctcagataataggtactcagcaaaggtttgttgagctgaatatgttatctttttatttttaactacttccattaattaaaaaggaactttacatcttggaaggtactttctcattttggttgactttttaaaaactgtgtgagttatgcttgaaacgtgtaattatttggcaactataattactttgagctaagagttgtctgttcatggctgtgaggctgtgggctgggctatgattgccttttgtgagatagtcttactaagccttgaccagcttctttatttcttctaagtgctctagttacaagttgtgatgttaattatgaaggcatttcctttctctctccaccagttttcctgtgtccaaccctggggttttatttggagcgtactccagataaaaggacctaaactttacctgcccttataaacacttaaattgtgttagttacaatagaataatttttaaaaacagtatattggaaatattaggctaggccttgttgtagatgcagataaatccagaaatatcagtggcttaacacaaatgtttttcatttgtataaattcaatatgagtcagaacaactcttatccatgggatgagtcagtaattcagacttcctccatcttaaaattcctatttcgacatgtcgattccagggcagggaagagagcaaggagaactcacacccactcttaagtactttggaccacaggcatgatatgtgtcacttctcttcacagcccattggccaaaactagtcacatggtcccaacctgataccaggagactgggaaattcaggggaatgtgtagagaatttcgtgagcactattgtttctgccatagtgaatcatttctttttttagttctaaaagttagaaaatataaaactttggttattctttaatgaatattttataccttttgttattgcatttggaaaatgaaaacaactttaatttctttgaaattatagaaataaatgtttaatgctaggcatggtggcttacgcctataatcccagcactttgggaagccaaggtgagggggatcacctgcggtcaggagttcgagaccagcctggccaacatggtgaaaccctatctctgctaaaaatagccrggtgtggtggcgggcacctgtaatcccagctacttgggaggctgaggcagaggttgcagtgagccaagactgcgccactgcactccagcctgggtgacggagtgagactccatctcaaaaataagaaaaaaaaaaaaaaaaaagaaagaaaggtttaaaagaagcatgaaagatttctaattttgttcatatcaaccattttaatattttatgtagcattgttgatgggatgaagaatgtcaagtattagggttataataaatattttaggttcaaaattgtcttaaagtacagggataagatgagttacttcaacaagtatttatttaaaaattaaagagtacatgccgtgtaccaggtgttgttcaagagcacagttgaatccattgcccagtcagaggcagttatgtgacaaatgtgaaggataaagtgatggggtaagggaagaaagaaagaaaatattacttaatctgtattcaaattaatcatgtaaaaaagtcctagttatgtatttttatatttgttctgtatattaccttcatgacctcttacaatgtgaagtgactaaattaccttatcattatctggtctttaggtaccggatttttgcttttgatcacgacctctttagctttgcagatttgatctttgggaagtggcctgtggttcttatcaccaatcctaaatcactcctttatagttgtggtgaacatgaaccactagaaagacttcttcactcaacacacatcaggtatgtagcaattttttagaatttactttcastttgataatgaaggagaataagtcattgtgattgcattcccatgtgaaagctatgagatgccccattttagttttctcaacaacctaaacattatataaagatagattgcttactgttttgtttccattaagttaaaaagcatatcatttttttaagctgatgaaattttaaaaaccattcagaaatctataattctaccattattatttttgttttattttattccagcctttttatttggacgcttttacattgctataagcataatgtacatattcctttatagtctactttttaaaatttgcattatatatcaaattttttttcatttgttatgtagccttctaagaaagcaaaagctatatatataatccttatggaattgaaaattcagttggcaaatgaatttgttttgttttgttttgttttgattttcgacagagtcttgctttgttgcccgggctggagtgcagtggcctgatcttggctcactgcaaccactgcctcccgagttcaagcttttctcatgcctcagcctctggagtagctgagattacagatgtgtgccaccacgcctggctaatttttgtatttttagtagagagagggtttcaccgcgttggccaggctggtctcgaactcctgacctcaagggatccgccctcctacgcctccccaagtgctgggattacaggcttgaaccaccatgcctggccaygaatttgattatatagattaatagaatccaaatgggacattaacattctttttgcaaagagatatataacttgtttcaaatgtaagagcactttttaaaatatacttttacaatttattttgaaaagtaatacaatagaacaacctttggaaaatagggtaatgggattttaagtatgtttttctccacttctaatagaactattattagcacttctgagtatttcttctcaggcattctctcttaagatgtttttatataattataatcataaggcacagtctattctaattcctgatttgttttctttcagcacaaagaatgtaccacagtttttctaaccattttcatatctcattggtgaacttttaaggtttttcttatttgtggatgaatatctggtacatatayattcttccttcacttgaataatttctttaagaaagagttctagaagtgggattctaggtgaaagaatttgaattcttttatgactgttgataaaaattgctcaatccctttttttttggagctaaaatcactatttttaatcatggtaagcatgattaaacaaagtacacatggcataaaatgtaccattttaaccattttcaagtgtacagttcagtagcattaagtttgcttcaagtttacattgttttgcaaccatcaccattatccatttccagaacatttatcattttctaaaactgaaacttttacccattaaacaataacttcctgttcttccctctcccacagcccctggcaaccaccaatctactttctgtctctatgaatttgactactctagctaactcatataagtggaaccattcaatatttatacttttgtgactggcttattttcatttaacatgatgtcttcaaggtttayacatgttgtggcatatgtcagaatttccttccttttaaaggctgaataatgttccattgtacattgtgtgtgtgtgtgtgtgtgtgtgtgtgtatatacacacatatgtatacacacatacacacataccacattttgtttatgtgttcaatggacacttgggttgcttctaacttttggctatattgaataacgcttctatgaatatgagtgtacagataacggttcaagtccctgctgtcacttcttttagatatatatccagaagtggaattgctggatcatatggtaattatctgtttaattttttaaggagctgccatactgttttccatggtggctgcaccattttacattcccaccagcagtgtatcaggtatccaattactttcaacaacagatgctaatttatcatattaccaagcaatatgaatgccaaattcacaatactcttattattattggatattatgctttaaaaagtatttactaattaacttgtaaaaaatggtaccaagatgtttacatttattgttttcatcactaatgaaatggaacacacatgtgtcagtcaggttttttggtgggagctggatatcaggtttaggtgtcatactctctgaaagggcttggtagcctagttctggttataaccctgtttctttgggacagacaccctggtaccaaatgagtagatggtaggcttgacattagattaacaaaatgagatttccaccctatattattttcctaagagaaaaatcagtacttctggagtttcttcagaaagaactttgaatctaccttacctagatttgtcaaaagaaaattgatttttctttctaaaaagtaaaagaatagttccgaatttcttaccagttcagttttgctaattgtccaactccagaagccaccattcggaaagaaaccagatcatatcaatagtggctcctgctgttgtacaatatgatggttctgcctatacgtgtatatctgcaagttacaataaggttattctcctttgcaaaaacaatgacaaacctcaaaccatgtgttttatatatgctctcattttagagtcttggccttttccttatcctccattacttctgtcacagttaagattgatggagttcatttaggccaggctgttcatgtgtctggtcccattttcgtactgaagtggaatcctagaaactacagtagtgggacacataacatagaagtaatcgtccaggtaagttagtaatttatatttactatgtaaatgattaagctgtagccacaatgaattctggtttggaattttttagtcaattggtaatgaaaccatgtttaaaaaaaaactgggggccgggcatggtggctcacgcctgtaatcccagcactttgggaggccaaggcaggcagatcacctaagcataggagttcgagaccagcctgggcaaaacagtgaaaccctgtctttacaaaaaaatacaaaaattggctgggcacagtggcatgtgcctgtagtcccagctactcaggaggctgaggcaggagaatccacttgagcccaggaggtagaggttgcagtgagctgagattgcaccactgcactccagcctgggcaacagagccagaccctgtctcaaaataaacaaaaaaagtgaaaaaattggggctgaggctggaggatcgcttgaggccagtagtttgagaccagccagggcaacatagtgagaccgcatctcaacaaaaaaataaaagttagctgggcatggtggcgtgcatctgtagtcctagctacttgggaggctgagatggaaggatcgcttgagcccaggagttcaaggttatagtgagctctgattgtgccagtgcactctagcctgagtaacaaagcgagaccctatctcaaaaaataaataaataaaaataaaaataaattgaatacactgtatttagtatattctgaaaatgggcacttggaataattctaatattagattaaaaactaggcagaggagaagaggagtggccatagactccctttttttagccccaggaaatcattcttgtgttttcttccaactttgcccagaatcttttcataataggggcaaattccccagtatacccaaaggtaatagaataagtcagaaaacatgtattatgtatccatgtctttgattgctgtctctaattgtaggacaattgtgtcattatttgaaagcttcaggacacagaattttcagtgcatcagaagcacttttttgttagaggaataagcattgttagcatatgcagtaccagtttgccttttcttattctgattcaatttagggcatttaatttattagcacctgccagagtagaaaataataatcattaccaaaatagagcagtttcattaaactcttaaggcgataagctgtgctcagaaattagtttcttaaacacacacacacacacacacacctgtcaatttctgcaactttatgatttgatgacagttgttaactatttaatcttctaatattaagacttaatttgaaacactaaataatttttcagaaaacatatgtagttattttcattatcttttttatcccccctacagagacaggttgagtaggaagaaactatttactgagctccctctaaggagatgctaggcacttagaattttttacttaatccacaaaacaatcctttgttgggggtagttttacccttggtttgtaaatggagaaacttgtacatctgcacaaaagaagacactctgctatgccatccatctttaaaatgttctgtgtagaaggaagaaaaaacttacagcagaagtagaaggagagatagctggggatgaacccttaaggtctttcatattagaagaaggtggatcattttaaagagacttgaaggttcatgtgcacctagaataaattattccctgtcttcacagtcactacagtctggagtgcctcagaaccccagtgtattattttcttaataagatatacatacaacttctgtagttttatgaagaaaaaaaaaccatagcttatattccttgaaacatttctggctgcttagttgaatccttagtaaaaatgtaaaatcacatactttttgtatgtttaacatttcttacaatggtatcaaggtataatttatacataataacataataaaccctgtatatttaaagtatacaatttggtgagttttgacatatgtatacatccttgaagtcatcgcctacaaacaatatgatacatttccctcaaaagttttcttgtatcctttgcaatctgttttccttacatcctcattctcaggcaaggactgatctgttttctgttttcttatatgtataactttaaacaacctactgagtattaaatagggaacctggtcccttcattcattcatgggaaagttctgtccttttaagtacagtaaactgtagataagtcagatttgaaactcaaaatcygtgggagaagacacttattatctaatattttacctactcattgtatttattgaatatctataggttccccacagtctagtagcaactagacctttagatcaattttcaatgtgggtcctgggctagtggcatcagtatcacctgggaacttgttagaaatggaaattctcaggtcccatctgaaatctactgaatcagaaactttggagataggacctagcaatctagtttaacaatctctccaggtgattctgatgtccactaaagtatgagtatctgtagtttaagattattgtgcctactttgccaatttaaagagtagaccctagaaaggtctaatctcaaacattagaaaaatctagattcctgctttaaaacaataacatagtttaatataagcacattttgagcaataaaagcttaaaaaacacaactgtaagttcttattgttatttttaaagttttttttataatgggaaaattttaaatatacaaaagagataatattataatgaactcccatgtatccatcagccagtctcaacaattatcaactcatgatcaatcttgttccttctttatccctatctcccctccctgcaccatgatgtctttcatctgtaaatatgtcaatatttatcagtaaaatataaggactgttttttaaaaacttaaccatgataccatatcatacctggaagactaacagtagttccgtaatatcgaactacccatttaatgttcggttatcccaatatgttacatagatagataggcagatagatagataaatagatatgtatattttcatttggttggttcaaatcggaattcaatcaaggctcttacattctatttaaccgacttgtctctttcatctcttttactgtacagattgcatcccttacctcccccctcttttttktmcccttaaaatttatttgttttggaaactgaatctttggtcctgtggagttccctgttttctggatttttgctgtttacatccctggggtatcatttaacatgttcctctgtccctgtcccctttaggttctataattggtagttagatttagaggtttcatcagatttacatctgtttgttttttggcaagagtactttatctggttttttatgcttttaacaggatgcccataatatttggttgtctctctttctataatgttaagatggatcagtgtattcagctgttggtagccttatccactgatgtgctggtaaatatttagtaaccagcttggggcaagttacaggggtcaaggagaggggatcctgatttgtagcatttccctgatttgtaccaatccccataatataaatatttctaccatggctggttttaagctaccaacgccatgctaagtggcctgcaaaattgctgaaaacttaacatttggctcttatgagcagtcaagccagctccagcacactgctggctcatccctccattatcttttcacctaagggtttttagcagccattgatgatacttacctaaatccattttttattagagttataaaatggtgatattcacattttctttccttattataggaatattaattagaacagtcctatgaagaaaaaaawtatcttatctatttggtacccagatataaagttcacacacaaaatgcaagataaattcttctttccccattgcccctttactaaagcagttttcagaataatgagttggttctttagtatctgccaaaggtgactgagtcttttacatttagtagtattataaattcaaagtttaaaaaatatattgatgtataaaaaatacttgatgtatttcagtccattgcatttattattttccatgctcaaattgttccacctttggctagtgggagcctcttcatgttgactactaagccctttgacacaatcccagtagtctttgttcgttttcttactttctgatttgacaagatattccaagcttttcttatgcatttttttctttaaaaaaattttttttaaagttttactttttgtgagtacatagtaggtgtgtatatctgtgggttacatgaggtgttttgatacaggcatgcaatgcgtaataatcacatcatggaaaatggagtatccaccctctcaagcatttgtccttgttttacaaacagtccaattacactcttttagttatttttaaaagtacaattattattgactctagtcactctgttgtgctatcaaatagtaggtcttattcattctttttatgctttttgtactgattaaccatccccacctccctcccaatgcccccttactaccctttctagcctctggtaaccattcttctactctctgtatccatgagttcaattgttttgatatttggatccaacaagtaagtgagaacaagtgatgtttgtctttctgtccctggcttattttacttaacatagtggtctccagttccatccatgttgytgcaaatgataggatcttattcttttttgatggctgaatagtactctattatgtatatatacctcattttctttatccattcatctgttgatggacacttaggttgcttccaaatcttattgtgagcagtgctgcaacaaacatgggagtgcagatatctcttcttgtgcacttcctattcaagaactggaatgagctgtttccctaaagagcactggtttcttgtagtgagaaatactattttgagaccgcaacctgggcaccagcctaggtagctcattactgttagctttgttgttatttctaggcctttttagggaacagagggaaataaaaaaattttttttaaagggaaaatacacgtgagtgcatgctaatatttactctttaaatgtagaattataggttttaatctctttttttgtttttttgacagagtctcactctgtcacccaggctggagtgcagtggcgtgatctcggctcactgcaagctcttcttcctgggttcaaacaattctcctgcctcaggcccctgagtagctaggattacaggtgcgtatcaccatgcctggctaatttttgtatttttagtagagatggggtttcactatgttggccagggtggtcttgaacgcctggcctcaagtgatccacctgccttggcctcccaaagtgctgggattacaggtgtgagccaccttgcctggcctaagaaatattattaaaagtacttataaggccagcactttgggaggccaatgcaggaagactgcttgaggccaggagttcaagaccagcttgggcaacatagcaagaccccatctctaaaataaatttaaatattagccaggcgtagtggtgtgtgcctatagtcctgcagctgtatcaggaagatcacttgaccacagaagatgaaagctgcagtgagctagctatgattgcaccactgcacgccagcctggacaacagagagaaaccttgaaaaacaacaacaacaacaacaacaacaataacaacaacaacaaagtgtagttattagaaacctattcttattttaatttagaacattataaatatttccatgtacatgaaagttacttttcttctgtggttattactaggattctgctggaagaagtaagagtgttcaccacatattttctgttcaagagaataatcatctcagttttgatcccctggcatcatttattctccgtactgatcactacatcatggtaagtgaattcaattaaatattacatatgttaaatgcagagtcctaaataatatacagtagtsctcccttatccatgatttcactttccatggtttcagttaccgaaggtcatccatggtctgaaaatattatatataataagatattttgagagacagagaccatagtcttgtaactttattatagtatattgttataattgttctattttattattattgttgtcgatctgctgtgcctaatttataaattaaactttatcataggtatgtatttataggaaaaaacataatatatatagggttcggtactatctgtgttttcaggcatccactgggggggacttggaatgtgtcccctgtggataaagggggactattgtaaacatatgacaagaaagttgaatcttataaaattaaaggttagttatttgtctagaagaataaaatgcttttaagttgatttgaattaaaagaagcagaggcatggatgagtcatttgggatgctataaatccaggataactaagggaattataacaaaggatattagttatcatatcgaagggaattataactaaggatgctataaaaacaggataactaagggaattatagggactatgccaacttgggttaaggctttttaaagaatatttctttccacatcaataatatatgctcagtgtagaaaacttggaaaatttagaaataaagttaaatcagccacacatctttcttttatcacactatccattataaccattgtatttgtcattatgatactctaatttttctctcttatatacacatgtgtatatatatatgtgtgtgtgtatatatgtattttgtttgtttgcttgtttgttttttgttttttctggaatcagagttttgctcttgtttcccaggctggagtgcaatagtgccatctcggctcactgcaacctccacctcctgggttcaagtgattctcctgcctcagcctcctgagtagctgggattacaggtgcctgccaccacgcccagctaattttttgtatttttttagtagagacggagtttcactgttggccaggctggtctcgaactcctgacctcaggcaatccacccgcctcagcctcccaaagtgctgggattacaggcatgagccaccatgcccagcttgtatatgtatttttttttgtatatgtatttttaacataaatactattatacctttattctcttttgctgtctgatttttttccactgaggaatttgtcttgactattttctcttatcaatttatattataacatattagctgcattatattgccatagatatgccttaatttttattttattttattttttttgagacagagtcttgctctgtcacccaggctggagtacagcagtgcgatcttggctcactgcaacctccgcctcctggattcaagtgattctcctgtttcagcctcccaagtagctgggactacaggtgtccccgaccacgtccagcttttttttttttttttcagtagagtcggggttttgccatattggccaggctggtctcgaactcctgacctcaagtgatccacccgcctcccaaagtgctgggactacaggcgtgagccactgcccctggcccttttttttttkttgttgagctggagtctcgctctgtctcccaggctggagtgcaatggcacgatcccggctcactgcaacttctgcctcctgggttcaagtgattctcttacctcagtctcctgagtagccaggattaccggcgcccaccaccatgcccggctaatttttgtatttttagtagagacggggtttcgccatgttggtcaggctggtcttgaactcctgacctcaggtgatccacccacctcagcctcccaaagtgttgggattacagcggtaagccaccgcacctggctgccttaatttttttaatcacttctctattgttggacatttaagttgtttctaatttgcccctctactgtataaataatgcttgtaactaagtttttagatatctctctaatatagtttcttgggatcaatttctagaagtgaatttctggatcaaagggtgggcacactattttatatactttactatttatatacataattacataaattatttattatttataaccatcatttttttttcctatcctcgctcattaaaatataagccccatgagggcttatattttggtatgcttggcacatagtaggccctcaataaatatttcttaaatgagtaaatgggtatttttttagtttttaatatacactgttaaattgtcttttagagaagctatggtaatttatactgtagttccctcagatctcatttatcctgggtgttagcataaaataaaaataaaaaaaaaagaaatacactaaaattttcagaagaaaacttaaaccttccttaatttcacctcccagagataggtttagtgtatattctcacggacttaaaatgtgagatcattattattttaatttacttttgttacttgtatgattttttcagacatattattaataagcatttgcatctcattactacaaaatttttaaatcatttgttattttttcttttgtggatttttaacagtcacctaaattaggcttggggaattttgatattcaaatgaataacctggatgttattaaaatacggttctggggccgggctcggtggctcaagcctgtaatcccagcactttgggaggctgaggcgggcggatcacgaggtcaggagatcgagaccatcctggctaacatggtgaaaccccgtctctactaaaaatacaaaaaattagctgggcatggaggtgggcacctgtagtcccagctacttgggaggctgaggcaggagaatggcgtgaacccgggaggcggagcttgcagtgagccaagatcatgccactgcacttcagcctgggtgacagagcgagactccgtctcaaaaaaaaaaacaaaaaacaaaaaaacaggttgtggtttagcaattctgagaaggggactgagattctgcattcctaacaggctttagtggattccagtgacggtccaggatcttactttgagaaacaagcacctaggtcatatgtcactattgtgaattcatctccaggtgaatgacttcttgagaagaaagcaaaagaaaacagtctatgttcactcagcctgcagtgtagtctatactgtttttttattcttatagaactttaaaacaaaacaaagtatccttctcccagtacaatgaaagtggactattttaatttgattgcttaatataattgtataaaattacttagcttcaatattggtctaagtatctaaattcagaaagagcaatgctgaagcaatttataattttctttattggtggatcagatgtttgattccatctcttaaaggctccatctcttaaaaagaaaagacttaaagagtccatctcttaaaaaaactgatgttgtggttattatttttgataggtttatcttttagtcttcttactcaagatgtgagtggtttatgtaccacaattacagtgtcagagtattctatattaggctgtatatttactgttgccagtgagttttataccttcagatgatttcttttttcttttctttttttttttttttgagatggggtcctcccaagtagctgagactacaggcacatgccaatacaaccagctaatttttactttttttttgtagagacggggtctcactttgttgcctagactggtcttgaactcctggcttcaagcaatcctcctgcctcggcctcccaaaatgttggaattacaggcgtgaatcactgtgcctagacttctcattgctcattaacatccttttctttcagactgaagaacttcctttaacatttcttataggacaggtctggtgttgatgaaatccctcagctttgtttgtttgggaaagtcagctttgtttgtttgggaaagtctttatttctccttcatgtttgaaggatatttttgctgaacataatattctaagataaaattattttccttctgaatatgtcatgccactttctcctagccttaaggtttccactgagaagtctgctgccagacatattggagctcctttgcatgttatttgtttcttctctcttgttgcttttaagatcctttccttatcattgccctttgggaatttggttaataaatgccgttaggtagtcttatttgggttaaaacttcttggtgttctatgaccttcttgtacctgaatattgatatatttctttaggttaaaaaagttctctattattattttttgaataaacttcctactctgatctctctctgtacctcctctttaaggccaataactcttagatttgtcctgttgaggctgttttctagatcttgtaggtgtgcttcattctttttttttttcctttttttctcctctgtgtattttcatatagatggtctttaagctcactaattctttcttctatttgatgagttctgcccttgagaaattctgatgcatttgtcagtttgtcaatttaatctttcagcttcagaatttctgctttgattttttaaaattattgtaatgtcttcattaaatttctgtgataggaggctgggtgcggtggctcacgcctgtaatcccggcactttgggaggccgaggtgggcggatcacaaggtcgggagatagagamcatcctggctaacacagtgaaaccccatctctactaaaaatacaaaaaattagcccggtgtggtggcgggcacctgtagtctcagctactcgggaggctgaggcaggagaatggcatgaacccaggaggcggagcttgtagtgagccaagattgcgccactgcactccagcctgggtaacagagcaagactccgtctcaaaaaaaaaataaaataaattaaataaaaaataaataaataaataaataaataaatttctgtgataggaatttgaattccttttctgtgttttcaagaagttcattgagcttcctcaaaacagctattttgaattctctgtctgaaagttcacataactctgtcactccaggaatggtctctggtgccttatttagttcatttggtgaggtcatgttttcctggatgttcttgaggcttgtggatgtttgtcagtgtctgggccttgaagagttaggtatttattctaatctttgtagtctgggcttgtttgtactcatcctccttgaggaggctttccaggtattcaaagaattgagggttgtgatctaagtctttggtcactgcagccatatctgtacaagggggtgccccaagcccagtaatactgcaactcttgcagccttacgtgggcttggtgggcttgggtaagaactgggagaattctcttgattaccaggcagagtcttttgttttcttttcttttttttctttccagagattttatttgttttggtggcagagacagagtagactgtgcttacttcgttttaacaagaaccataaccccaaatctctaacataccaaagtagagggaatcatacagcaaacacctatgtatccattgcccatattagattgcatcttttcttttaaacagaatatctgaggattgccatgtttctaatatgttaaatacaggactggtttgtgtcagagtgcaaatcaattattcctgaaatgatggagagatatttcaccaacttgttctccttgaggtttttcttttttttttttttttwattgatcattcttgggtgtttctcgcagagggggatttggcaggatcacaggacaatagtggagggaaggtcagcagataaacaagtgaacaaaggtctctggttttcctaggcagaggaccctgcggccttccgcagtttttgtgtccctgggtacttgagattagggagtggtgatgccttcaagcatctgtttaacaaagcacatcttgcaccgcccttaatccattcaaccctgagtggatacaccacatgtttcagagagcacagggttgggggtaaggtcacagatcaacaggatcccaaggcagaataatttttcttagtacagaacaaaatgaaaagtctcccatgtctacctctttctacacagacacggcaaccatccgatttctcaatcttttccccaccttcccccctttctattccacaaaaccgccattgtcatcatggcccgttctcaatgagctgttgggtacacctcccagacggggtggtggccgggcagaggggctcctcacttcccagtaggggcggctgggcagaggcgcccctcacctcccggactgggcggctggccaggcggggggctgacycccccacctccctcccggacgggtcggctggccgggcggggggctgaccccccacctccctcccggatggggcggctggccgagcggggggctgacccccccacctccctcccggacggggtggctgccgggcggagacgctcctcacttcccagacggggtggctgccgggcggaggggctcctcacttctcagacggggcggctgctgggctgaggggcacctcacttctcagacggggcggttgccaggcagagggtctcctcacttctcagacggggcggcccggcagagacgctcctcacatcccggacggggcggcagggcagaggcgctccccacatctcagacgatgggcagccgggcagagacgctcctcacttcctagatgggatggcggccgggaagaggcgctcctcactttctagatgtgatggcggccaggcagagacgctcctcactttccagactgggcagccaggcagaggggctcctcacatcccagacgatgggcggccaggcagagacgctcctcacttcccagacggggtggcggccgggtagaggctgcaatctcggcactttgggaggccaaggcaggctgctgggaggtcgaggttgtagcgagccgagatcacgccactgcactccagcctgggcaccattgagcactgagtgaacgagactccgtctgcaatcccggcacctcgggaggccgaggctggcggatcactcatggttaggagctggagaccagcccggccaacacagcgaaaccccgtctccaccaaaaaaatacgaaaaccagtcaggcgtggcggcgcacgcctgcaatcgcaggcactcggcaggctgaggcaggagactcaggccgggaggttgcagtgagccgagatggcagcggtacagtccagcttcggctcggcatcagagggagactgtggaaagagagggagagggagaccgtggggagagagagggagagggagagggagagggagacggagacggagagggagagggagagggagagggagagggagaggggtcttttgttttctttcctcacttttccccaagcagaaggagcctctctctttgctggcctgcctggatatgtgggagaggtgaccacagtttgtaccgttctgggtcacacctgaattcaccatagtactgggtcttgtccaagttctgtggtgactactgcttggctactgctgatgtttattcaaggcccaggggctctttagtcagcagatggtgaatcttgccaggacatggtctttctcttcaacacagcaggttttcttctggcccaggctgagtctagaaatgccatccaggagtgagggcctgggctcagaggcttcaggaatctgcttggtgctttatttttactgtggctgagctggtacccaggtggcaaaacaaagtcctctttacttttctctcttgtttccacragaggaaggagtctctctttgagctgcactgcctggagagttgggggatgggtgacacaagtactcccctggccaccacaactggtgtctcactgggtcttgtgcactccatttccactggctctgagcccaacatagtacccagatttgcccaaggactgcagtccttgtggcttgactgcctttcaagtttattcaggaccctagggcacttgtttagtcagctggtgctggagctagctggaactcaggttcctaccactggggcagaggattgccctctggcaagggccagcttaaatgctccctctgtgggtgctggcagaattctgccctgtgttgtgttcccctgtgacagcactgagttccaacgcaaagtctcacagtcattttgctctctcccacaagtgcacagattatctctgccacagaatgggggaagggtggtgtaggcaatgaagtactgtgttgtctacgctttttagtgcctctttccttgatatgatgttaaaaccaggtactgtgatcactcatctgatttttggttcttatgaaagtgctttcttgtggggatagttgttcaatttggtgttctgaggggaaaggggtggatgattgctggaaggttctatttggccatcttgctttacctcctccaaaaggggcttgttatgaataacaataggtattccttttactttatcactctagagctgttttaggagccagagacaaaatccaaatgttataacaatatgctcctatccttgttatcacttagaaaattacaaggattttaggagctctgaccagtggggacaaagaccaaaatatgtatttcttatatcacagtatcacagatgccatttccatttttgttaataaggctactttaaaaatcttaactgaaagtgtacccatgtatctatttcacgttaacatctatttccctgcaggcccgggtcctttttgtgctgattgtgctgagccagctcaccattctcattatttttagatatcgaggatacccagagcttaaaggttagttatggttccttttattcctataagccttgttcatggaaaaaaccaaactccgtaaaatattttaaagaggtttattctaagccaatatgaatgaccatggcccagggaaaacacaaactcaagaagccttgagtaaatggtcctgaggcagttggattacagttgggatttatacattttatggaggcaggggttataggaaaagacataaagcaatacatggaaggtatgcattgcttcggccccaaaagttgggatatcttgaagtgggggcttacaggttttacggggattcagagattctttaatttgcaattggttaaaggactgaggctctgtctaaaacttgtcagcagaaaggaatgtttacgttaagataaggatgctaggtcagccacaatatactgggtgaaaaatgacctgtttaggaagattgatgtcctgcaggcattatatcttgtttataatttggtatcttattgtgacagagtctgttttgtcagtcttatgatctctattttaacattaatgatggtctgttgttgtgcccaaactctaaaagggagggagtatgacaaggtgtgtctgacctccctttccatygtggctgagaactcaatttttaaggtttctttggggtccccttggccaagagatatcccaaaattagttcaaggtcaaaaaagatttaatttataacttgatccttgggaggcatgccaaagatgtcaaaaggtttaaaacacttggtcagaataggaatagatgtcattgtgaagtaatagtcactcacttaaacagagagacaattaaaagacttcataaacaatgcagaaagttctgtggctgtaaacaaaaacctttcaaagctcagttttcctaagaaattaaaaaaaaactaataaggataatatgaaacataggaaattatcttgataatatgtaaaatctttgtttcttaggtcagttcccaaaaaagtaaagaaaaaaaccttcctgaagtgtgattgctcctccttatgggaagcctgtttagataacctggaagtgaaacctgatggaaagatacttaaatataatcagacataggaagagcatgcatccaaggttatatgtacacactatattatagagggacataaacaagaaaactagtaccttgagcaggggaatacagcgctcttagaaaaagcatgggaaatttcctggttatatgggcaattcagaaacatcaagaaaagccaagagtacagaatcaagttatatcggaggaaaacactggcctataaactctaaagctgcagttcagaagatgcttgaaaattaaattttaaagaaacagattttagaattaagtcaaaacctcttatggttgggcacagtggctcacgcctgtaatctcagcattgtgggaggccgagacgggcagatcacctgagatcaggagttcaagaccagcctggccgacatggtgaaacctcatctccactaaaaatacaaaaattagccaggcatggtggcacacacctgtagtcctagctactcgggaggctgaggcatgagaattgcttgaacttgggaggcagaggttgcagtgagccgagatcatgtcactgcactccagcttgggcaacagagcgagactctgtccttaaaaaaaaaaaaaaagttcccttcaaattccaaccatcctgatgatataaaacttccattacaggacccatccttcataaaccttccacaacttgcttagaccttccattattctcctaaactcctagtctttgtcctgtattttccccacttttatattggaataactaattattttaccataagacaaaaaaattacttaaaatttttttattcctttatattgagaccacataaaattctttctcatataaaaacagtttcatattaataaaaactttttttttttttttttttttgtgtgtgtgtgacctggaatttcgctctgtcccccaggctggagtgcagtggcgcaatctcagctcactgcaagctctgcctcctgggttcatgccattctcctgcctcagcctcccaagtagatgggactacaggcgcccaccaccacgcctggctaattttttgcatttttagtagagacagggtttcaccatgttagccagcttggtctcaatctcctaacatcatgatccacccgcctcagcctcccaaagtgctgggattacaggcatgagccactgtgcccagccttaataaaaacttaatttttagtaaccttaagctttaggttactctggaagtaagtaattttgaactgttatatattaacatctcatgaatatatagtttataatctctaaaaaaaattttttatggaacaatttttgaatgtggagtttactatttactaatagacccaagtatgttttgtctttctatgcaatttaagaaaccaagaaccaacttatactaatgtttagcaatttatgtttcagtattttatcttacttagaaatgactcagacatttcatgagtatctattacttaatttaatataatgtaactttaggatttaaaatcacatgaaaagttcatttataaatttatcccatttacattcatctaacttattttttaactacacatagattacttatgaaaactaagatattagatagagttagtcattatgtcaaggtatctttctgttaatcagttttacagcatgtgaatttcgggtgttcacctaagtagaaatcttaaagctaattatataaatattttgccaaaaactgaaaacagctatcttcattaaatcaactatattaaattagttttacttatcaaagagttacacaaagatcattctgattttaggctggatatatagttttgtgaccttttggtcaaatcctgcttaaaacatctagcacagagaaatgcaaaactatctgatcagtaaacccaggcaaaaaatgtatgctgacaattctgaagacatttctgtttttatcaacaaatttaaaatcaggtattttatgaaagatttacttaagtcacatgaactttcaggcatttgaaatcactatattttgatagaaaaatatatacatatactgatattaaaaaaataaaaacatatagactatcaaaaataaagaccttacaggaagaccttactacagtttttaccttaaaaatctagtcatttttcagtaagcatcagtcttcactcctaatggcaacatattaaaactcattaattcaggccaggtgcagtggctcatgcctgtaatcccagtactttgggaggccaaggtggatggatcacttgaggtcaggagttctagagcaccgtggccaacatggtgaaaccttgtctctactaaaaatacaaaaaatagccgggtgtggtggcatgcacctgtaatcccagctactcaggaggctgaggttgcagtgagccaagactgcgccactgcactccagcctgggcaaaatagtgagactccatctcaaaaaaacaaaacaacccattaattatttcttcaaatgttccttttccttttgagaggtcaccaatgccatgtcagtatcacctctctggattcctgaatagactcctaactgctgctcttatatccagtctctctatctaattcatcctcttcattattagccaattatccttcttatggcatctcatccatagatcacttctgtatgcaaaagccttaagtggctttccagaacacactgaataaaggtcagacatctctgcaagacactaaaaatcttccacagtctagtcttatttaactagccatgtcttcaaccagttacctgtattttagcctagatactttttcactgttccctatacgtgccatgctcatttctgcttctgtatttttctcatagtattatccctactttaagttatttttctaaacttatctaaatcttagcctcctgtaaggcttacctgaagacctcctttatcatactgttttctccagccattccaggtcataatgagctcttgcttatctgaatccctatagtcctttctcacaattaattctatacttaattagacagccactttgctttatataaccacttcgaatgtatatacattttctccttaaccagataagttcctcaatgcaggaactttttttttttttttttttttttagacagtctcgctgtgaaccccaagctggagtgcagtggtatgatctcagctcactgcaatctctgccacatgggttctcaagcaattctcttgcctcagcctcccaagtagctgggactacagacatgcaccaccacacccaggtaatttttgtattttttttttagtagagatgggtttcaccatgttggccaggctggtctcaaactcctgacctcaggtggatccgcctacctcagactcgcaaagtgctgggattacaggcttgagccactgtgcctgtcttcaatgcaggaactcttgcttcctaattctcttctgtttcccacagcccccagcaccaaatttgtgtataatagacaataaatacttgttgaatcaaattttcctgatcccttcttaatttggatgaaatccctgggattaaggactgatgatagagaaggggagtattgtagtaatgattaaacagtaacatgattaactgaataggtacagtacacatcctactgaatgtttttcttcttatatttattttaaaaattctacgaaaaagttcaagaagcattattatacatgtgtattttcctgaacataatgtaagtaaataaatatttgaagtccccagcctcttatatgggggctctcaatatttttatatagttatttaaatttgaaacatattttaacctacattgtttcacttaatccttaaaacaatcatgtgaggtaggtgctattgaccccattttaaagattagaaaacaaaggttttgggaggttatgtaaattgtccaaggtttcatagctaataagagatagaggagagactccaaacccaaggcttctgaccccaggtcagttctttcctctaaacaagacttttccactttggtcgtaccttagaaactgctgggggaacttctgaaatttcaatagctataacagcattctataccaattacatcagaatctctagggtgggacctaagcatcagtatcttttaaagctccctggatgattccaatgtgcagtcaagactgagaagcacggctttgtctaaagcagtatttctcaatcctgactgcttagaatcactgggttgctgcctaagatctccctctaccccaggcaaattaaatcagaatctctggagggtgagatacaagcatgagtattttctaaaagttcccctaggttattctaatgtgcagccaaaatggagaataattacttaaaatttaaagaatagctgcctctaaggctaaaggattttttaaaataataaataattattattctatctgaatatgtaggctaatactttgagaagtacagactagaacaaaaaagaagctgagagagtaacacaaagtaggaaaggtcatgcattatcaggctttgcataaaatgaagtgttaggctgagcaaggttataagtataaaatgaatgtgctggtcttttagcaaagacatgacttatttaacttacatcagactgtctttcattgagactagtcctttaaatattttttaccagtagtgttgctcagtgtatactgaacttcctttcatagtcctcagctgactggtttatggccagccacatgcatgggtgacatggctggttggggctgaggatctgtggtactgtagactgtggccgcagaatggagcttctctgagtcaagcccttacacttgggctttttggcactgtattttaaaagcacgttaatttggaaagtttagggaagcctttcagttggagtaagaggttagctgtgcgttaagaactgtagaaatagggaaagcgctggcagccaagatggccgaacaggaacagctccggtctacacctcccagcgtgagtgacacagaagacgggtgatttctgcatttccatctgaggtaccaggttcatctcactagggagtgccagacagtgggcgcaggacagtgggtccagcgcaccgtgcgtgagccgaagcagggcgaggcattgcctcactcgggaagcgcaaggggtcggggagttccctttcctagtcaaagaaaggggtaacagagggcacctggacaattgggtcactcccaccctaatactgcgcttttctgatgggcttaaaaaacagcgcaccagcagattatatcccgcacctggcttggagggtcctacacccacggagtctcgctgattgctagcacagcggtctgagatcaaactgcaaggcagcagtgaggctgggggaggggcgcccgccattgcccaggcttgcttaggtaaacaaagcagccgggaagctcgaactgggtggagcccaccacagctcaaggaggcctgcctgcctctgtaggctccacctctgggggcagggcacagacaaacaaaaagacagcagtcacctctgaagacttaaatgtccctgtctgacagctttgaagagagcagtggttctcccagcacgcagctggagatctgagaatgggcagactgcctcctcaagtgggtccctgacccctgacccccgagcagcccaactgggaggcacccccagtaggggcagactgacatctcacacggccgggtactcctctgagacaaaagttccagaggaacgatcagacagcagcattcgcggttcacgaaaatccgctgttctgcagccaccactgatgatacccaggcaaacagggtctggagtggacctctagcaaactccaacagacctgcagctgagggtcctgtctgttagaaggaaaactaacaaacagaaaggacatccacaccaaaaacccatctgtacatcaccatcatcaaagaccaaaagtagataaaaccacaaagatggggaaaaaaacagagcagaaaaactggaaaactctaaaaagcagagcgcctctcctcctccaaaggaacacagttcctcaccagcaatggaacaaagctggacggagaatgactttgacaagttgagagaagaaggcttcagacgatcaaactactccgagctacaggaggaaattcaaaccaaaggcaaagaagttaaaaactttgaaaaaaatttagacaaatgtgtaactagaataaccaatacagagaagtgcttaaaggagctgatggagctgaaagccaaggctcgagaactacgtgaagaatgtagaagcctcaggagccgatgcgatcaactggaagaaagggtatcagcgatggaagatgaaatgaatgaaatgaagcgagaagggaagtttagagaaaaaagaataaaaagaaacgagcaaagcctccaagaaatatgggactatgtgaaaagaccaaatctgctatgtgaaaagaagacacttatgcagccaaaaaacacatgaaaaaatactcaccgtcactggccatcagagaaatggaaatcaaaaccacaatgagataccatctcacaccagttagaatggcaatcattaaaaagtcaggaagcaacaggtgctggagaggatgtggagaaataggaacacttttacactgttggtgggactgtaaactagttcaaccattgtggaagttggtgtggtgattcttcagggatctagaactagaaataccatttgacccagccatcccattactgggtatatacccaaaagactataaatcatgctgctataaagacacatgcacatgtatgtttattgtggcactattcagaatagcaaagacttggaaccaacccaaatgtccaacaacgatagactggattaagaaaatgtggcacatatacaccatggaatactatgcagccataaaaaatgagttcatgtcctttgtagggacatggatgaaattggaaatcatcattctcagtaaactatcgcaaggacaaaaaaccaaacaccgtatgttctcactcatcggtgggaattgaacaatgagaacacatggacacaggaaggggaacatcacactctggggactgttgtggggtggggtcagggggagggatagcattaggagatatacctaatgctaaatgacgagttaatgggtgcagcacaccagcatggcacatgtatacatatgtaactaacctgcacattgtgcacatgtaccctaaaacttaaagtataataataaaaattaaaaaaaaagaactgtataatgtataggaaaggaccatatttggacagatactcatatttatgattagaatgaagatattttgatatttcttttaatttacttttgaagtattttgatatacctttttgaagtttgtacatttggacactaaattccatagaaaacagagacttgatcatcctttgaacaaaccactatctttcaaacctatataaagataaaatagtatggtgctctggtaggtgtgtccattgctttcagttattatatatatatgtatatgtacatatatgtgcatatatatatgagttcgatatattgtgatatatataacaattatgtatcttatgatatatataaaatatctcacaactacaccatttcttcgaactctctgccttttgcaattctaagtgaactgtctcaccaggattcctgccaaattctgaatttaaagtggtgtcatctgtatagttaccatctaacaaaggatttgctgaatatatggtagatagcccatgaaaatcttctagaaaatgtcataaagaaactgaactttgcatgtgttcactgggtttttcaactttatgttttttagaaccttcagggtttataaatctgacctcattttctcttcatgtcttgagcaaaataaacatcttctactattctgtgttgttgttgaccctgtatacagtgctgggtaagtaaattagtacagattatggggaattttgccaaagaatatattaacaattttgacaatagaattagactcttgagggtataacaaatggctcatggattcttcataaatcattttctgggacayggttttggaaaataaagctcgtgcctaacatgtttaaaggacatttagttaacaccaagttaacttaagggtgctgagaagactgctacagaattagtatttgtgtagaaacctaatagaagcttaaatagcacctcctcagagcaaccttctttgtctatcttaaagttttagtctatatctcatcacaggttttacttccatcattacctttatcagaatttatacctatcttctgtgtttattatctattaactcattaaaatattcactggtaggcgggtacggtggctcatgcctgtagttccagctacttgggggctgaggcgagagtactgcttgagtccaggaggtcaaatccagcctgggcaacacagcaagacgccatctaaaaaaaaagtatatatatctatccattggtattttgcctattttgcttagtatgtagttcattgaatatttactaatgtgtggctctcaaaaattcagctcaaaaaagagagaaactgagatgagcaatagttcaggcatatctgcactcttctgttgtattattatacccagtagtatcatgtggcatatgacaaacatttcagtcaacaagggaccacatatacagtggtggtcccataagactctagtggagctggaggtatataatagactatatcatgtaggtttgtgtatgatatgtaaggacaaaattgcctaaggacacatctctcagaatgcatcctcatggtgaagcaatgcatgactgtacttataaagtcacttagccacacttataaaagcagaaatcaccataaatcttttaggcttttttgcttatgtttcttagtgactaaaagtcaattaggagtacattagcctatttgttkcctagtcttagtctttattttacacttttatcctccctttgcactttgctcattagtaactcccaccagagaacaaatgaaaatataacactttatgattctgtgtaagctatggcagatcacctttggaggtaagttctcttgttcaagataggttgaagctgtttttgacgcttgtcttacacaatgaggtaaagcaagtaatttggttcctgggctgtaaaacaaaacaaaacaaaatacattaatagggaagaattgttccattcagaaagttgaaatctgaagacaaaacacctttttagactcatatgtctttaatgcagtttatataaagtatatctgagaaaattgcctctgactttttaaagctgaaccctattcttgccagcaaatgatggtatttgcattttttttttgagatgtagtcttgctttgttgcccaggctggagtacagtggtgcaatcttggctcactgcagcctctgcctcctgggttcaaacaattctcctacctcagcctcccgactagctggcattacaggcatgtgccaccacacctgactaatttttgtatttttagtacagacaggatttcaccatgttggccaggctggtcttgaactcctgacctcaggtgatctgccggccttggcctcccaaagtgctgggattataggcatgagccaccctgcctggcctagtatttgcattttgcaaacggaaatctaactgtcccttatcactcttgacaaacaacttgacactcttatggagaccagcacacttacaagacaaaatgacaataataataataataatacctagaaactcacacactgagaatggggcagtaaataataatagggaggatagaaaagtcagcatggcattccagatgagaaaactgaagcaagttaaactttctacatggtaaccgtgattatgtagttgatatacaaagtaatgactgtgggccttcaagaagaggttaaaatacattcattatattaacgagtgcatcttagaaagatttctttcaaaaagtagttgaagtttttttgctttaaggagtaaatctcaatcatctggaaatttaacttctgtggaatacctctttacatcttaaaggaaatgttaatgcattatattgaggttattattgcaatggaattttcaaaaatgtgagtgtgctttttttgtttctagaatctataagacacatatctgttctaggtatagtgtctactaagacaatttcacaatccaaaaaatagttggttagcaaggatatcaagtacaacacagagactagcaaagagggaaggctatgaaataaaatgcttatagatggctagtctcatatctctgctttattcctataaatgtatctcatgatatatgtaatcagaattatagttatttaatctcctccttttttgtccattgcctcttttaggtccatggttttttggtgaaatcattgatggcaaatttggttgctgcttttcctttgggatatttgttaatggacatttcctacaaggcagcataacatttataattggaattctccaggtaagaagtcagaaaagcaatttaagaacatcttggacttgtcagactaattgcataacagttatgaattaaatccaaaatccagaattaagtaccatagatcatctttcctactttacttgcagggcagtctttaataaaagcttcatttgcttttaaagtgcttcctaaactccttccaccactctcatgtaaacatctaaaatacatttttttttccccaagacagtgttctgctgtcgcccaggctgaagcacagtggtgcaatcttggctcactgcagcctccacctcttgggttccagcgattttcctgcctcagcctcctgggtagctgggattacaggcatgtgccaccatgcctggctaatttttgcacttttagtagagacagggtttcaccatgttggccaggctggtctcgaactcctgacctcagatgattcacctgccttggcctccgaaagtgctaggattataggcgtgagccaccatgcctagcctaaaatacatttttgtcatgaagtgtttataagaggtgaaagaagtttttgttgtttttgtttcactgtgctttttcattgacaaaaaaatgaaacaagggattatggtagaaaaagttttagatttctgagtaaaccaaaactgattatgatgatgaagaaggaaaatattttagagggaggaaactaaaaaatagacacattaaaaaaatgggtcagttattcagtggaaactgcattattcaaaaaccagacctgggctttcctagcaatgtacttgtttaggaaacaaactgatgtattaggtttacatttgattcctttaaaataaacacacaaagaaccttgatccatagaaaaactacataaacagatttgaaaagtatttatctaacagtttctttattttactcacctaatggagttagtggaccaaaatttgaagttttggaagagatccaaaaacattcaaaataagttcatggccttctaacagggcagtagaacatgatccaacaggattagagacagccaagtaggaaagacttctgcctagcaaacactgacccaagtccagaatattctctgcatagcagcattatatacatgagtaggtcctgggttcatttcagttttcttttcttttcttttctttttttttttttttttgagatggagtctcgatcttgtcgtccaggctggagtgcaatggcatcgtctcggctcactgcaacctctgcctccctaattcaagtgattctcctgcctcagcctcccatgtagctggggttacaggtgcctgccaccatgcccggctaatttttgtatttttagtagagacagggtttcactgtgttggccaggatggtctcgaactcctgacctcaggtgatccgcccgtctcggcctcccaaagtgctgggattacaggcgtgagccactgcacccagcctcattgcagttttctattatgttgatggaggctgtctctaaggagctctctcataccaaatgaatcctgagccttaccaaaaggcagggttttttcctttgtaaatgtttacattcatattctaataaatagtacactaataatggattttatgtatcatccagacccatgaatcccaaatctatatctctgatctagacctcttctctgcacttcaagtgcctctatatccaatggccacagatgtctaacaggcatctcaacttcatgtgatgtctctctgataggaacattatttccaccccaaacctgttcctctctgtttttccagttttaataaatgactccaccattcacctgatttctccaagatgtatcctcaattattccctttccttcataccctgtatctatttcaccagcaagctctaccttatttgatctgcttccaatgcatatcttgaatccatccacttctctccatttctgttttcctaatctaagttgtaattatttcttgcctgggtcttctccctgatattcttgcctccttactctcagcttaatacagagcatccagtgtgctcttttaaaaactttacaatcagctcacttacttttcagcttgaaatgctttgaagcagagcagtgatctgggtcctgccgactgccccaatttccacctggctcatgctctgcatgcacttccttaaagaggccaagacctctcccacctctgggcttttcatttgttccttctgcctagaatgcacttccctccgctgattcattcttgtccttctggcctctgagagcctttctcccagttaccttctcatgacccagttctttccttcattgaactaatcacgatctgtaattatattttttggtttttttttttgtctgtcttctccctgttagaatgtaagctctatgacggaccttttctaacttgtttgccattgtgtccccaacttggagcctagctcatgcctgctacataatgggtgctcaataaatatttgttaaatgaatgaatcatacagcagctcaacttggattataatttagatactctaatttatattccagtacttatcatgctacctcaaacaaaaatggaggtaagaaaaaaaatactgatagccaagtcctcccctcactccaccaaaaaagaggggttgttgtatgtgtgtgtatacatttactcagttcaattccagcttaacaccattgggtattaactgtgtatatgatactgtactacaagttgggacttcagcataaattaaatgatacctgcctctaagatgaataaaaggacatgggcaaatacacaactagccacaagtcagctgttgtgttataagcaactgtgcttgaagtaaattagctaacgccaagacagatagcagcatagtcttaggatccactaataatgcattattaagaccaaactcttccaaggacttgggagtaagctatggttctgttcttttccagctggcgttttttaacatccccttgatggcttacatgtgttggagcttgctgcagcggtgctttggtcacaacttcaggtctcatctccatcaaagaaaatacttgaaaattatgcctgttcacctacttatgctactgctgtacatctggcaggtttattcctgctactttctttatgcaacatacggcaccctagcttttttattctcccctttgcggacctggttgacactgctgacacctgttctcattcgttatgtgtggacactgaactccaccaagtttggaatcttcatggtgcagttaaaaagccacctgagctcctgaaggccatgtctcaccactggcagctgggcagaagcccagcctctgtgtctgtagcccaggcctctaccccagtagcaggtggagggccaggaytggtgggtgagctttagggagcagctgctcgtttggagtcctggacgttggagggattacccactactgatacctgcagaatggactgcagaaaagtctcaaaaataatgcctttattccttccctccctaaggaggcaaagagttgatttacctttgtgaagagaaaacccttatctaggacatccacagggtagaggttgggtgtgtgtacgggagtgtctgaggcccagtgtgttttttagggttaccccatgtaaagcacttaccgctgtgcttggaattcagcagctgtcaaaggtgcaatttcaggrgcagggaacctttgaggatctgggcccgaccctcactacccctgagatattagttcccaggcctgttttcccacaggattgtgggctctctgcttccttagtcggaagtgttttcaactaatcaaataaatgaatgaatgatgaataagaaagacggtgagcctgaggcttgcttgtgtagcctggcctaaggggcaagagaaggcgtggcctgtcctggcctctgagagtgggatggttggtgctgtacctcaggggacagggcggggcgggaggaggcggggccaggcctggtctctgataacgggatgggtggtgctggacctcgggcggggccgggcctcgtggcgggaggaggcagggcagggcctctgggacggggctggacggcttgttgacggaaacgagcccttgacgctgtggcccggaagtggagcggctgtcgcagtgcggctccggcagtggcagcggaggcctgtgtttgcggccttcggcaagcgactgagatggcgagcgcaactgcacctgcagccgcagtccccaccctggcttcgcctttggagcagctccggcacttggcggaggagctgcggttgctcctgcctcgagtgcggggtgagctgacggagttagaacgggcgacggcaggggcgggctcggggtcggggagaggccgggctcggggtcggggagaggccgggctcggggtcgcggagagggcgggctggggcggcggcggggagccgggcttgggcgagggaggtggctccgcttacctcagcttttccattcgccaccgttcggcccccacacgccacacccacaagtcggcgaagcccaggagaccaccgaggagtttaatcgagagatgttctggagaagactcagtgagtgcgcctccttccgggctccccttgcctcacttcctccagcgtcccgaccccttttcctcccgctgtcccccacggaggggactgctctcccccgctgcatcctttctgtgaggtaccttacccacctcagcacctgagagggtgaaatagaattctaacctcgacattcgggaagtgtttttgagaagtctcggtcggtaagggaagtcttccaagtccgtgcagcactaacgtattggcacctgcctcctcttcggccaccccccagatgaggcagctgtgactgtgtcaagggaagccacgactctgaccatagtcttctctcagcttccactgccgtctccacaggtgggcttcactttcgtggaatccttgggctgccgagttacaccttaggaatcctctaattttctttccaccttttgcacgcacgccaggagatttcttttcttcatctgtccagtgaggttaccgtttttacttcacaggattgttgtgaagaccgaattgccaagtgcagttcctggcgcggagtaggcaggtcttataaatattggttcagtctgaagtttatcctggttgtttcccttctgataattttttaagcactttttatttgctgggtgttttcacatacttgatggccatctgacagatgagcaaggaggctcagaagctcagcttaagatttaaaaaaaagcaggggggctagaatttaaatcaaggtctatctgatgtctaagctacctattctgttatactgcataataccctttttatattattttttatatttaatcagtaacatatgtagatagtacaaaattcaacagatatcaaagtgtgttaagtttacctttccacccactttctcatttttgtctcccccagttccttttgcattattccacgtatattctgtgcatatatacattcatatacatttatctgtatgtgtcagcttctttttacacaaatgatacataaacactgttctggaccttccaacttagaattactgcaaacagtgtcgtgatgaattacctaattctgtgtatgtgtgtatattggtagaaaaaattcccggaagtagaattgctagaacaaagatttatgcattttaaatattcctttattataaaactaatgaaagtaaacatgttggctatgaccacgtatgctctatgctcagtttttctagagttgtgtatgcttaatataggagtaagattcttttaaaatggcatattcattgccttatttgattttcatagtcaatcgttttaatttttcagtctacatatataggtgtttggaaaggatataaatatcttctgctgcatgtacctacagtgataaactctctcctcctacatacctttgagattttttttttttttttgagacagagtctctctctgtcactcaggctggagtgcagtggcacagtctgggctcactgcatcctctgcctaccgggttcaagcagttctcctgcctcagcctctcgagtagctgggattacaggcacctgtcaccacgcctggctaatttttgtatttttagttgagacggggtttcaccatgttgggcaggctagtctcgaactcctgacctcaagtgatccgcctgccttggcctcccacagtgttgggattacaggtgtgagccaccgtgcctggcctacctttgagatttgtgatgaggaaacaagagatgaattgtatgagagcacttcaaaagattcatggaaaatacttatttcaaaaagagtagttaatattaccttatttttcttatctgctaacccctttctttcaaatgcacttaggacttgctgctaaaactcactgcaagtaagataccacaaggaggcagcatagaactgattttctatacatgctcaggacagtagtttcactcatagatgaaaagttagaatttggatttatttgaaatatatacaaatattcaagtatatacatatattcaaataaatacatatatgtatatatgtgtgtatatacacacatacatacacatgaatcatcattgccttcttgagatctcaccactttagtcctactaaaagatgggtggttgttggtttttttttgttgttgttgttgttttttaaattccaatctgtatggaatgatactttaataaaattatgtgctcggatgttgaataaatgtcaaattgccataaaagtttctaaacactctcagtcactgcttatctcatccctgactggtcacaaacagtttgtagactggctccaacctggaccacatttgtatagtattgacttagaatttaacagaaaattgaggacaaggaagatgagaaagccagtgaccacctagaaggaaaatagttaacatggagcattgtcgagtccatgctagttacctttagttacatattctgattctgttaaaaaaagagagagacctggttaatggtttaataaccatggtctgtcagttggtctgtctgtctctctccctccctctcttttctgtaaagggccagttagtaaatattttagattttgtaaccaactacccaactctgcccttatagagcaaacacaactacagacattaaaaccagtgagtatggctgtgtcccaatacacttcatttccaaaaacaggcagtggggcctgacttggcctgaggaccacagtttgccagctcctggtctaagatatcatgaatatcttgggatacagagtatcaggaataagttttttcctgctgtttcttaatggtttattgagttgtcagcccaatatctactatatagctaactcctccctggtatgtgatgagtatagtaggcctgccttcataccaggacttcagaaaatgtttgatgatgctgtagaaatatctgccctaggccgggtgcagtggcttacacctgtaatctcagcactttgggaggccaagggaggtggatcacctgaggtcaggagttcgagaccagtgtggccagtgtggcaaaaccccatctctactaaaaatacaaaaaattagctgggtgtggtggcgggtgcctgtaatcccagctacttgggaggctgaggcaggagaactgcttgaacctgggaggtggaggttgcagtgagccaagattgcgccattgcactccagcctgggtgacagagtgagactctgtctcaaaaaaaaaaaaaaaaaaaaaaaaaagaaagaaaaagaaagaaaagaaaaagaaaagaaatatctgctctattccacagcagaagggttgaccactttgatctaatctgtttcctttttcataggaaacccagaagttctgtgaacaagtccatgctgccatcaaggcatttattgcagtgtactatttgcttccaaaggatcagggtaagccacataagtgttgcatttatcgtgtagatctttgctaatattgtggattatgtcttgtgacttttacctttacccaacttgaacatgtaactttctcccataaaatacagtgaaggataattttgtaatgtaagtgacttatataaacaagccattattctaagatacagatgctttgttcctatgacttcccatctcccctgccttgcctgactcataaggcttttaattctcacagccttctccctcttcaacccgttttaacaccacagatactggctggctctcagccccatatgcaggctcaggccatccttactttcctccacccatgttatatctcaccctatttctgaacatctgcataggttaaatggcctccagccctgcctgtagaatcatgcattgattataatcatgccaaaattataactgaatacatgtcatggatcttcagggttactcaagtggcttaaacttcaagtgtttcatctacagttgttaagagatcacggtccttaatgaatgaatacatggtgtcacggaaagattttgttccaaatctcttttgaagaaaacactaaggaatggcaggaggggcaagaaaatgccatggggatataagtaagacctgagttttgtgttagcatgtaggttaaagcatgtgggtgtacattaccttatagttctgtaatgcttagactcaggaaagcagatggtgcttctgaaaagaacaccaggttgcttattctttgggtttggccacagggatcaccctgagaaagctggtacggggcgccaccctggacatcgtggatggcatggctcagctcatggaagtactttccgtcactccaactcagaggtagtgatgccacagtttaggttaccagttattggggttccttgcctcagaggggaaaagctcattttaacagcaaagttactgacagctgagagtaatgaccagcaggaagaagctttttaggagacaggaacctaggttattaatatatccttactgatttctttccccagccctgagaacaatgaccttatttcctacaacagtgtctgggttgcgtgccagcagatgcctcagataccaagaggtgagtgaaagtgggcagtgggccatgtctgctggccaaagcaaagagacctcatgtctagcttccagctttgtaacatgtatttgaatttatataaacagtctagtgaaatatatatattttattaatgaaattaataggtaggtattaatactttttgtcattctctagttatcatacttctaaattccactcccccttgctgtggctgtctcttgttgaacaagtatggtttgttttcctagtcctaccccaagagtagtattatggagcacactgaagcagttatgaggtagagacagctaggccaaaacagtggttgtccaagaggaccatgatgataaacatcatgtgaccattttatttcttcttgtgaataaaatacaagctttttaaacccctatctagataccaggggatgtagtgagaattttttattaaacccgcacccttgtcaaccgtccttggcactcccatcaataggaacaatgtgattgttccttgcagtcataagaaaattgttggatttctcctctaattctagtgcttctgatttttcactcatagataacaaagctgcagctcttttgatgctgaccaagaatgtggattttgtgaaggatgcacatgaagaaatggagcaggtgaggggacctccatcattggaaggcaactccttgactagtagatgagaattaattataaagagagatttcctgagcattgaccagataggtcccattctcactact

SEQ ID NO: 98124 - DNA, 23600 bp, Homo sapiens
gcactcaagtctgtcagtcttctgcctgaagttggaagtaatcacggagaggcagaggggttggaagggagagagtaggggtccagctttcctattttaaattataactgggccccaaattcaagcagtcctgtagtttatttcctttaatatcattctcaattaatttcttctttaagctttttatccagctttgtgggggaggagggggttgtctttactcctgtaacaaggaaattgagggttctgaggctccagggtcagcctggaagtgacgagaggcaggacatctgggccctaaaatgttcacttcagtccaagaagcaaaatggattacctttgggcatggggacaaggattagccttcagcccttggtctagaaagagccagacccaagatggggcatcaggagatagctggcactggatcaggcagagcagaggagggccggctgatggcgaggaggggaatggggcctaggactctccccagcccatctctgtttccactcttctggtgtggcactccctgcttctatttctgtctctctccatctctctcactctttgtcatgcatttcctttctacttcatctttcagtctctcttttcctcctttctataggctttcaccccttctagcatttcctactcacctatccaacttagtggtagccatgaatacttaggactcctgagatctgtgcttcactgtccccatctgaatattcggagctgcaattaggaaggggtgagcatccctgctacaaaagacagagtaagtttggtcggagtggcttggagattcagtggttggctgcctaccagctggtgaagatatccatcatgacattgtgcgtgaggatctgtgtgagagagtgaggcgctctgtgattctgtgaccctcttcatgcatgataatacatccacacatgatgggcacggaattgaggaagtaggcaaccagggaagcctgcagcctagggcatcactggcaatttccccaatggagtatttaaccacaaagggaagagcaattaaagctaatcgctctgacagcctggggcccagacacacgtaccactttccctaactcccagtggtctcccccaaccttcatcctccctaatttgtttagtgcactctcaaacactgtttgcacttctctgaccatctctttctctcacttcctccctctccctggttccctgactatctctagacctctctggagatgtctgtctgcttctcacacacattcctctcattctctctctgacttgggttccattcttggctgactcatacccattctttttcctctccgtttcttccaccccctcctcctccatcccttggccactcttacccagaaactagccactcccagcacgctaagccctaactggacccaggaagagaagccaccagaagcccctaccctcattagtccgcaaaatcctgtctccttgtgttagaggaatgagaccaagattttctcccatctttccccacagttttaaagaggaacaatctgaaaccatggggctgggaaaagctgccagaaaatcaggatggatttggggacagtggccctttctgtccactcagctgtcctgtcggactgatgacttggagcccgcagttcagaagactcctcatgggatgccccaccccacagagtgggggtgtggtgggcggccggatgcgtagtccagggacgtttgtgatttggagtgtgctagactatgtgtataagtcacatgggtgtgtgtcactgtgtgtgctggcgtgccttataggtgtgcgtgtttccctgtcagttttgacacggattatatgaaattaataagggtttttacgttagatatacatcacttctctacacccccagctcctccttccctctggacaagctttccgccaagcccacctcttccccaggtgcagtgagctgggggtgagggcacatggtaccagccgcccgcggaaccgagacagggctgggccgggagaccgccagcggaggcgagtccgaagcctgagcggggagggaggggcgggcgctggcctggccgagccggctgggcgggaagcaggctgcatcctaatccacaggccccggtccgactcccaaactgccgttcagcgtggaacgggctggccggagccacgccgcctccagcacacgctcggcgctcgggacgcaccgaccgagggacggaccccgtgaggcctgacacaaagtggactcgtccggggtccccacactccccgtctggcccccggtgtcccagatcgttgcccctccaagcctagaccccgaaatctgccccttccccgcgacatgtctcctctccgcccctctcaccgcctctggagctgagcgctcagggcgcgggcactcctgagtccccggttcctaagcagcgtccggaacctcctcctcggctcccgccgccgccgccgccgcttctgccgccgccgccgcctcttccgcccgcggagccggagcccgagcccagcgccgctcactccacccggctggccggtgatgtcagagccggggaggggcggggggcggggaatggcgggaggagggggagggatggagaggcaggagggggcgggggaccgaggggctggggttctggaagactcctaggatgggggacagaattgggcggagggctggagcggagacggtctcttccccctgaactgcgaaacaattctcatatttaattcttacccagtagggcaccctcctccccttttgacctttggatgaccacggtgcctaggacccctgggaggcacagagtaggtttggtttagggggttggaaagcctttgggggctggattctcttagctgctggctttaatatttgtaaaaacttcttgccttgccttaagggtcaggggcgcagtggaaaatgactgatcagacttatccacattgggagtgaggggttggggccacatggggacttgaggagccctggatcttctctttccaggatgatgccttcaggccctcttgcgtgcctctcacctttcccaaacatgccccactcctgccttccccctaccatgatgtaattttattttctggggagaaaaagagcagcagtgagctcagcatgcaaatatagacaacttgcaaagccacacttagctccatctcctagctctgcccctctgcccaggcccaatgtggcagctctcacttcccctctaccccagggactttcctcccccagattctcagccagactgaaaagaggaaaggaagaattggagaagcatctgttttcacccccatctctatagcctaaggggtcttgcctcagctctgggcagggtttggccctggaaagaagtctgaccctgggtaggtccttcctgccaggaactccagcaggcccaggttgggggattcccctcagtgtttgtgccacttccaggatcacccatctcatctcagttcctacctggcagagactcctccagaaacctcaaacgagcccctcctttcttgggtctacaccattcctagaagaggcccaagttcctgctgctctgggtttcatagcatttctctgctgtttcctctccccagcattccctgtcacacactaatcatttgcctttgtatatatcatgtttgctctgtgttgtagggacaaaaactatttcgttgacccatctttgagactcatgtagtttctaagtgaaaggctcaggtctggaggcaacaagacacaggggccttgggctgcgtgctagttccacccattccttgggcaagttatgcctgaaagccttagtgtcctcaccggtcagatcagggtgccaatgtctatttctgagggttcttctgagattcagaaatagtaagtctctagggactggcacagatgggtgcttaaaaaataggagctattatttagaccggggccttccactgacctatgctagacagtaagctccacaatattattgtaagactagcttagtgcccatactacttattaaacatttattaaatagctacaagttggaatgaatacatagtttctgctttctacacccctgccacattctctaggaacacttcctggacttgtctgtggagagtgaaaatatatctaatctcaggtctcatctttccgtacttagaaatcctctaagtctctcagcaacaactttacacctgatccatgaaaaatataatgttggcttggcgtggtggctcacgcctgtaatcccagcactttgggaggctgaggcaggtggatcacctgaggtcaggagttcaagactagcctgaccaacatggtgaaaccccatctctactaaaactacaaaaaagttagctgagtgtggtggtgggcacctgtagtcccagttacctgggaggctgagataggagaatctcttgaacccgggagtcggaggttgcagtgaaccgagatctcaccactgcactccaacctggcaacagagtgagactccatctcaaaaaaaaaaaaaaaaaagaaaaaaatatatatatatacacacacatatatatgtatatgtatatatatataatgtttattatttatgggcatcatctcaaaaatatatatataatgtttattatttatgggcttgtttagctatttgtatatattatatatataaaatgtttattgttcatgggcatcatctcaaaactatatatgtatatgtttattatttatgggcttatttagctatttggccctcccatccccaactccctaaactcctttttgcttaccccagcctgggcctattctggaaagactgtgggtccttcttgccaagacctccagcaggcccaggtctgggagatccccattgtatacaatatctcctctccattcccatggccaccacttgggtccatgttctcccaacatcactccaattattataacagtcactgattatgggttgggccccttacctctggcatctccatcatctcccctccccatcctgcttatcgctaccagattaaattttgccctgcctcctcggctggcaggattcaattcaaacagctctacaacccagccccattatgcttacccaacttcatggccacaacttgatttttcttcttgtctctctggtctctgtgcccccaatatgacaaacatatcctgccagtacttgatgttttccactgactgaaatgtctcctcctcagctcctttgtctccaaccaaatcccattcttcaatttaaggcctagtaaaggcttacttcctttgtgaagtcatcaagcccactctgatctctcttctgagttcattctgttctttcctttgttcttcctttaggaaacatttactagggacaacttttgagtgtcagaccctgtggacacaaagaaaaagcttgggttcctgccttcaaggggctcacagttgagtggggaagacagacacgtaaatgaagaacaataacagactgtgctgagtactggaatggaagtgcagcaggaactcagaagaggtcatcactggaggggccacctctgggaaggcttcaccaaggaagtataattggagctctgtcttgatgttcaaataagagctgcagagagggtgctatcgagcagcacataatcacttaattacatattgctttgtattcttcttcgattgtttagtatgcttgtcttgacttctccgtgaggctaatcagctcaagatcagggacaggcctagcactctctgttctcccagagcctaacagtggccctggacaaacaccatgtgttcagaaaaggcttgttgacttgaagcagattaacaatccaggcttctctgggaaagctgcctggaggaaccccagtccccactataagagtcccccagctcatccctagcaaggcacccacatctgaattccccatcagtggccacctcctcctgccataggggtgagacttcaccaaaatacacttgttcatgctgccccagatgtctttattgaggcctctcatttgacccaaatacattaacaagtgattgctgagatacagtcccaaacacagtattctcccttccttctggccaaggacaggacagtcagaaagatacaggattagagagagtgggggaaagctgtgcatagatggagggaacagaacagagatggggcccatatatatggctagaggagaatcacaagaaagagtatggagagtgatggaagagacacataatagatacaagtaagttatgggataagaaacagaagtcagataagagagagctggcctggtgtctagggaaaagtagctcatttgctcatcaaatgagggggatcagtgtctcagcacccagcatatagaccccagttagctctatggcagagaataacctagtctccctggaggaactcagggaaggacaagggaaggcaggagagagcatgaaaagaccagtggggctgaaagatggttgccatagcaactagtcatcatcatcatcgtcatcgtcctctgtgttgatctcgccctccaggacatcctccagccagtcctccagctcctcagcagaaggcaggtcctcctcatcgtccatttccatccatacgctatccgcctaggagatggcacaggcagggacggaagctaagtccaacccgggtcttaggatctgtcttcccactcactggactctgtacatccttccctacattctcagtcccttcctttcatctgccaaaggccagggaaactgtccaggtgaaggtatgggttagaatagtgacaggtgagagtgggaagaaaagttggattggcaaatagaccttctcccttcaatctgtctcccgtgctcttgccacactgaacttccctattatgcctttggtgcaaaaccactggtagctcttcatgrcttataagaataaagttagcaactcttcggcattcaggacatttctttctttctttcttttctaaaagagacatggtctcactctattgcccgggctgaagcgcagaggggcagtcatggctcactgcagccttgaacacctggcctcaagtgattctcccaccttggcctcccaaaatgctgggattacaggcctgagccactaccctggccccagggcttttcataacctgcttttctagtaccattctcagtgatctctagactctcaaccataaaaatccacctgccttttccgggaacctgatattcattttcctgtttttaacttttgatcttgctttttcctcagtttggaaatgacttccctgaatcatcacttgttgaaatcgtatacattgtagaatctccattttgaatatcactttttcttaaacttttctctgattctgtcaagcagaaatcaatgtgatcctgtgtcttatttgtatcgttattataaagtttatcagatctggccttgtagttaatggaacacttgcctctctaattagtctgagaattctatgaaagcagagactgtggctcattcagttcaacttagcagttttgaagcacctactgtgtgtgcataagaagacttctgccctgaacaagctcaaaaatctactggaagagacacacataatacataaatagccatttaaatgtcatgttctcaatggctattgagccctgggagtgccagggagggaatgattttaaatgggagatctggaaagacttcacagaggagaaagaatttgaactgggccttgaaggatgagccactgattccaacatgtgggacagggccacattcagatcctaagtctccccctccatccagccactagactgggcatgtctgygtcctgtgagaagggcccaactcctagttagcagagaggaggagagctagctatgctaggaagtagagtcgggggtcaacccgggatgaggacaggaaactcacatcagtaacattgacgactcctatttgtggggctgacaagtcgatgtcaaacgtcttctcccagtatgggaccagctgtagagagatcaaaatacagcaacttaatagatactagggagcacatgaatccaggaggatgagtgtgagggtcagcccagggatrgagaggggacagtgcgaactggcagtggatggggacaggtccacctgtgagggcatcaaggcaagggtagaactaaacarcaaaagaggagaaatcctaaagggagagaatcgggagggtcagctgggtgcactggcccctcttttctgaggaaaactggataggaaaccctgttctgatcctggatcagatccttgtgttcaaggtcaagtcacttctctctggccctcagatcttacatttctaaaataaggcaagtatacctggtaagtgccaatgtttctcacgtttctctttgttctttcagttactcattcaacagcgagtgctaggtgttgggaatgtagctgagaacaaaatcatctcctgaaacagggaatctctgtgctatgattctatgattgagtgtgtatacccatgtgcaggactattgtgcctcacaacattggttttctttaggagtcagccctagcacctgagctacccatccagcctctgctctgggaatgtgtgtgatgtccgtcctgtttccccttgctcaggatgccctccatgccaacagtgcccttaagcatgcaacacgcataccctcccagggccccccagctaggaggtggggatgggacctctgaaacaaagccctcactaagaagatgtcacagtccaaggccccaccttaagatagcagtgcctgagctgtgcctcttaccagggggaagtcatcagggtcaatccagatgatgctaagatctgggttttcagtgttatcttgggccacagccttgagagtctctaagaactcgaaaccatcttggagggaacacaagtacaaggtatgaggtgtgtagagaggaaagggacccaggtgaaacaggagtgcagagctacctccctgctccccaagcttcacatgtctagccctaggctgtttgcaaactcccaggaaagcctcctagtgaggcccatgctccaataaacacacccacctccccctgccttccctccagtccaacccggtattcctccctcaccaggatcagcttcctctgcgaaggccacaatgtggattccatccatatcatcctcctgtcagggggtaagaaggagaacagggttttggagaagaccttactatactccctgaagttgaggagcccagaacagatcctagatgttcattgaacytcaattttgtggaaatccagcttcaggaccagatatattctttcgttttttggggtttgtttttttttgtttttgagacagagtttcactctgtcccccagggtagagtgcaatggcgcgatctcggctcactgcaacctccgcctcccgggttcaagcgattctcctgcctcagcctcctgagtagctgggattacagccatgcgccaccacacctggctaattttgtatttttagtacaacattgtttcaccttgttgatcgggctggtctcaaactcctgacctcagatgatctgcctgcctcagcctcccaaagtgctgggattacaggcgtgagccactgcgcctggccatatatattcttgtgatggtgacctttttccaagtgacactcctttcagctccaaggccccacacttcctctgataatccctttatccccaggcttgaggctcttcccttgtcatcttcaattatgtctgtctcccatttcctcacacattcttcagtgtagaaatcyttcagttgctgctagtgcactgttttttcttttttctttttttttgagacggagtctcactctgtcccccaggctggtgtgcagtggcggatcactgcaagctccgcctcctgggttcaagccattctcctgcctcagcctcccaagtagctgggactacaggcgcccgccaccacaccctgctattttttttgtattttcagtagagatggggtttcactgtgttagccaggatggtctcgatctcctgacctcgtgatccacccaccttggcctcccaaagtgctgggattacaggcatgagccaccacacccagctggtcagtgcactgttttttctaaaaatgggcctgaggagcagtagggtggggtttttctaggacttgagtcttctggcacccatgcttccctgagggcttgaccctggccaggggcactcacccaggtctcatacatactctccggcttcagtttcctcagggttgatctagaagagacagacagagtgtcattactcagtgggttagaaggatgccccctccagagggtcctgtagcaaaggctgcctctaggtcaggcccagggcacagacagcttgtagcctacaacaaagccatctggcaaggcctcaactctgggcaccaggcccggctcattgcatggttaaagcggtgggagaggggagggtgggcaaagggactggaagagagactgggggagaaaggcaagaactggacatcaggatattcattaatttattcattcattcactcactcactatgattgagtgcccgatatgttctaagcactatgctaggtgctgggtacatacagttgaaccaggcaagcatgttcctgccttgatgaagggagccagtagtatgggagagtaagtactgtatatactgcaagggagcttgcagtgatccaccactgcacrctagcctgggggacagagtgattggatatttccagctgtggactactatgaaggaagggaattatgtgtgagtgcccggcaggattattcaacctcagcactattgccatttggagccagataattctttgtagtagggggctgtcctgcgcactgtagaatgtttagcagtatccctgggctctagccactaaatactagtagcactctgcacaaccaaaaatgtgtctagacattgccaaacatcctttggagggcaaaaacctatgcccacctcgccacgccttcccaccttgtagagaaccattggtgtacgatattgtattagaaagaacatggggccaggcgcagtggctcatgcctgtaatcccagcactttgggagaccgaggcaggcgcatcacttgaggtcaggagtttgagaccagccwggccaacgtggtgaaaccccatctctactaaaaatacaaaaattagccaggtgtggtggcgtgcctgtaattccagctacctgggaggctgaggaaggagaatcgcttgaacctgggaggcggaggctgcagtgagccaagatggcgccactgtgctccagcctaggggatagagtaagactcggtctcggaagaaaaaaaaaaaaagaagaagaagaaaaaaagaacaaacatgggacacatcagggttaaaatcagggttaaaagctctgacacttattacctgtagaamctttcactgaggttaaaaggacttaatataatcatagagatggaaagtaccttgcagttcctgccccaccacaggcagtcaacactcatttgttgacagagattatttaagtctcaatcaacctcacactgaattatacacacttatgaaggaccctctcggtgtagggctcagggctaagtagtggggtataaaatattgtgcaaaattgtcagtgtatcagagagcactggtgcccaaagtgtattcatctccaggcaagattggcttcccggttggctaagctttccccagcccatctcacacagtgtgttctagcccaaggaggagccgacccygctgagagggttgcccttggtccccacctcctgtgctcctccacgaagttgacaatctcctcttcgctattgggcttgtctgggatggtcacaggctcttccatgaaggcctcgtagaaatcaatctcattcagcttcagggtcagcttctttgccacctttgggagaggggrtaggaggggagtggagcaggagacacagggtcatgtcgagaagcagtataatgggggaacaaatattaggaagggagtcagaaagccgggatccttgtcwctgccactgtgacacctgacaagtgtcttaacttgcctggggttgggtttaacatgagaggggtgttagatcatctaaagcccctcttcagctctaaatctatggagtgggaggagccggrggggggggcaggtagggagtgccagcacgtaggaagggaccaggtcagccatcgattctgggagaggaaactggaggacagcttcaggacatgaggcagaaccaatacagctgcggggaggagaaccttgctgtcgaaggtggcgaagaaggggatgtagggatgaaactcctcagctgcatcctcgaaggctttgtaatctggggggtggaatgcagagtcagtctctggggaaaccagggtctgcccgggaatcatcccccactatcgtccccaattctttgcaggcagggttcattttgagacccaccccttctagttcttcgagagtgaggggaaggtggaatactggaggkgcttgtctgggaacccccagagtacagggaggtcagagctgttgatggtgctgaccacggctggaggaagaggtgggaagtgcagaggtagaggctgagacactgggtgatgtggggaggtgggaggacaggtgagatggggatccagagaggggcacagtggagtctgagggttacccacgctctgagtctttgctcttgaagtagccaatgagtttgatctcatcctcaatattctcaaacgcctgcagctctcgttcaccttcartcaattccacagggtcctctaggacctgaaagaggaggacattgcaggaagagagtttctatcctcaagtagaaccagaaagggacctagggaaaagaaggctggggaactggaggagggggctagatgttgacagtgtgtgggtgtgtgtgtgggggrttgcatgtgcgtgtgtgtgtatagtgtgtgatgtgtgcagtgtgtggtgtgcatgtgtggtgtgtgtgtgcatgtgatatatatgtatggtgggtgtgtggtatgtatatgatgtgtgtgtgatgtgtgtggatggtatgagtgtggtgtgcatgtggtgcatatgtgtagtgttcggtatgtaggtgatgtgtggcctactgtgtacatgtgtggcatgtgtgtgatgtgtgtgaatgtgtggtgtgtgtactgtgtggagtgtgcatgtggtgtgtgcatgtgtgtagtgtgtgcatgtgtggtgtgcaggtatgtatgtgcatgtggtgtgtgtgtgcgcatgtacggtgtgtgtgcatgtgatatatctggtgggtgtgtggcatgtatatgttgtgtgtgtggtgtgtatggatgggtgtgtgtggtgtgtgttgtgtgtgtggtgtgcatgtggtgcatatgcatagtgtgtggtatctaggtgatgtgtggcctattgtgtgcatgtgtggcatatgtgtgatgtgtgtgcatgtgtgtagtgtgtgtgtacatgtgtggcgtgtgtggtgtgtgcatttgcgtggcatggatgtggtgtgtgtgcatgtgtggtgtgtgtttgttgtgtatgtgcatgtggtgtgtgatgtgtgtggagtgtgtggtgtgcatgtggtgtgtgtgtgcatgtgatatgtgtgtgatgggtgtgtggtatgtatatgatgtgtgtgtggtgtgtgtagtgtgtgtggtgtgcatgtggtgcctatgtgtagtgtgtggtgtgtaggtgatttgtgaactattgtgtgcatgtgcatgcatatgtgtggtgtgtatgcacgtggtgtgtgtgtgtatgtatggtgtgtgtgcgtgtggtgtatgtatggtgtgtgtgcgtgtggtgtatgtgtgtgtgtgtggtgtgtgtgtgcagtgtcaggttggggttggtagggactagggggcaggcagtggagttttcaagcaaggccgtcaggtccaggggagtccttacatcaagcagaaactccacgatggtgtcagcagaaaactygccatcgwactcaatgacttcatctcccttgaatacatacatgctgtccacttcagttaggcctagggagtgagccgggcgcaggggtgrggtagtgagccatgatcccaggcttcccacagattcaaggtccaaatcctcggccacagsccrtttgataatcaccggggccccacrtgctccacctcatgggcccgttgccccacccacctcctctgacccagaggccgacaggcctgaggtctctgcccctggattaagcctagggggctagcgtggccccagagctttctagggagtagctgggggatcaggtagggtgaggggagggaatagagaggtgtagattctagcagtatttctccccttctctgaccgcaacgactagagatgagtattcatgccaccccctctgagcactctagtagctggttcccagtcaagctctttaattgctattactgaccagatgacttcattattactgaccacccctcccccatgcatgtccagaatcccgtctcaagcctgtgctgccccctagtggctgactgctctaacaaccatggctctggatgggaggggttggaagcggagtttgcagaggtctggccagccccgcctgtattccccgactccycttccctccagcacctagccatgttttaaggtaagtataaagaaggcctcccccacctctttctgggatttgagcatggaacttcayaaggaatagagaggcagagtctccgagccataaccctcccaacctcatattttctcaccccctcttttagaatagacataaatctgagagattcccaagcccctcggatcccaaggactgcctgacaggtcctccgccctaagcctccccttgtctcaatgccaccttcccctcccctgccctcccctctcttacctagtttcttggccacagctgcatccttctcagagtctaccagcccgaagccaacacccttgtcttctaggacttgggctgctaactggagggaaggattatgattaaaattagcccctggaatttttattatcccctattctccctctcatgctttcaagttgggtcagttgaggtgcgggagatataagagttgaccttgaccctttgctaagatccagaatatcccccaaattccctacagccacacagttctgtttttggctcaacttagttcatgaatattgattgctcatttgcaatgtgcttattatgttggacttgaagacactgcactcaatacttcccagtgcctaagaggtactgaggagtctggcttcagagtgactgagggccccttccctccttcagggttgagtcctgcattccatcctgctcaagtcacacctggaggtccctgtccctggtcaagggccaagctcagtgtggggttgatcttggaagtccctgagattcttcagagtgactcccaatgggaagaattttggagggtgggagggtagtggtgggtctggtcatgttgttgaggagttggggaaggccagagagctgagataagaggtcaccatttgttaccccccagagggagagagactgacagcgaccggacagttctccccatcagggcccaactttcccctttcgcactctacttcagcctgtccttaggctgtggacagtcacacctggaggtccctgcccccataagccttccagcttagcgttcaaccctgattttctctgctgtgggcacagcttgcagctctacccccactcagcacagactcaggtactgtgattctcagaggggtggggaagggaggcggttggcaggtggatggccagggatactgagcactcaggataaaaatactcggctcattaatcagatggcaggttctagcacccagcaggggtgcacaaaatgagagcctgtggttctggtgtctcaccctgaaatgctccaagctctggacaagctgaggccagagaaggggccacaggagcttggacaagaaaactcacatcccatttcctaaaggtgtgtgtgtatgaacacattcccaaacataggttttttttcttttcttatgataacttctttctcctttgggcctgaagtcattttggaggtgaggagacttttcccacaaaaagaagattggggaagacattctgacacctcctgcaaccataagaattttccagtgagggcatccagcttatccaatggagacaaatggggaattagggagggggaaggaagagagaggggactgggagtccaatgggaggcatgatctctaggagatatttaaacatggcatgcaagtatcataacatttacatttacactcagtttggatctctttggggtgcagcccctgaagtatgtggagaggacgtgttctggctaagcagatgggtggggtaggggagtgcaatatacactgctgttctcccctggccctccaagtacctccctttttcaccctcagtgtcctagccaaacctaagtcaaatactaccagcctcctatagcagggaggggagctcttcctgcagcacccctgctaaaggtttcctgacgctgatagtacttttgggttcctgagactctgtttctcatttgactaaagccacatgccacttgcatcctgttggtcaggacagggttcctaccacactgcccctcacccccagatcccatcctcaaagagctacatgggtgtaggataggggattccggagaggggctagacatgctctgcaggcctgcagtgcccccaactcacctccaggatcagctcctccatctcaaattgtctttgtgaggccttgtcatcctcggggggttcatggtagaggagtgccagcacctcatacttcttgaacacattcttgtagttctttgcattgacattgatcacacggtccacaccatcgtactcagggaagtccagcccttcctgcccctgtacccctgacttgggtgtccctagcaccagcagcaacagcagtgccagccgcagacccggcacagctctgggccccatcctgtctgtagcactcatggaggtagtgggatctgggtkggctctcctggtccagaagaggttagctggggtagggaggggcccctgggtcccagattctgagttaggggctcaagtgggaggggggattggggaatggcccagagcagtggacagagggcactgctgggtcctggagaaactgccgacagagccaagggaaaaagggtcaggtggaggaataggagcagggggcggggagggaaccggagctgccccctgaaattggcacccctcagtccccacctggtcctgtctaaatatgtctccatggttggcaggagagacggataaccttctgaggccaggacagctccatgcgggccggaatcctcccacctcctacacttctaccccaggctcccaggggctccttccctccccctcctccagtgtccagggcacctcagccccggtccccacactggcctaagagctcatcgccatattaagaaaggaaaaggagagatgccggagctaaaaataagaccagatgagtcggaggtaaatgaagctggggctgggggaggggaggtataagggtaattagggagggccgagggtggggcaagggtaattagaagttaaatgcagtggagaggaggagctaactgggtcagaggctaaattgataatataggacaaaagggggacaaatgtggtattggctctatgtcctaaagcctgggaatcttctgtaggtgaagtctgattctgattctttgatactatgtaggagagtggggcgataaaagtgcaagccaggctgcaggaaagagaccccctccactttcttttaaagaaccaggaccaaggatgaggtcattctctgaataaaagatggagccgcgtccaagactggcaacctggctcagctccagccagtttcctttgcttcactcagcactcctaacttgggaatgcagggaaggacagggctggcccagatcctgtcctgtagagatgtgggtttggggtttctctgcctataaagcccacaatgagaaggggtctgtcctttggttgccacctgtgtgtgcactccctaccctgatcctatgggactcggttttctggggcacagtgggaagggaggttttcccaggctgcatgcttccaaggagagtgaatagctactatttattcccatgtctttgacaagacaaagaggatcaggtattgacaccagggcaaaaaaaaattaacattaggcaagcatgaagaggtgaaccctgtgccctgaaccaagactgatgattaattctgtgcacccgagatccaaagcagagatgggcgggtaggggcttaaacttctggatccagcttgggggtgaggacagagtagtgagtttaactctggatacgtaggaaggaaggatcctcttcatggccctccagggttcttactatgcacaggtaaactgaggcatgagggagaccatagagggtcagatcaaagtcacatgctgccactgcaccctgaggtatctctgattctagagggacagtggtgttttttttgttttgttttgcatccagggagggtcatgtaattatgttagcagaataacttttccacatgtctgtgtggtggaccttacacagctgaacacggaaggccacagaaaatctcaaaagcatggcaggagtgaggccaagagggacagctgtcactgtagcaggagaggttggagctagcctaagcacagcacgttggagctgaagagacctcagaagcccatatcctggtctccctgaagagtggctaacgtgggaaagccccaaggccagagcaaaggcagccaggtgagatggggaggcctgcccagaagcagatgatctaggtgatgtccagccctgatttctcacttctgcattccaggggaggcgggagacactgggacagagacgctggagcataaaacttgttccatcttgaatctgaccttttgtacccccaagagtatgagatgggactctggtggcgagtctgttccatctcctggtcctttcctacagctaccggacattgccatccatcccgttccctctcgttgccctctctggctccagtcccacccttcccctttccagcgcccgcccccactgctctctcttgatgcttcactctgtctactttctactcagtctccttcccttcaggcccttggacttgagaagcctcagccactggtatcaaatgaccgtgagttggggcctctgtatttttaacccaccagacacctgaagctcctgctactgaaacctgaggagctggcccctctgtgctcctgcttcccacctcactcacatataccctggcccactgatcttccagggtctggttcagcgatgtcagcaattggggaaggaccccaggctgatatagcactgttcctaggagaccttgtgatggaagagggaggagaagagggagagagacctctgaggaggggcctgatgtagggaaaatggcgggcgatactcacgatggccttctctttgctagctcatggcctctcatcctccagacccaccccgggtccttccccatcactagcctattttttttgtttgctttgttttgtttttgtgtatttttggcccagccctcactgaaagactagtctgaaagtgattaagggcccacgttctgaaaatggacagaccttggtttcttcttgggtaacatggagtgggtggtagggaaacatttatgtgactttcttgatggtgtgtatataaaaccctcgtcccagtgttaggtgtagtgtgcagacacctagtacatatgtgttttgttgtggaaatagctgatggtgttcccctagctttcgttagcatttctcttccaccctgtacacatttgggaacagccaatgctctactctgaaagaggcctgagaatgaactgacccacatggcacagtggaggggctcacagagcaaaagtgaatgagcgggtgaaggggaaggaagaaatgctgagacgaaggtgggcaggagagaaaggccctccacgagttttcactcatctgagaatgcacctgggcccaggcacagaggccaggctcttgggaaagtccatcaccccgtgcagagcaggggcggctgcttcacagtaaaggccacagggattcagaaagtcttgttacagcctctatctcaaggctacaccagagaaaacaggccgagggccagaatggggttgaggagccctgatgaccgagggtagagggcagggaccaccagtatgcctggagactgtccttcctacctgtccctttctcagatgagggacaacactcagcacatggccattcccaagtcatttaacctctctggacttcaggcttttcactgatgcaatctgatctcttctagcaccacagcgctgtggtctgcaagctggtctcaggaactgcaaggtggggtcagatgactccaccccacctaccccctgtgcggatgctgtggaccctcttcccacgtgtgacttagctgctcctctctcccccaccttccatttctctgatctcagctggaattttgaggcagtcatttgccctgtccttgctgtccagtggctcggagagtgactttaaagggcaaggatgcttgatactgatcctatcccagccttgactctggtccttaaaacacttccccagcctggtcatcatgaagacctgtggagggagcttcacagtaatccccactcccccaagatcagatttgacacatccagctggtgagggcttttccagacatttactgtctagactggctacgggattcagcaggaccatgcccctccctgcggggctccagctagatgcaggctgggcttcccttcagcccacctcatcctctgcccatgattccctcaagccagcccaggattgcccatctttctcatccaagataattcatcctagtgtctcagatgttgtgtcaaacttataatctctggccccatcccagctctcacaacacccctgtgtcacatgaagctcttcatctgctgagtttagtagtacgtctccctttccacccagcctgtggaagagaagaggccagcgtgaactgggagaaggaattagaggcatccaggggagacaggcagaagggaaagcagggacaaggttggaggtgggaggtctggaacacagggcactgagggtcagatggagcagaggggtgcagccaaggggtagagaggtctcggctccaggcgcagtcaaggctggcagcgaggaggggagaaagtcagtggtgggtctggagggactaggtgggatgggagagctagtgagggggctggtgaccactcagtcagagcggggcccaggggagcctcaccatccgggtgctgacggatgaggagttttctgatttcatcatagacgaagatgagaatactgtagggaatggcacagagccaccaggttatcctgtagagagcaagagccagtcagcatggcaggagagagagatgccagaggacaggtgcagagggcaatgcacaggaattgcacgtttcattgcttgtgtctactgtgtgcgtgggactgtgctgggtgctggagacagtgcagttgaataagatctggttgatcccttttttttttttttttttttttgcgacagagtcttgttctgttgcccaggctggagtgcaatctcggctcactgcaacctctgcctcccggatttaagcgattctcatgccttagcctcctgagtagctgagattacaggtgtgcaccaccacgcccagctaattttttgcaatttttttttttttttttgagacggagtctcactctgtcacccaggctggagtgcagtggcttgatctcggctcactgcaaactctgcctcccaggttcaagtgattctcctgcctcagcctcctgagtagctgggactacaggcgccttccaccatgcccggctaatttttgtatttttagtagaggcggggtttcactgtgttggtcaggatggtctcgaactccagaccttgtgatccgcctgcctccacctcccagagtgctgggattataagtgtgagccaccatgcctggccaaattttgtatttttaggagagatggggtttcgccatgttgcccagaccggtcttgaactcttgagctcaggcagtccacccgcctcagcctcccaaagtgctaggattataggcatgagccatcgtgcccggcctgagccctacctttgaggaggtcaaatcctgtgggattagtgatcgggagtggagaggagaggcacgagacagaaacataaagagccagtgatagccaggcatgatggctcacacttgtaatcccagcactttgggaggccgaggcagatggatcacgaggtcaggagtttgagaccagcctgaccaacatggtgaaacgccgtctctactaaaaatacaaaaattagcggggcatggtggcatgcgcctgtaatcccagctactcaggaggctgaggcaggagaattacttgaacccgggaggcggaggttgcagtgagctgagatcgcaccactgcactccagcctgggcgacagagcgagaccaagacttcgtcgggaaaaaaaaaaaaaaagccaatgatgatataatatgataaatgtcatattagaagtatatgcaatgttcacaagattctctaccaacttttgtggagccgctgagggagacccctgtgctctctgcatactctagggcttgtgcccacaaaggggaggggttgtctgagcaggaggggtctatctgagacatttagtgtggggatactttgtcggcgaatatattgatgcttctgtattacaaagatggggatattgttttgtttctcaacctctttttataattagaccaggaagatggattctggggaggggttgaatcaggacagcagttgttcccttggatgacagaagaaatggcctagaccagcactgtccaatagaaatataatgtgagccacatgtaaaatttaatactttctagtagccacattaacataagtaaaatgaaacagatgaaattaattttaataatatttttatttaacccaatatatcaaaaactgatatcaatatatcagttaaatatgtaatcaatataaacattatttattttaattacatttaatgttttttttagagacagggacttgctctgtcgtccaggctggagtgcagtggtacaatcataactcactgcagtcttgaactcctgggctcaagcaatcctactgcctcagcctcctgagtagctgggaccgtcagtgtgcaccgctacacctggctaagttttaaatttttttattgagacgatgtctcactttgttgtacaggctggtcttgaactcctggccttaagcgatccccccaccttggcctcccaaagtgctgtgattg

SEQ ID NO: 98125 - DNA, 41638 bp, Homo sapiens
tgctgttttaatatttagatgagattgtgctttaatatacttaggccagtgcctggaacatagcgggtgctcaacaaatatctcatttatttcctttcctcttttcaaagccaattgcagagtaagcaataggaatgtattactaggcatttctgaataaatcaattgtgggaaatgtaaatttcaaaatctcagtacattaaaaatttaggaaatttggccaggctcggtggctcatgcctgtaatcccagcactttgggaggctgaggcaggaggatcacttgagcccaggagtttgaggccagcctgggtaacatagtgagaccccatctctaatatacatatatatatattagctgggtgtggtatcacacgcctgtagtcccaaatactctggaggctgaggtgggagatcgcttgagcctgggaggtcaaggctgcagtgagctgtgattgcaccactgcactccagtctgggtgacaaagcaagatcttgtctcaaaagcaaaacaaaaaacaaacttaggaaatgtaatgtgtggtgatttttatttgtacagttggccctccatattcacagattccatgtccatagattcaaccaacctcagatcgaaaatatttggagctaaataaaaataacaatacaacaataaaaataatacaaatttaaaaacaaaacagtataaaaattacattgcactcggtattataagtaatctagagttgattcaaagtatatgggaggatgtgcgcagattatatgcaaatattatgcgatttcatatcagggcctttgaggatccttagattttggtaacgaagggggtcctggaaccaatccctcatggattccaagcagtggaattccaacttgtcgaagaagggaaaaaaaccacagagaaacataatacactgaggagaaatgagtaatggacaggggaagtgtggattgggatatgaggcctcctttgccctattttcagaggccactggtctagtgaggcctctttctgtctcttccctcctactccttctctgatgcagccctgactctgctcactggctttaccacagagggcacaggtttcagttgtgcttggacccctgccattaagtaatggcagctctgggagttcttattgacctttgtttatctctagaacccagaacagggatggggcaaactgggtagtctgtgcatggtgaaacatgtcttttgatgtaacaaaggttagaagcagcctgaagtaggccccaagtgttcacctggccagaatgccttcttggccctcccagaccctggggccctggccaaagcaaaggttatcgaagggggcagcgaggcccagaaccacaaggaatagaagcatcaatcaaatccaaagactcctaagaatccaggttggttctgagcgtatgtgcatctgtgtgtgcgcatgcgtaaggggttcttaacccaatacctgaaagctttgaaatccactcaagtcttggggtggacagaacagagatctccctggggaagggagatacatttcccatggagtcaggctgccctcagtcaataccctgctctgtggagggtgtttccataatattcagggccccctgacccctcaattgccccaccaatggcagagcttttgccaggtaagtactaccagagcccttcatcctgactatggattcaggattcagactctttcctacagggggcagcctggcttctcaccttcaacacagttggtggagaagaaacagatattgcgggtctccagggggttctcatgggtgaactcgggggagcgggtctggggctccgactctcctgttaaggatgagttatccacctgaggaggaaggagtgcatagtcatcagactggcagagccacttgtatgcacacagctgtctcctgaaccacctccaaccacactcaatcttcatgacacgaggaacaaagtcacacttgccctcatcacatatttatggcattactcatctattgcccctgccctggtttggaattctgactcctcctgacttcttatgtgacctcgggttacttgcttaaccaagagagcctccatgtactcaactgtaaaatggtgaatgtaaacagaatctctgccttgcacaaccacagggggagacactaacactgtagttatgaaaatgcacctcctggggtcattcaggatgcaacgtgtgtggccacatgcagcagccctgcatgattacaccactctttcagaattacatcagatagcacatcgaacatatataaagcagctgacacataattggtattcaatacacgattgctaaaaagtggacaacaaagaaatacctggggcatagagcattcataacacacagatgcaaggaggcactgcacaagcaccccacactgagagaaggtttagcaggggcgtaggcatggtgttgacatttggacctgggtctctccacctttaaacctcactgggcccctctcagctctgcacacagccttctccttagactcaactgcttgctctggtatgacctcctcaccttacagccatgagaagagatgatccggaggtcagcagggacgcggtctccacccttcacctccaccaggtctcccaccaccacttcctctgcgttgatctgcatcttctctccctcccggatcacaagggcttgctgtggggagccacaggcagctcatgaaatgcttgtctctgcccctgccttcttctcctgctggtctcccacaccgtcaagcagaaggagaagccccataaacaattaggtgctggcatggaaagctggaggatcttttctgtccatctctatcttagtgcctgggagctgacagaagatgagctggactcttgccaaaaccttacagcctagcccagagcccagccctgccatcttacctgaggtaccatgttcttgaaggaatccatgatcttggagctcttggcctcctggtagtaggagaagcagccagtgacaatgaccacagctgccagcaccacacccagatatagctggtaaggagaaagagtttcagggacctgaccttccccccaaccctaaaggggcagctgccacttgggatgagcaggcagtgccatccaagatgacagcccagacctttgtctgtgactgagagtgatgatggtaggggaaagcccttctcactaacctcccccttgatctgccaacctcaagcctgttaagactagaaatgggagggaaagtcttaggaagttcccagggttaggactttgctaggggatgaagacccaggcacacagacaggctcacttaagcggggaggaacagggagagattgtttcattaattaatgagtatgtgaatgtgtatgcactgttggcggaggagtactttacagatatatatagaagcctctcccctttccagcctaagatgcaggggcatctgtaggactgttatgtgagggccttgttccctgcccaccccccactgtgttgggggttcagggttggaggacagtcacgggctgttcccgggtcaggcgtgtgggctcacattgtcgttggatggttcatcctccatggcagcctggatgccgtaggccaggaagcagaggatagccccaatccacagcaggatggagaaccccccgaaaagctgacggcagaacttgacccactcaggggttgtgggaggtggtgtgagggcgttgggcccatctcgagccagaacgtcctgagcccgctggttggtgaggccctgagggagcaaggagaggcgtaggggcacgcatccggagccaacccagccagtcaccatgcccatcccttcagctcccgggcatgggaagaatgcccagaaggaaagtcccacctggttggaaggggtgggggaccatcaggagagaccacatggaggaggtggcatttgtgatgcaacttggagggcttgagggctgagaagggtttgactgggcttgacccctaattatattggattgagacaacacctatggttagggccataacatctcccctggaggcagtctggataagctccctggaaagacacctcaactgttttttccccatctctcttccttcagattattttatcaaggattctaggagagtcctagatttttttttaagagatggattcttgctatgttgcccaggctggagcgcagtggtgcaattatagctcactgcatccttgaaccctgggctaaagcaatccttccacctcagcctcccaagtagctgagactacaggtgggcacctccacaccctgctcaagtcctacattattgaccatcagtgtcacacaactttggcaatcacctgtcactttccacagaaagccttgcctggccctattccctcagccccaggctggttcagatgcttctttctggttccccatggtgttctatacttgattctagagctgcactcaccatattgcattggaatcctaggattgcattttttctgctactagactttgagctcctttaaagcagggaccgtttctttttttttttttttcattcattcattcatttaataaatgtatatccagtgccaggcacaattgtcactctgcggatgcagagatggacaagaccaacaaagtctctgcccttgaggagcttatgatctggagaggtgacacacaataaacaaatacatattagtgccagatagaaaagtgttactaaggaaaataaagtaaggtaaaggaataggggcatagaattttagaaagagcagtcagggaaggcccataaaggagatatacacccactaaatatttgtctgtttgtttgcttgtttcaagatggagtctcactctatcgcccagtctggagtacagtggtatgatctcggctcactgaaacctccgcctcctgggttcaagccattctcctgcttcagcctctcgagtaggtgggattacaggtgcccatcactgtgccaagctaatttttgtatttttagtggagatggggttttgccatgttgcccaggctgctctcaaaccgctgaccttaagtgatctgcctgccttggcctcccaaagtggtaaaattataggcatgagccaccacacccagcattttttgattaatgatttttaaacaaatttttaattgaagggcttagcaattgactgtaccagttactgttcatgtgaccttgggaagttactctccctctctgagtctcctttgtttaataaacaggtctgcaatacctatctcaaagggttgttgtaaagattagagaaatgtatgtaacgcatctatcacaatgtcacatatgtagcaggggcccagcaaatcactgtaaccacaggaatgggctgtcagcccatgtgcatcagctgtcagctctgtggaaggctgtgtgcaactgaagttgcttggggtatagggaagggccctgcctggaggccctctggggcctgggtcatagggagtcctggcttctagggtatacagggagagagctttgggctaggatgcaggggatccaaattctagttctggctgtgccaccaactagctgcatgtccttgggccagtccttgtttctgggcctcagtttcctcatctgtaaagaaggctggattacagttttaaggctcctgccaccttgatgctgcatggttttcttgcctcttttgttccttccctagaagcccctccactcaccttggacaggtccacttggtatttgcggcccagctcatccaaggacagcttgtggtcatcctggggaagggagggtgagttactttggggaggaggtatctaagatgcatatgagggtactgcagggcacaggggtgagttgagcagcatgggggacacggagtttctctgagtgcaatgggctgcagggacagctctcccagcatggggcccctcctccatggcccagcagttccctcaccattgccacctccttcttcagctcatccagttccttctccttctgtttcttcttgccgcccccattctctgccgtggtggcggcaggtgagtwctcacggccagcctgagggaggragagccrgagagtcagggaagagaggggctggggcctccattcccaccactcagccagggagcccaggcagtgggggtgtgtgttcaaaagcagcggctgccttgggggagataggggggatggagggtgagggaccctaggccctcagtttgtagactattggcagaaccaggggctcccatgtgagtttcagagaagggtgaggggctcaggactgaaaagcaccacttgagtggtttaatgcttgggcttctgctaagattttgtttgttgaaaggaccctgctgctaaatacaaaacaaaacaaaaattttgaaaacctgtatcctacactatttgggaaaattctggaagggagtggacagggttttgtggggggttgttgagggagtagaatcactctgtaggaatgtcttagcccaacaccatggcaattttacttagagaggggtagaaatactcaggaacttgggggagyaagagtctttggggagccaggggattaggcaggaacgtgtccagaggagagccaggtctggtggtggaatggtagggatggaaagagcaggcctgatggactgagaggaggcagtagctggagagtcagggcatgtccaggaagtggagacatggggtgtgctgggagccctctccatcctgctgggcaggcctgcccgttactagacgggaggcaactcacaggactggacccccaaagcacaattgggtaacatgggaactgagccccatttgtcccaaaacataagaaattgtatctgagagtaaatctaaaactacattttatatagtttttaagtctagacattcctgggtcatctggtgaatcagatggcctttttttttttcttgagacagggtctcactctgtcacccaggatggaatgcagtgtgcaatttcagctcactgcaccctccgcttytagggctcaagcaatactcccacctcagcctctcaagtagctggggccacaagcatgcaccaccacgctcagctaatttaaaacaattttctttctttctttctttytttttttttttttagatataaggtctcactatattgcctgggctcaagtgatcctcccaccttggcctcccagaatgctgggattataggtgtgagccactgcgcctgagcagatggacattttaattgtagtcttatgaggctcctgatttcccttccactccagggcctgtgggctcaccactaccagccttccagggtctcacagggaacttcttggggacagggtgggaaatctttccttctaagaggaggccctcttggggtgatagaataggatagaggctgaggaaggcctgggtagccatgaaaagttcccaaaaaggtaccttyttacttcctcttctgccccagtcttctctcctcccacttccctcaggaaatagagtccttgtcatagaggggctgctcagtttccacctggtgcctatttctccactggattctgcaaagtctgcactaggctttcaggaattagttttcccacactatgatgttaacttttgtttcccataaagagtggatacctgggtagggtccacagccaaggtgtttgcttttttttttttttttttttgcaggataatgcagttttgggggttttgtttgcattttaaaaaatatactttttttggagcaattttctggttcacagcaaaattgagtgggaagtagagaaagttctcatatatctcctgcccccacacatgcacagcctcacccactatcaacaccctgcatcagagtgttacatttgctgcaatcatgaacctgcattgatacatctttatcgtccaaagcccatagtttaagtttgagttcactcttggtgtacattctatgggtttgggcaaatgtatactgacgtgtatccgccattgtggtatcatatggaatagcttcactgccctaagacttttgtgctccagggtaatgccttttttacttatcagagtcaggagcaatcccagaagtatggcagctgccttgttcataagaggtcgccaattcagcatcttgagaggtagaagtctgaccagtacaatcagaagcaagggtaggggtgggggatgcaaggagaagtcaacactgttgttcccaagataccaatgatttaaaaagatatgagcttttggaggctgtgttgctcagaagtgctcttctcagaaaaggtgaccagtaaaatcgtgggtttgtctccacctgaagcatctatgaatctggtataattttggcctcctaaaggcagatcttcttggggagaccgagcagcccaatggaaggggtggggaaaggcttgtgagtggttctgcctctgcctttctcaggtgacctaagaggattcatttaattgagtggattgaaatgctttacattcactaactgtctgtggtgggacagagctgasaaaaggaagaaatgcaatcaagggaacagaggcaagagatcaggctggctgagcttcagtgtgaccctcaggaacttcagggacagaagggggcccaggcatacacagaggagcagggctgggtctgtgggcagaagagcagggtgcagaggaatttctgtatattcagatgtgaaataaatttcataaaaattggaataaaatgcatgctttttaaaaacttgctggtccatgcactttggcatgctggattgtggctgagctaagcagctccacgcagtgcctccttttcccaagctcccgccctgctctccagcaggcttagagcttgagacacactgccccttccccctcctcctgtcctggcaaagatctcaggctctgcagccaggagcctgcagagatttggggccagcggctgcccaggcaagaaagaaagagaggaagcaaggacccccccaacctccctccactcctccctcccccaaccacaagtccccctctctgggtcttgaatgctgaaggagaacagagagtcctttttgagaaagccagaggctgggacagagtgggggcagctgggaatccgccaacgctccccccatctcagcctctccgtggtagctggagcaggctgggctccctcccaccagtgtcgtcccttcccccaactcccacgctgcccttcacagccactgggtaatggggggacagtgaagcctgcctctgcagtggagatgcaggggagaagggattggaggaaaaatcatccctagaacaggttgtgggtgtcagatgccttccctcttcaggggtcgttggtaggttgaactctaagctccaggccctaaatacccccacctcacccagcctcttagtttaaacagcccagatctgctcctcatcttgctattgcatcacccacagcaacttaggatggtgattaaggggagtttgggggtgctaggggaaaaagacagactggaaaagtcaaggtctcatcacttcccaagcaagacctcctgagctgggtctaccttgctctaagatggagcagggtagggggctacctcccctccttctctcttcacttggatgggggaaatggagggcttatctgatcctttaacccctgcctcttctcagaggtcctgcatctcagctagggatgccctttccatggggagccagagatgtcaagatgcagctgaaggtcccaagacagtatatcttcctgcagctatgacytcttcctccgtgaagcccatacctcacagctcctaagggcaggctcacagactctcaagcacccccacacagtgacatttatgcttgtgcaggcttgaaggcttgtacatttacaaatttgcctgctgagacacaaacacaggtactcatccatgagtaactgcaggactccccgcctatggagaacacgtggtcaaggacacacactcacacacacacagacacagacacacagatacatgcatgcactccaattctatttatggctccaaccctagctcaggaaccctggtgtccaggctcaggatttcccagctgctcaactaggtgcaataacatgtccttgcctgactcctcctgggcccagaaacacccacggctccccctaggcacagtcttcctcatacyctcctgttccgcagcatgccctttccctctgtgtcctcttttgccagtattccacaaaaggaaagcagccaggcacagcatgtaaaaggattgggccactcttctccatatgggaatttcatttccaagaattcaaagccctctccctgcccgccccattgttgttaatcttcctcttggtgtagccattgctgcagaatgccatggacgggtggactgggggggggtcactgtcaccagcctctgggaaagtcctcaaagcccatggcttggaacccacggacaatgctgctcgggacatccggaggggtgctggggtgggggctgggkcatcattcttcctccccacaccccgcccagctgtccttggcactcagggcccctggagctggtgtccggaactacttggtgactctgggagccggatgctctactgcccctctctaacctcaaaatggacccccagcctctcaggctaggactcccagaggaatggatattttcaggaggtggcaaagacaggaggactcacagtgccaaacatcctttcagctgggaggccgggagatgcagtgagaggagggactgctgcagggaaggackagagatgtgggagtggggtggagggagagatggagggggcatgtgtggtgggctgtgggtctaactgtgggcagggggctggggcgkgcagaggagaggagagcactagggtatgtgaccgccgtgggatctgtacacacattggtagtttggagactgttastttcaagttccaagtatcccactcagctcctctctcccgctccttccamatcccattcccacttcatccttcctcagcagcctccctcaccctctagactgcgacccctgctctttagggatactcaccccacggcccatcttggggcagagtggctgagggaccttagcgggagaggtcaccaggaggatcccaagcccacaccagcccgtctgggacagtcggagaccctggcagacagagaaagccaaagcaacagggtagctttaaataggtccttctccccctctcccccgccttcccctcctcsgaaagaaacgtttgttgaaacaggatccctgaggactcctcccctcccgcccctttagccactggccctagacagcccgtttgtcccacggcatgcccccccttggctcctctcaaccccctctggcctgtggcactcacaactgagagaggctgcaagggaagggggcctgggtcccaggttggggggatatgccccctwggatctggctgaaggggagcagttgactcagaatcccaggatgacagagaccatgtggcctaactcttcttttccaagtgggtaaactgaggctcagagagattaaacaatttgaattgataagacagagccagaactcaggtctcccgagtctacatccaatctcccagagaaagaaagaaacatagaccactctgttccttctattatagaggttgcagggacactgaagcccagaaatagaatttgaaccgaaggctgacctctgcacttgaggcacctggaaggggggcccaggaggagtcaaaggtggctcgggaggcagcgggaagtttggagatggaggcaagagggtgtccccaaaccctgccagatgtaacctctccaaagttttgaaggagaatcaagactctggtagggaggggcaggccagggctagaggggaacgggtgggactcctagcaggcacctgatgacatctctgggttttgtttacccctcgtttaccgtttcattgctgttgaagagctctagactgaatctatgcctgagtagagtagtgatagggagaagtcaaaagagaggaaaatacagaacctctaagatgtgtgtgaaggtcaatatcatagcaaatatcrgacatgtgaacgggaaaggagagcgactgtttccttcttccagtggggaaggggaagcaaagctgcagcatgcaggactgaggctggagaacaggcctctctgcagtgaagtgggggagattggaaatgtctgaggagtgaggatgcccatcagagtcaggagcmatcccagaaatgcctaaggctttgcctggggctggaaagggtatctttaaccttataccagctagaaactggggacaacgagatgacccaggacaggaccagctggtctaggggtgttgttgctgctcatttgatgagtaatccaaaggatgaggggcacagagaggaaggggaacccagaaggggcagagagaaaagaaaaaattctgctcccgccttctactgggaacagtcagaggacaggattcccctggagtacccctgtttctctgggcacagagatggagtgaggggaagccagcggagtggggcagrtctaagtgtcctgagtgcaaagaaagcagagaggaagggagggagggaaggggggctttggccagaggcctaaggtgcctgctggctgggctgggtccatctctggccccagagggaactccctgcagagggattatcagcctctcctctagcaaatccactctcagggcacaaggctaacatctgaattccctaaataactggccccctccgggcctgcagttgagattttccattacagggacctggtaggtcacatctcacttccacgctccttccctctctgggttacagtcagaaagggtgggtaggatggggccaacagggccttctcatggcccccctctccgagctcagatttggtcttgggagagaatgggcagagggaggaaacaatgaagggaacagataccagttcagcccctgtgtgttaaggagagagtgagaggggagtagcgggaaagcctgtggttagacaccaggagagactgtctaaagcaaagtcactccagagtggccccgaggcagctagggagatcaacattggggcaggcttgcctgggggctgtgggaacaacatgataaattggggtttaggaagcgcctgttccgtaggttcctgggttggaattcctgggtaatcttctgcccagccctctccagaacacaacctgagataggagagaaaacgtcagtccccgaatctgaaggtgtgcaaacctcaagcactctaacagttttcatcccacccctcacccctgctggcacctcccagtactgcccagtccttccaaaggccctggctctggtccctgtggccaaactcaataccggaaaggatgtgcccttcctctgcccctacagcctgctggggctccctgccatgccctgcatttgggcgagagcacagcccgaggggcgctgctgctcacatatttagggctcagagaaatcaaagagtgggcaggacacccagggcctatacttccaccgtgcatcactgaccaccctccttgcccagtgagagctgaggctctggagtggtctacctccttcttgtccaccatgaacctcagcctccaggatattaacaggtgtagacacctgatcgtttgatctggagtgcctgggttgggctactgtttcttcaracacagtcagcagtaccagtttggatcaaggcccttggagtaagaggagcaaaggagagagaaagaaagacttgaaagcaggaggatggaaggccaagatgcctgggctggggagtgggctgagaaagtcacagatcaggagggggatccaccaagggcaaagtggggatggagtggtcctgaatcaaatatttggttggtaagaagtgtgtgtgtgtgtgtgtgtgtgtgtgtgtgtgtgtgtgtgtgtgtgacagagagagagagagagagagaccaagacagttggagagagacaggagtgtgcatgtgcctgtgtacagatgtgtgctagttaatgactgggaggacctgagcgttgggtcctgtgtgaggtatgagacggagtggtggtaccaaaccacattccaaaggaggagctcctcaggggagaggacaacactcattcggatgtgtggccaatctgctatgaatcggttgtctgtatgcaagcatgagtacagaggtgcgtgtgagtccgtgagtgcgcatcgcttctcggccttttggctaagatcaagtgtggagtccgtgtgtgcgtgcatgtgggccattggggagctcatgtgaagccgggtgtgggtgtacgtgagagtccatgggagaatgtgtgtgtgcacagggagggggtggggacgctgctcagctgcagatgggctttcaaggtctccaagaaacagttttgtttcctaagtgactggcctcctggggcctccagcccagacttgaaggttgtttcaagatcatgaaagagagagaggaggagggagagtgggagggaaggaagagctgggaggctctatcacccccatcgtccctcctcccgccccggcaccccacttctctcccccagtcctgatttgggcccagctctccagccctgctcctctggtcctcctctcggctgccaacccccctctgggcatctctccttcttctccttcttccattccctctaactctcctttctttttttctttagggcctgtggtcttgtcactgctatcaggcttctgaggtcttctgggagtgtgggtggagtttttctgcttccaaagggagcccaccttgggggatgagatgaggggagccgggaaggcctggactggccatgacaagtgtccaagaaagatgacttctcactctccctgcctctccagccctctgtcctcccactccctcaggttatagtgacctgttaaaaggttgggatcagccaggtggggtggcttatgcctgtaatcccagcactttaggaggccgaggtgggcggatcatgaagtcaggagtttgagaccatcctggccaacatggtgaaaccccgtctctactaaaaatataaaaattagctgggagtggtggcacatgcctgtaatcccagctactcggggggctgaggcagaagaatcgcttgaaccagggagtcggaggttgtagtgagccgagatcgtgccagtgcactccagcctggcgacagagcgagactccgtctcaaaaataaataaataaataaataaataaataaataaataaataaatawaaaaaggttgggctcagagccccagagtggctgtccaagtcctgctgctgtgtcagtttcctyactggactacaaggatggtgttgaattttctccccatctctcctttaacatctgctcctccgttttctttttggtctttcttttatttttatcttattttttttctttatctgttaaaccattccttcaacatggtctttcttttcagtctactcaaagtagattctaaaaatctctgctggctgggcgcggtggctcatgcctgttttcccagcactttgggaggctgaggtgggtagatcacctgagtccatgagttcaagaccagcctgggcaacatggtgaaacctgtctctaataaaaatacgaaaaaattagctgagcgtggtggcatgcacctgtagtcttagctactcataaggctgaagtgggagaatcacctgagcccagggaggttgagaggctgcagtgagccaagattgcaccactgtactccagcctgggcaatcgaagtgagaccctgtctcaaaaacaacaacaacaacaacagcaacagcaacaaaaaacaataaacagacaaaaaaaaacaattcttcttctctctcccttaaaaaaaaaggacagattctcactctgtcacccaggctggagtacagcggcatgatcaactgcagcctcgacctcctgggctcaagccgtcatcctgcctcagcctccagagttgtgcatctattggcatgcgccaccacacccagctggttctgtcattttaatctctccccagagtatttttattatcctctttattgttaaaaccacactgtatagaatttagaaaataggatgtaaaagcacccagaagcattttccccagcctctgcctgtgctgcattcccacctcctttcgttcttacttctctctggattcagatagctccatgttgtgttctgcctgtgccttcttcacgtggaagtcccaagggagaaaaaggaaaggacccatggtgtagcccagggaacccatgtcaacccttcccaggagcatgaaggcctgggctattctgtgcctctgctttccctcctgtcctctcacagtccccaccgtggtccaatgcaatggactcttgcctgaaagtcaagtcagctgaggctagtcctgctgaagccactaaccacctgtstgatgttggacaagaggcttctctactctgaccttggcatcttcatctgaatgacaaggaacgggatgagaaaatctgtgagtaattccagcactttgggaggcacgaggtcaggagattgagaccatcctggctaatgcgtgaaactccatctctactaaaaatacacatgcacacaaaattagctgggcgtggtggcagrcacctgtagtcccagctactcaggaggctgaggcaggagaatggcttgatcctgggaggtgcaggttgcagtgagctgaggttgcgccactgcactccagcctgggtgacagagcgagactctgtctcaaaaaaagaaaaaaaaaagaaaatctctgaggtccctctccagttctgatgatccccaaattccaggctatttctgcctcagcgcacagctcagctcaggtaaacagcaggagttacctgcaggttgtacctgtgtgagaaccatcagttggagacctgggttcagaaggagatccaagagggtaggttgtcctgtcttgtttgtgagcatggaggcaggtgctcctattttgtttattattatgactcatagaaatgaatcgaatccctttaactcttggcatggaaaaaaggaagggctccggtttgagcaaaggctaccctgggttcttacagagcaccgctgtgagaggtgggacagggtctgggtatctttgggggaggaaggcagggctggtggtgagactgggaaaacctgacatctcttggctggtatctgatcagcaaataccaggggagtctgtttgcaaagattctttgggctgggaaaagtgtgttgaggatatggggaggacggggttaatgggccctgctgagtgtgaggagcaagggtcacagctggaccctccagggttcctgttagcctttgattccatccgggcagggagggagaggtcccccagccccctgaggcaggtttgctttggccagagatctgaaccaaccactggcccagagcaccccgcctccccgctccccctatcaagaggcagctggcttggcccccagcctccttcttcccacctccctcttcccttaccaggccccctccacttggcccaggatacagctctgtttatctgcctgtcccctgtggcattctgtatgctcagagagttcaggatgccctgcaaacatctggcacacagggccactgcctccctcccacatagcagcctctcctcggaatttcagggagcttggcctcctctgtgcctcagtgtctctgaaagtccaagattcttttacttttgtgctcccctctggatgttctcaccactgcccccttgaggaatgtgagtgccctcwgggtgacttaataaacagaacatgtgctttttgatgttattgcatcatttagacattcaacaaacatttgttgagcacgtactttatgctatattctgtgcaaggtactagaaagacagttacaatcaaggcaaacaagatccccaccctcattgtcttttctctcagaatctcatgccatttagtcacaaaatccccccatccattcttgaccttgtcctcccaagctcatagtccttagggactccccacttccatttcctcaaactttccccacttctttacctctacttttgctgagtgaggttgagtgggcctggctctgcctcctgcctagatgattctcccaacccaatgacgcgggagcaaaggctgcgcaatggcgtattggaaatcgtattggaaatcactctggattaggctagagggagggcagaggctttcagtgtgggacttgctctacagttaaccagctgtgcgcacttgaataagtcctttacctctcgtcaataaagtagtgggtggagggttggactagctaaggattctcacccttagcttcatgttaacatcccatgcccaggcctcatcttcaggtaccatgtttttaattgatctaaggtggggcttaggcatcagtgttttgttttgtttttygagactgagtctcactctgtygcccaggctgcagtgcaatggcacaatctcggctcactgcaacttccacctcccaggttcaggygattctcctgcctcagcctcctgagtagctgggatwacaggcatgcaccaccacacctggctaatttttgtatttttagtaaagacggggtttcaccacgttggccaggctggtctcgaactcctgacctcgtgatccacgcactttggcctcccaaagtgccgggcttacaggcgtgagccactgcgcccagcckcatcrgtattttttttaactccccagatgaatcaacaggcagatttgagaaccactgaactatattgtccctaagatctgtagctcatcatagctaacrgttagtgagcacttattgtagattgcatgtttgtgtctccccagaatttacagattgaacctctgatgtgatggtattaggaggtggggcacttgggagataattaggtcatgagggtgggattagtgctcttttaagaggaggcatgagagagctttcttcttctctctgctggccatcatgtggggtacacagcaagaaggtggctatctgcaaaccaggaagggacccctcaccagatactggatctgccagcacctggatcttggacttcccagtctccagaactaatgaagacagcatgtagtacttaacttagtcctcacaactctattttacagatgggaaaactgaggcacatagatcctcagcttacccaagtaggggggctgcggttcaaacctggttagtttgtttccagagcctgcacatttaacttccatgctgtaaggacccactgaagcttctcctttgggttcttgtccccaggagtaaatgaccagaactgtctggatgcagtggtgacagtgaggagtgctccagaagataaaggggaagaaaaagtgccaactcttgtgcatctgtgttgagccaggtattgctggctgctggttgctcaccatagcatttagagggtggtgggagcccagagaagggggagatggttctcagttggaagaatcaaaaaggtcttcatggaagaggtggcattctagttgggcctggacagataggtaggatctgactcagagagataaaggagaaggaacaatgtgagcacaggcacagacagcagaagcactctgcacaaggaaggaatatgggcggtactactggaaatagatgttggagccatttcatggagggccttgaatgccagagtaattgccactctaattgctagtgtttcctaaaaaggctctgatgataagaatcacctgggtgcttgttaaaactataaaagaacaggtacatttcttcaagattctgattcatgagggtgggcgtggagagtgggaacctgtattcctaccaccaagcaagtttgagaaatatcgctataaacaatatggagccacttaaagtttttcagcaggggagtaatctcattgaaattgcgttctaggaaggctcatttgatggcagggtgtgtgcctgtacgtggacgggatgttgggctggaagggagagactgatgggggctataggtggtgaaggtctggagcaagacagagaggagacagggatggatgaaaaagatgtttgggaggtagaatttcagtatttggcagctgattggacatcagagtaaggaaggaagccgttggagatggkgggggtggtgaggacgttggtgcaaagttaactaaaataagggtaggggagaaaggagattgggaaataagccgcaagtttgcatgggggcatatgaaggttgaggtgctccaggcagggcttcagatgaaggcacgtggggggtgatagaaatggggactggagcttgggagagggcatgggccatgggaatcccctgcatggaggggaacactgagccaggagagcagaggagatggcccaggcaggggagctagaggacagaggtctgaggatcctgggtagtaacacctayggtagaggaagaggatctggaagatggcaaggtagggaagccagagagatggagaattaggccgagtagaggggccaggaagctgagaraggaacaagttttaaggggcaaaaaactaacagtttcagatttcagatgccagggggaaaggaaagctggtcacttttttttttgtcaactcagaggtcactggtgtgtcctttgggaaaaccatttccatgtcaggttgagtttggaaataaacctgtgaagsgttgaggagtgtggtgaggaagctgaggcagggcgtaggttatcctctcccaaggggattgtgggagatggaaggggaaagaagactgggtaaactgagacagcagatggaggaagcagtgaacagtagagacccatttagaagtctcctctcctttgccactggtcccactgcgcctgtgggccctagctttgatcataatggggcaccatgacacacatgttttcatttcatcttcacaacaatccttaaaaawtaatgagatcggtactctagtaattctcactttacagatgatgacactgaggctagagaaagtgagtaacgggattcaggctacacagctggcaaattcaggtctgtgctgtctgcttctgaaatcccagcccccaagctttttacttaattgaaaacacagaagctttatttcttacgcctgagctcctgattggtaacctggctcatcccctgatttccaggttcgttctggccagtcccctttccccagggctatccagttcaggagctgggatmcttcatgccagtgctcagggcctcagtaccagctggattccctgtcaccctgccctgctggctggttggacctctacatctttgttgtctcccagctccttctgaggacaataatttgtatggtatagatgcggcccgcaacatggctgaaggcttgtgctgtggagtcagaatgcccggagaagaaatcctaggtctaccactaattggacacatttttttttgagacagggtcttgctgtgttgtccaggctggagtgtagtggtgcaactgtggcttactgcagcctcaccttcctaggctcaagcaaacctcctgcctcagcctcttgagtagctgggactatagttggtgcccaccatgtctggctcgttgtttgtttttttgaaaaatttttagtagtgacagggtcttgctatgttgcccaggctggtctggaacacctaggctcaagcaatcctccggccttggcctcccaaagtgctgggattacaggtgtgagccactgtgcctggcttgggcaaattttttagcttttctgaacttcaattttttttaacagctctaacttatagagtcattttgagaattacagtgcccagtgaaggttagcaattattttatgcccttgatttccaatgtcctggccttcagactgtgatttctttttcagcttgatctgatctccagcgtccttcccgccctacaggacagaactcagcccttcctaggctgcttaggaagccagcctggttgtttcctgaggggtggaaggttcaggttctgaaataagaggaggaactttctatcagctgtagatggaagtgactagtgtatgatggactccagaggaactaacagtgtccactgtggaggtgacatgaccacaagagaggaagggcccagattccttctcttgtcactcggcrtgtcctcacttcctcagtcacacagcaaatgtctgttgagcttctactccttgccaggaaactctgtaggctttggggaaaggcaaaaaagagttaacagtggctttgagaagctcacagccaggatggagaggcagatataaacaagcactgtaattacaatgcagagtgggaaactctaccaaggagctgagaacagggtgcagtgggagcaagggggtgggtcgcgttagcatcaaaactctgggcccccgctctctcccatggccagctcggtcacccccactgttccatctgtttctttgttttttcagagtctttatttctggctttgttttcccttcactttcctaatagagagcctttggaaaaattccacccttgtttcagttggaacagggaaaaggagaattgtctactcttcagccaaaataaccaaggggtgccgggttcctggagagtccaggtggacaagcagaggaagcagggactgtcccgagggagccaggggagagcctgcagcgcggcaggcatggggcagggagaggtgaaaacacaggatgagctgtgcctggctggaaggcccaggtggctgtgtgcctygagtcctcttccagagctctctctgcatctcctgtcctctgttctgattggaagagagagttgagacttcttccacttcagagaatcctgtaaagcctggttacattgctcttttcccacccaggtagctgtgaagggctgggaccccagagttagaagtgagtctttgacattattcacagcagagggctgtgtatgtgtgtgtctgtgtgtgtgtgtgtgtgtgtgtgtgaaatccctcctttcccctccctctttccccataccaccacacacacaacgctcattgttccctgggccttcaattctgcattcatccattcaacacatatttattgaacactcactatgtgctggaagctggagctgtgtagtggaaaaagttatttcagaaggttgcataggcaccagatatgcatgtgtgtgcctgaatatatgcacatgtatgtatgaatcaatgtgggcaggctagggaaacaggaggaagaagggaagaagaatgtttgggaaactgaagtttgggcatcaggtagcttgcatttgcatctgggtgctaccatttgctagctgtgtgacctcgggtaaattatatgagctttctgtgcttctgtctcccagctgtaaaatagagatactcgtagtattcacctcatggggttgttgtgaaagctgaatgaatgaatgtgcacagagtgtgtgcaacggtgcccagcatgaagtaggtgctctgtaggtattagtaattgttcccttctcaccccactcagagctgggtggagacaaactcgtaaatgactggcagtcacctggtgctacccacctcctgccccctgaggctcatctacaacactcagcccacaaacctctgtctaaccaaaccactgccatctcctgcccttggctgacccccaccccaccctaggctgctcagggtagagaagaagtaatatcacacagtgggggttgcttcagtcccacgctaccctccagacatatatctgagctgtcagttccctcttagcagactgggaatggagaagtgggatgggtgagcatctggggcggagcccaggctcccagcacccacccgatgggactggggaacaaagaacttgtcaggaggtcagaagggagaccgaggggattccagctctgaggaatccatgtgtggcatttgagcgtgggtggcagctggcacgaatccttkgttcagaactggcagggccccctcaggagtcagggccaggtcgtgccaaagccccagtggcatcgcggctctgctattcctgaacagctgtgctgctccccttggcatagggttcaagaawgggggcaggagtgtgggcctagccagggaaagaggagggttcagagagtagacacacacacacacacacacacacacacacacacacacacacacagttcaccatgaaggtgcagatgcctggctcagggagaaaagaggggagggagagggtggaaagcgaatgtgtgtgtgtgtgtcgggggggagatggctttgtggttctgtgagtgtgtttggtgtttgggtgtgcataatgtctctgtgtttatctttgtgtgtgcacttctgtttcagtgtgtctctgaatgagtttgttatcagggcgagggtaggtttctgcactacttctgtctctgactctgcttgagcctctcagcaactcagcagagagaatcttcccttctgggagggtgggaaaatatagctcatcagggcagtatgggccaatgctttataaacacacacaaatcacaggacattcttgtgtgtgatccttagctccccacaaagctacggttgatacacatttaaaagagagagagctgagtcctatgtgtatgcttgtgccatttctatatgtctgacagtctgacgagcatgtgtgcttatgtatttgatgtatttgtcactttgtccccacggcagtatctgtgtctacagcttggtgtatactcatgtgtgctaagcccatatttaactgtgtccctagtgacgtttgtctttaagcagcaacataacaggagttagaagcacaggctccacagtgaggcgatccrtttcgaatccctgtgtggacagtaactaatgcattaaccttggacaagtttcttaacttttctatgcctcagttttctcacagggataataatagcacatgaggataaatgagatcacatttagtgcctgacacaggtcagcatatgtgaatggtcctgtctttgaacgtgctcctctctgagagctgtctgcttggttgtgactgtggtgtgtcacatctcagctggattataaactgcttttgggcagagcstgggtctcaattatctttaacaatactcatgacacctcagtgtcaccttggtgtcttgtgtatatgtcatcttgaggtgaaatgagacctgtttcatgtgaaacaggacgggtgtcggatgcaggcccatgcctggggtagtacatggagggcaggtgggaagctggtgatggcagtgacaacacagcccagccgggcatcagggtccctcatggtcactactgcatacctgccaggtctctctgcaaacccaggctccctcctccttcgtgtctcagtctggcctggaaactcactgaagggcttccttcctcctttctctgctcaccccaccctcgggcaccagcctaggtgtgtgtttttaatggatgagatgagtgccctccaatctacaccatgcatcgctgttttgcagcttgtgtgtgtttgcccatggctctgtgggggtgtgtttctgggagccgtctttctgtctgatccccgctccattacagtggggacatgtgtctgtgtgtgtgacgtgcctcgtgcctggggtttgttctcctcccccagctttcccagttacataagcagctgaggggtccgtcaggcctgggctgtgggctccctctgctggccgcctctggaacccgcagtctgggttccagaggggcctgggttccagaggggcctgctgaagacactgttctctccttgggccttatcccctctggagggagacaccaacccagttctcaacgccaacctgcccccagctycttcccagccccaggccacagggtaagagaggatacctcacctccctkaagacccctctcatcatactcatactgggggttggttatgacttgtttatgaaatgtatccctaacatatagaactatgttccctgagggcaggggagcaggcccaccttgtttaccatggcatctccagtgcccagtacaaggcctggcccaatcaatatttgttgaatgactgagtttacagggtggagaggcttgggaggagggacagtgaggtgtaggaagatttggggctttggggacagacagacaagcctgggctgaagtcacccctaagccacttaaaaactgtgtggccttgggcaaggtacttaacctgcctaacctcaagtttctcttctgttaaatgacaccaccttgcaaaatatgctataaggactaggactaatatccaaaagggccttcttgtgtaagcatttcataaatgacatctatcattattacaattggtaacatctttcatccctcaagcatcatgaaggcattaaatccactcgataattaaatccattataaagggagagacgtattcttccaaaagcttcccctatgagtttcagttttcacatagctcgatatgcctgtggatggatttagatgatgaggttctggagcaaccttctggatatttcaaagtgggaataaacaggcaccttattgccctgttcatgggccagtgctggcagtcctgggaagtgagggctggacctctgatctcccttcaaggcctcagtttctctggtttctccagggttcctcaatgtggcttctactggcaaccccgtgagcatcttctcagagtcaggcactgtgccacgcttgaggaataccatgtcaaggaagrtctggtctggcctgtgccacttaccctctctgggcctcagtttcctcttctgtaaaggggggtgagtgagtgggagggaagggggatgagaggggagagggaggatgttggagggtagagggtggtaaatgggctctggggtcacctcccactgacagccactctgacagccttggctttgcaaacctggccatctcttctccccattctggtctcatccttcctgcccctgcccacttcccatctttacagttcaggaagagacagagcacctgggaagggtgcctcctccattctcccacctccagggcaagccccactcttcctagaacagagcaatgttcatctcttcccactgtcactgaacatagagactccttcacctaaatgccaggtctaaactaagcctcttaggaagcagttcaaataataattcaaaacctaaaacaaaataatccttatctcccattttgtgttagtttcctgtgccaaacactttatgtacattacctatcatcacaataaccctttgggtgatgtgatcaacctcaattcaatttgcagaggagaaaactgaagttgaaggaggttaaacaactgggctaggatcacccaacccagaaatgacgtcacatggacggccccctctcctaatccatttttcttttggttttgccctctgagggggtgaaaaacaggtctccagtgaccttctggatcctggaagcgcccttcagctcaaacccttcgcattcaggaactcctggcttccgccaacccctacttcagcagggtttgcagcgaggactatggctcagagcaaataactgaattctaaatgcgtggtcacagtcacctcgccaatcccagggaccctgcacccaactctccaggaaaggctggcaggtgcggggtggaatgcgctctgtgcgagggtgggtgggaatttcgatgcgcagaggtgcagttagctcactcctgcgggggcctcgggcggagccagggccaggggcggggcgaggccggggtccagggcggagccaggattggaggctgacgttagccctgcggggacggggaaggggtgcggcttgggactggggcggggccggggcccggggaggagccaggattggagtccgactgtagtcctggtggggcggggcgggggaggggccggaactggggctgggccgaggcccggggcggatccagggctggagtcttggcggggcggagcggggaggggcggggccggggcggggctgggactcgatgcgactcaaaggtgagtttcgaggggcggggcggggccggggccaggtgcggagcaaaggccggagtctggcgggggtggggcaggcagggccaaggctgggtccggggcggggcgggcctagacggggcggtggaaggggcggtgccggggcgggccggggcgagaatggtttcagaactgccgagggctggagggaaagcagcgggaggggcggagggaggggattcggcagctccagttcagctcgctcggcgcacccacgcctcgctgccccgcttcctgccctcaacctgggcatgcgccccccacccttccggccccccagaacccgcgccatcccccggagcctccccagagctggccgcgcaggatgggcgccctcaggcccacgctgctgccgccttcgctgccgctgctgctgctgctaatgctaggtaagccaggcccccgttccggttcccggccctgccgggcaggtgcctgccatccagcacccccctagcatttcggggctcctcacatcctcctccgtcaggggtacctccagcctccccggggtcggcgtccagctgcgctttgtggctgtccgccgagccagtcttgggaagagtgcaggctccccagctctaagccagggactggggcgtagagaggacccactaaggtgctgccccaggcactgctcggcctcccggggcaggccacacatctcagctagcatacccacgtactggggtcgctgcaccaaatgctgcgactcctttctgccccacactcagctccaggcctggccttgggtgcccgccctacgagggcagtgcctgcccagcttcataattgccccagagttggctggaggcccagaggccagttctgcccacgatctttgaagtaagtctctcccagttgcgctccacgcacttcatcaactgggggcagttccctctctcacccccatctccaccctgggttgggtccctctttgcccttcttcctgtctcccaaatggcacttggctctgcagccacccatcagttttcacaccgcttagttccagcttccttgcctcaggagaaaccaggttccatggagactgatcctgggatctccaagcaccttgtgcctgctgtggtgggtgttcatggtggggtgttctgggccaatcttgcatggatgcatggggataatgacagtggaattgtttttggcctgaactggagggctccctgtaggaggtggtctggggaagagtatggcatggagacagtgaaactgccagtacagatgttgatgaggctgaagcccttgaaatgagagtgaagcgtgggggtggggatggtgacttcagagctgctgtcgtcaaggcagaggctgaaggtagccccagctgcctgtttctagaccagagctccacagtggcaccaagcaaagccttcccctgctgcaggtccctgggccctgcagggttaggatgagtcctctccctggtccctgggcaggtggcaggaggatgtacagagaggaaggcgctgtggggcctgggttgcctagcacttggtgtgttttccccagtgggcagcatggagcagggaggagcccagggaggtggggaagtgctggcctgtgtttgaaaaaggagcacgcagaggtctgagcacccactgcctgtgggcacttacattcatttcacaaatgaggaaaatgaagtaacttgccccagagagcacatttagtgagtgttggggctaggatttgaacacagatctgattccaaagcaggcctctttgctgtccctttccttgctgcgactgatacagaggaggggagagagagctgtgtggcaactgatttcctaaggctgtggaggtgactttcccatgggcatctccaagcatcagcagttgtggagccaggaaaatgggagggggccttctgagcagtctgccctgaggcagtcagggaaggtgtcagcttggctgtctccaccgtcactctgattatgaaacttgcctggcctggggcagggctctcctgagtcacatacgcactcacacatggtcagagctggagctcttagttctcctccagtgtggaaactgaggcctaggacagaaagagactggatcccaggccacacagctgggcatggggatggtgctggaatcccacttcctgactggcagctgtgcccttaacaacagaccatgagttctccctgtgacccagccagaggatgaaggaaggggctaggagcccagaagcaggggtggggaagttcagaggagccgttctagagaagctggagggtagagtttgaccacagactcctgggcattttcctctagctcctgcagaaagtccatggtatccccctgggaggcctaaaagtgacactctggttggtgaggtcagtcccttcaggcctggccttggagtttccccatcttcctctctggttttgcccctctggaggagtgtgtggaagccatctagggacagcatgatcttggctaacatattatacttttcctgccttacctttctcatctgtaaaattgggagaggtggggaggggtggcctagccctctttacattgaggttctgtgatcttatctagtgggagctatggaaggaaagaagggaggagctaagccctctaagtctgccaggagtatctgctggggtagggttgggcataggggtggagtagggtgaagaagagaggtttggcctttctgaagggagagagatgagaaggggcagctggggatttagtgcctccctacagaaagagagccatatatgtaaatgaatgcataccatgtgcaaatgaaggcttttgttaaggaactggggcaggcaccttctgtatctgctgggctagcccggaaggttggcaggcactggaggaggggatcttctgcccccaatggccagggcagagcctggatcttgccccagaagccccagctgcctgggcagccctgtggggtgagagaagcagtgagctcatggcgcagctggagaggggagggcattgtgtggtgagaactgactgggcctgtgccctttccagctagggtcactggctccattgtctcgcccaggtgacacagctgagccaactagcacttctgagcaagactgccagctcccctcaagcaaaggagagggacatgtagtctcagagtcccctagccagaaggctccccttgccaggtgctgaggaaggaatggcagacatggaggtgggtgagtggcagggacagatcaaggttcagttggaaccaaggcctggttaggtcaggaatcagatgtactcctttctgccttcaggtgctctgcttctagtccgccagaaatgggatgcatctggatgccaaggcaatcctgggcccatgccacctccttgagatccaggtgtcttatatcacagcatccctttcctattctcagaacagggtccaagctgtggacaagctttcccaggtctcctttccttttgtaggcagagatcaagaatggtgcttgtggcggcagagggcatggaatgaggaaccaggcatctccaactccttctgcctttccctacaggaatgggatgctgggcccgggaggtgctggtccccgaggggcccttgtaccgcgtggctggcacagctgtctccatctcctgcaatgtgaccggctatgagggccctgcccagcagaacttcgagtggttcctgtataggcccgaggccccagatactgcactgggcattgtcagtaccaaggatacccagttctcctatgctrtcttcaagtcccgagtggtggcgggtgaggtgcaggtgcagcgcctacaaggtgatgccgtggtgctcaagattgcccgcctgcaggcccaggatgccggcatttatgagtgccacaccccctccactgatacccgctacctgggcagctacagcggcaaggtggagctgagaggtactgggccctgggacggggtggagccacacaccctctcaaggcagaaagtcaaggccacaagtgrcctatctagttgccccttaggttttgtagccaaggaacttgaggcccaaagaggttaagtgatttkcacaaagtcacccaataactcagtggctgatgtgggactcaaacccagagttcctcacccaggccagtgctcatcttatcatattaagacccctcctgggagaakaartgtccttaagttgtccagtccactttccattcccaagaacgaagaagactgttgggttgaatagcctctactcctggacagtacaggacccagatctgggaaagagagtagagttagggaaggagttagaccatgtgacattctcactctcttaagtttctttgtcttctgagaagaaagagccgcttttctcagtatttcaaacagaggtcagtctcaaacataagggtgagtaggcgatgggctggttctatgaaattctacaagtatttattgagcgcctgtgctgtgcccagtactgcccttggcaccactgagttacagaagaaataatacaacatgcgatctttgccctctgggagctcacagtttatttagggagataggctatacacaggaaacagtaacaagggctgccagctcccagccctccctcactccagctgttctctccagttcttccagatgtcctccaggtgtctgctgcccccccagggccccgaggccgccaggccccaacctcacccccacgcatgayggtgcatgaggggcaggagctggcactgggctgcctrgcgaggacaagcacacagaagcacacacacctggcagtgtcctttgggcgatctgtgcccgaggcaccagttgggcggtcaactctgcaggaagtggtgggaatccggtcagacttggccgtggaggctggagctccctatgctgagcgattggctgcaggggagcttcgtctgggcaaggaagggaccgatcggtaccgcatggtagtagggggtgcccaggcaggggacgcaggcacctaccactgcactgccgctgagtggattcaggatcctgatggcagctgggcccagattgcagagaaaagggcygtcctggcccacgtggatgtgcagacgctgtgtaagtgccacttayacatcccactgtgggagctgggagggacagtatcctggtgggcactgtggccacagggggtaccagatagccatcatctgactccaaggaactcatcttccacagagtgagcagccttgctagcatttctctcccccggcccttgatgggttttctctgctcagaaattgggtatagagataggaggcccatgctgaggggtgagattcaagcccctaaatagaaagatggtcatacctagtgagggggagacaggaggttttgaagttgctgctgtcaagtaggaaacaggaagttggggaatcgggtgcctctgtgtcccctcctgcctccatgacacctcttcccctacctgtgtttcagccagccagctggcagtgacagtggggcctggtgaacgtcggatcggcccaggggagcccttggaactgctgtgcaatgtgtcaggggcacttcccccagcaggccgtcatgctgcatactctgtaggttgggagatggcacctgcgggggcacctgggcccggccgcctggtagcccagctggacacagagggtgtgggcagcctgggccctggctatgagggccgacacattgccatggagaaggtggcatccagaacataccggctacggctagaggctgccaggcctggtgatgcgggcacctaccgctgcctcgccaaagcctatgttcgagggtctgggacccggcttcgtgaagcagccagtgcccgttcccggcctctccctgtacaygtgcgggaggaaggtgagagggggctgggccctggacggggttcgaggattgtcaaccccttttccttctgtttccatgacccctccctctccgtcagctgtttgcaggccacagcctcacgctcctcttctaccaagattgtgggaataccctgagtttcctggggcrgtgcttggcggcagccctaaccccatgctccctggccctgcaccctctgaccccatgtcctttgttctgcaggtgtggtgctggargctgtggcatggctagcaggaggcacagtgtaccgcggggagactgcctccctgctgtgcaacatctctgtgcggggtggccccccaggactgcggctggccgccagctggtgggtggagcgaccagaggayggagagctcagctctgtccctgcccagctggtgggtggcgtaggccaggatggtgtggcagagctgggagtccggcctggaggaggccctgtcagcgtagagctggtggggccccgaagccatcggctgagactacacagcttggggcccgaggatgaaggcgtgtaccactgtgcccccagcgcctgggtgcagcatgccgactacagctggtaccaggcgggcagtgcccgctcagggcctgttacagtctacccctacatgcatggtgagtgacaccccctccaccctcctcactctgccttcctcctggcctctgccactggccttcccttcccatcttctgaccctcctgctactatctctctcctccacattatrtcacatgaagtctcaaaaaatccaacttccagccctgcagtgcccacctgcacggggtcctctgtggttgatgctgacttgcatgctgagggggcaggctgtgggyagggatgggggtgtctgtgaatggagaaggtgggttcagagaacttgatggggaaagcgcagaggcaagtgtatgggtggaggatgatggcatcctctctgaacagtcatcctctctcccccagccctggacaccctatttgtgcctctgctggtgggtacaggggtggccctagtcactggtgccactgtccttggtaccatcacttgctgcttcatgaagaggcttcgaaaacggtgatcccttactccccaggtgagggaaaagaaccccccaaccttgttttcattgggcttcccacccccaagtcctgaaccaagctgctccctcccaggccccacctggaggaggagtaggcagctcagatccacagggccctgttaaggggtggaggccgcgagggagccccactcagggctctctgtccttagcccacaccgggcacccttttcaggtcttgcaggtgtcractgtcttccggcccagctccaagccctcctctggttgcctggacaccctctccctctgtccactcttcctttaatttatttgacctcccactacccagaatgggagacgtgcctccccttccccactccttccctcccaagcccctccctctggccttctgttcttgatctcttagggatcctatagggaggccatttcctgtcctggaattagtttttctaaaatgtgaataaacttgttttataaaaagcaggcttggctgtgtcttccctaccatgagactgtaaaacgctcagggtgcatagtagggaggtggttggggattgacaacctattctggatgacccaggcctctcttcccaccacaaacaccatctggcctccatgggccatgccacccaccccaggaggggacacctgggttccatctgcagcctgaactgtcggggctgagacaactcctgattggactcctacttggggagggaagcatagaaaaggagggtaggttccagctgcctgtggtcacccccgcaccagcttctcccatgttaaagggcatgggcctccaggggcagtgccttttctgagcttcccagactttccccaactcttcccacgtctcattctcctggtcaggctagtcttggacctgactcctcccactaggccctggggctgaaattgttgttccttctgacccatagcagcagaatagaagcctcagaacacaactgatactcaggctgggacaacaggcagtcaggggagggcctgtgtgtccacagagccattgcacccacatgtactcgctgtacctgcatataccctctacccgcatatacccactacacctgcatatacccgcttcacctgcctgtacctaccctggggtctcctccctcccacccttcagcttcacccctcctccagtgccccaggagtttcatgaattttcttgcctaaggattctctgatcctaaaattcttacctgcacggcaccttaagaggcatctggcaggcctccttcagttgttatttaaacatttattgagcattacgagtttgctgtcatttttacagatgaggaaactgaggcccagatatgcgatttgcccagagtcatagagctaattagcaagtgtcaggagtaggacctaggtctcctgacttgttgcactgtacagtggtgccctgagtggtgacagtggcgaggagaggtgtggcagggtctcagtgacttcagcaggcaggaggggcctttccagactgagtttctctgcttgttcagctgcaatgggttggctcctgtgtgagtgcgtgtgtgtggataccaagtagcccacccgctcttgtccagacccccctgttttactgaaacccaaatgaatccccattctccatcccaacatctgttcttaggggaccagtcaatgccaggcttcaggaatctcatctttgatgacagggccccagtggccctgtgacctgaggcaaagatatccgtgttttgactgaaaggaagggactgggacttgggtcctctctgagtgaaccccagctgtctgggctgcttccatggccccctttcttgcttccagaggacccatagggccctggctatgcccataggaccctggctgtgccccataggaccctatctgcccagcctggaacagagaagactggagtgctttccccagggggcttatgaaagggcaggagtgggatgtggccagggccaagggaggaggtccttgctgggccagtgctgctgtgtgggagacaggcgctgtcccagggcaggctctcctgggcctatgcttttctccaggccagcttcaggtcccttccacccctctgcctctctcaacttgcagttgttctccctcactatccaggaagctgccgctggtgactgggatgtgatcaggaagcaggtggaggtggggtgagaatatgcgtctttgggaccccctggcccaattgggctgacagcaggctgcagacacatccagatgttctaactcctatcgcttctctccgattttctcccacattcaatcttgcctccagtcctacaaggggttctgtcctttgcccctaaaactcttcctgctccacctccccccgacctccccaggagccccctcaagtccttctgatggcttcatctctctgtcgggcctgctcagcttccagacaccccctccacttgtcactgccctgtttccattgatggttgagtttctgggcccaaagttaaactcttcagcctgggcttcgggtccctttcccacacataaaaccccacccttcacatttctctgtctgctcctgtgaggatcctcagcttcttctcagcttctcttcatcttcctctcagctactcctcagtttctatgccccatgtcctgaaacgacttccaagtattcacttagagcacaggttctcaaagtgtggtcctcagtccagcaacagcagcatgacctggggacttcttaggaatgcatggttttggtccccacctcttgggtcagaaacccttggagtggagcccaaaaatctgtgttttaccaagccctccaggtgattccaacgcacactggagatttctaactcctgacttacatattccctatgccttacactggccccagccttctgatcacccacactcccctaccctccacgggactgcacaggttgtcagtttgaattatccctcgttcagtcaccacaggtagattcctctgttttcccaggtgccccttattttgaggacaggaaccaggtttttgaatgtccactccacatggcacccaatcagtgatgtgaatgactgtgccccaaggacacactgctttcctaggggctccctgtttcccagctctagtgaacccactttctagatctctctcctggcccttcctccccagaacctctctctctctcttcctgcctgtgcctgatacctgtaagatctcactccactgtaagaaaatagctatccctggttttcctttcccaggcccctctccaggccccagctcaggcacctccccgctctgcctgcttccctgaacttgcggactaaggtcattcacaccttgctgagccccttgcacgccttcatcctggtgagggtggagctaggagggcaccctcctcatgtgcccatcttggtccggctcctttctccttcacttcagcttggcctaccgtgtcattagacagttgtgccatatgtggggaggctggcagaagaggtgactggggactgcaatccatcctatactctgctccccaagccatgcaccctggtttggggctgtatctgtctggaggaaaagggttcctttttaaaatttgcacaggggtgttctacaggttagtggcagccctgagtggaccagttgtctactggtccatctatgtatctgtcagctgtctttatctgctaccatcttcccatccaacccccaaaagtccatcattctgtccatccatccactcatgaacaaatgtgaaggtcaaacacagactggcattttcacccggccccaccctccatttccctgaaatcaggacccctcccttccatactggtttctagacttgaggttctgggggacggggactttccaactttagcacatttccaggggctttgccttcctcctcctcctcctcctccaccacctccgatatgcagttccccatgtatctgtgtctggcccccggtctgccacaggggtctggaggaagctggtcacaccttggactcactctctgggggtggcaggcagccattctgctccttgtcagccccagcttccccacccgccccctcccccgccccctcctcctccaccttctcatccagccggctggggatggaccagtagagatgggcatcaaggcgggcggcagcctctgccagctctcgagcactgcacgaaggtgtgggcacctcaaaagtctcgtgaaagctggcatagtccacttcgtagaagccgtcctccagagtcagcactgacgtgaagcggtggccccacagcacctcgtctaccaggtaggagctccgagcttggcatgtcattcctgggaggaggggcaccggtcagggggaatctcagctccaggcttccctctcctcttctcattccacaaccctactcccagcaccctcccttctattccttcctaagggctcccacctccctttggtccagtccatttccccccctccctagctcctgttcttacccagctccctcgtgtcttctccatttgccccaactcctcttaatgtccagctcttttttcccctcctgtcatttggtgatgccaaccaaaaaaagcttaaccttgaaactaaccttagggatcctctagtccaacttctcactccatacagggctccccaaaggagcatttctaacaatgggcatctagcttatacttgattacctcccaggattgatagctcaccacttcataaagggcccactcctttgtatgatagctctaatagttgggttgttctttatacagagctaaaacctgtaccctgggatttccaactcttggcttcattcccctcccacttcacagtcctctgagtatctgaaaacaggagtctcagattccctcatgttttctctcttgacttaacatccctggcttcctccacgattcctcatttgacctggttttccagaactctacttttttgattacaagccagaatggccaaggagggccctttaagcattttgagtatagtaaattttccaactgtggcctgctccgtgcataagagagcgcgcaccatctctctcttctggccatgatgctttcactaatagggcccaggataacattacataatcattttggaggctgcatcacattgctacgacatcaagactgtagccaactaaaactcccagttcttttttcaccagtgctcttccatgctgtgcttacataagtgatttttttaaagcctaaatgtagaattttatatttattcattttaaatgtcatcttgctgggttttggctcattattcttgcttttcaaaagcgttttgaatcctgactgtctcacccaaaatattaccatcctttccagctttatctctctagaaaaacagacagattcctatcctcatctcctctgtcctggtcctccctgcccggggcttgtgtcctatcttcctgttgggctggtgcacccctcagggcaggtcattctcctttctgccacagggtcttgcccccaacccatatccatctcggaacaaggggaaacagaagagtgaacattagctaaccggagagtggctgtcaactcggaaagcctggcgctgagacattggtattcctcggtgaagttggaatagaaagtatccagtgggagagaagagaaagaggcataagggacactggggagagaagggcttcgaggaggagagggcagggctgggggtacaaagagaaaagagggccgggcagcaacttccctggagggtgaggggcctgcctgagatactggcagaaaaggagtgacagctggagagagaggaaagggaacggggtgagtgggggaagaggaaagagtcggggtgaagcaggaatgggaacagtgatgcggagctggggttggggtgtgaagcggagtctcagcctaaaggggccagggaaaggatctgaaggcaccagcttgtcagcgaagccggcagggagcatcagcagctctggcgtcagaggagggactgcggcgccccctagtgggcctttggtcctccacccgcagtttcctcatcctcatctatcctctagatctcaagtcctaagtgacctcctttgcgactcctgtaacactggtcttttttcacctgctcccaaagccttcactgtgtaggtctgggttggacttattgacatcacagatgagttgccagttccttttggaaaagagctagaaaaggtaacatcatctatatcccttgtcagtggaaatggatgaattgggaaaccgaggtacaagtgagactaggtattaaactcccctcaagatccggcctagaaataactcaggcaatggaaaaccttcaccgtcaaattccaggggcctgaacctgactgcagtgagaaaacccctgaacctaacccctccttccaactcgggaccactaaacattgaagccacattgcctgtgtccaatccaggcatggccact

SEQ ID NO: 98126 - DNA, 41061 bp, Homo sapiens
  misc_feature (1)...(41061): n = A,T,C or G
cagcacttcaggaggccaaggcgggcagctcatttgaggtcaggagttcaagaccagcctggccaacatggtgaaaccctgtctctactaaaaatacaaaaattagctggacagtagtggcacacacctgtaatccctgcgaggcggaggttgcagtgagctgagatcaggccactgcactccagtttgggtgagagagtgagaccctgtctcaaaaaaaacaaaacaaaacaaaacaacaaaaacaaaaaaacaagtcaggcaactagaattattctggctgtcttccatgcctcagtttcctcttatctgtggaatggaataatagctatcttacatacacataattttctcccaaggttcaaatgaaaatatgctgaaaagcataaagtatcaggcttggcacagtggttcatgcctgtaatcccagcactttgggaggccaaggcaggcagatcacctgaggtcaggagtttgagaccagcctggccaatatggtgaaaccccatctctactaaaaatacaaaaattagctgggtgtggtggcatgcgcctgtagtcacagctacttgggaggctgaggcagaagaactgcttgaacccgggaggtggaagttgcagtgagctgagtttgcaccactgcactccagcctgggtgggagagtcagattccatctcaaaaaaaaaaaaaaaaaagtattatatgtatgcaaggcactatccatataaatattgcatggctgattcttttttaaaaaatatacatttattagtaacttaataaggacctactagcaagggtagaaatagctaactacaacttcatttgtaattatgatagacacagagggtacaaatgacaaaaatggcttgtttataatcattcacttgggaaaactgaggtactgaactgtaagctccttggaggcacagacaatgtcttgttcattcatgtatcgctagtgcccagcacagtacacacattaggtgcttaataaatatttattaaataaacaaggcactttccctctatacctctaggccttattcatccttttccttccctttactaccaaacaactcagaagactgagcgagggtaatggcaggagacccaatgtcacagtatctctcctcataactctgggcactgcctcttgccattacaatcttctgaatttcccctgctctgccaactctcctctgtccagatggttatccttaaggctcaggtgagaaggcagtctgtgctttttctaaactgtaacttgagagttcaaattccagttttgactattctacaaagattactttttatatttatttattttttgagacagtctcgctctgtcacccaggctggagtgtaatggcacaatcttagctcactgcaatctctgcatcctgggctcaaactactttcctgcctcagcctcccaggtagctgggactacatgcatacactgccatgctaggctaatttttgtattttttgtagagacaggggtctccctatgttgcccaggctggtcttgaactcctggactcaagctatctgcctgcctcagcctcccaaagtgctaggattacaggcgtgaaccaccctgcccaacaagataaaaaaaaaaaaaattgttttgaaattccaaatcttgccaacatcactcagggcttctctatttcaatccatggcacccacatgttccagatatttttggaaatcagtactcctcagttcacaaatcttaatggtttctttttgccctcaggagaaagctcaaattcctttgactggcactcaaggctaattacatcttactccaacttagctttggggcctcatcaaccactactctcctatgcaaaatttctgatccatccaaatggatctccttatcgcctcaaaaaaacacccctcacattatttcatcttaggaaaattcttcctaatttttcttcaccaatatggattattcaaggtctagctcaagtgacatcttattctcactgtcattctggatagcaacacactttgaaaaccattaggtagttcttaatattgatggctaagatattgttaattgctgttgtgaggcatgagcacaaaatgagatggaggtgacaggaaatatagtcactatccttaaaccacaaattttacattcctaactaaactccttgaaaagcaatgaccagcattactaatctctctctccatctcacccgcctcatacacccagcatttgcccagaacatatattcaatatctgtcaactgactgatacaaatagctacaatcagaatagggaaggcaaaagaaagattaaaagaaaccgctggtggacatcaaccactaactaatcaaagggatgtcaacttctccatgtttcagttttttcaattataaaatgtagacagtaatgctacctcaaagggctattctaagtattaaatactacttatattaaatactgcatgtaagtgtgttgtgaacttcaaagtactataccaatatttgttgctatttccctcaagtcatgatgtggaaataagacttgagacaatgaaaggcatctgggaggctgggcgcagtggctcacgcctgtaatcctggcactctgggaggccaaggtgggcggatcacctgaggttgggagtttgagatctgcctgaccaacagggagaaaccctgtctccactaaaaataaaaaattagctgggtgtggtggcacatgcctgtaatccgaactactcgggaggctgaggcaggagaatcgcttgaacctgggaggcggaggttgtggtgagctgagattgtgccattgcactccagcctgggcaacaagagcaaaactctgtttaaaaaaaaaaaaaaaagaggcatcttggagaccaaacatgtccaaaataactcttgatttccacctcttcaaacttgttccttcctcatcttccaagtctccgtacccatacacccaattattcaagccgaaaacttaaaaaggcatcaattcctctatttccttcacttctatatacaatatatatttttaattgagacagggtcttcctctatcatccaagctggagtgcagtggcacaatcatggctcactgcagcctcaacttcctgggctcaagtgatttctaccacctcatcttcctaggtagctgagactacaggtgcatgctgctatccctagctaatttatttttattttttgtagagatggggtctcattatgttgcccaggctggtctcaaacttttgggctcaagcaatcctcccacctcagcctcccaaagtgctgggattactggcgtgagccacagcgcctggccctgtattcaatttttcaaccctgtcagctctacctctaacatcctgtatccatttacttctctatgccctgctatgctctggttcaaaccattatctttcctggactactgagcagtaacttctgactaatttccccactttctatttgtcatgtggctgcttaaatgattataaacaagtgcatttgaccaacttcctatgttaaaatggctttccttggctgggcacagtggctcagacctataatcctagcactttgggaggccaaggcgggaggactgctgttggccaggagttcaagaccagcttgcgcaacacagtaagacccagtctctacaaaaaaattttaagttagccaactgtggtggtgcatgcctgtagtcctagctacttggaaggctgaggtgggacgacagcatgagcctaggaactggaggttacagtgagctatgattataccactgcagtccagcctgggtgacacagtgagaccttgtgtctataaaaaaattttttaaatggcttccttttgtatttacaatctaaatgcctttactgctttataaaagcctctgcctaactctcccagcttcatctctctccctaacactctttccttttgttcacttcactggagtccaactgattttctgtccctcagatattctaagctttttctcacatcagggtttctgacctcatttcttgtatctacaattgtctctccctcctgtccatacatggctggccctttgtctatgcttacattttagttcaaatgttagctatgtgaagagagcatctctggccactctagctaaagtagttctgcccctcaattttttttttttaagagacagggtctcatctgttgcccaggctggagtgcagtggcacaatcttggttcactgcagcctcgacctcctgtgttcaagcgattctcctcccttagcctcctgagtagctggggctacaggcatgcattaccacgcccggttaatcttgtatattttgtagagactgggtctcgccatgttgcccatgctggtctcaaactcctgggctcaagggattctgcctcggcctcccaaagcgctgggattacaggcgtgagcaacgcgcctggccaccttcaatttttatcatgttttcttttcctagcattaaccactttctgacattatcttgtttacaatgcctcctccactgaaatgtacatcccaaaaaaggcaagcatcttgtcagtcttgttcacaactgtctccagcatttagaaaagtgcttggtacataggtactcaacaaaataattttttgaatgaagagtttggttcgattcttatcccttttttgatcagaccaggaaatgccggaaccttagaaggaagaatggcaacttgccccaaaccaatagcaagtctgtgggagacctgtaactaaaactttgggtccccaaagatattaaatcaggcctctcgagttccaaactcaaaccctggattttgtttgttttgagacggagtctcgttcgcccaggctggagtgcagtggagcaatgtcggctctctgcaacctccgcctcccggggttcaaacgattctcccgcctcagcctcccgagtagctggaattaaaggtatacgccaccacgcccaggtaatttttgtgttttttgtggagacagggtttcatcatgttggccaggccggtctcgaactcctgaccttaggtgattcgcccgcctccgcctcccagagtgttgggattacaggcgtgagccaccgcgcccagccctaggtcattttttagagagacataaaccagtgtcagggacacagcctggacatggtgcaaaagacagtaacggagatgcactacgcccctgcccgccattcatccctttggttgaattcaactcatcctggttgaattcaagtcatccctctgcttgtgaatcctaacagcgcttccgacttagggctccacagtccgggtatgcgttgcctaggttacctcgcacctccgctagccggctgagagccacgcccatcacctcctctctaagatttgattggctggctttggcaaggccgagtactcacctggcagttccctcatgaggtaaaaagggccacagccagctcctgacttgtccgcgccaggaggagccgtggccgcggtgggaggcggggccgtgccgggtcccccgcccgcaggaggcggtggcgggggtggaggctttcctggtccgaagccgagtgcggttgggggcggtggtgggtcagcctgagccccaaacagtgccgtgaaattctccatcgtaccctccgccccggcgctgtctccgtgtctgccgttggtaattttcattggacaatgctttcaaggagtaccccccccccctttctcaaggagccgcttgtcattggatgcctcaggcaccgcctaccttttttcaacaactacttccgtcgccttatgagaacgttcaggaagtgctatttaaccttattagagtcttctgctagctccgcttgctacagtccaataaaatgacttaggcggataaagcgacaactagactaaccaataaaatattaagttcttttttgggttctgacctaccacagcgttcagagaactacatccgggtttagaggccgtacgtttgcgatatagcccaatagcagtcgttatggtgggggaggcggggcgagacctacgacgccggcgagcagtggccgttacggccgaaaagatggcggtcttggcacctctaattgctctcgtgtattcggtgccgcgactttcacgatggctcgcccaaccttactaccttctgtcggccctgctctctgctgccttcctactygtgaggaaactgccgccgctctgccacggtctgcccacccaacgcgaagacggtaacccgtgtgactttgactgggtgagcctcccgcgtgttagkaccccgcgaccttgactgtccctgcccttgcaggtgtatctgggaaccctggggtttacctctctgaggacacctgaggttccgagcctgtagcggacttagagactattaagtgcagggtccgaaccatcatcgagtctaaactttgtgtttaagatgggaaaacggaacatgttagtcgtagcccatgcacaacggcccaacagcttttgactgttgagtccaggtttctttctgtttcaccattgagactaattaacagccctatcaaaactgtacatacacgtgtataacgttttacagtgccgctcattatgtaaagmctcctgaggagccagtaaggtagacaaggcaagtagtaatattcctgtttcattggtgaagaaatggatctcggtatatttaggtgacttgccscaggtcatacaactaatgagtgcctgggacttgaaactactcttctggccacactacctgcacaacactgtcagccgcttcttaattcaataaacatttctagagtgtacactctaggcactctgcttgatcctgaagatgcgaaagtggataaaatttgggggctactgtaaaggaattgtaaaaaatacgttgtaaagaaatctttgggatttctttgggaagtgtcccaagctccttgctgtgcttccttggtatgggtggagggactgctcggaacataaacttaaagcactttccsttctgccatatagcatgtaggggccaaggaaaagcttcccctttgctctctgagggtttgttgaaaaatcaaccgayaaagggcacattaataggagaaaggcatagaaattttattttaacgtgcatagcatgagrgaattgcaggagaatgacccagtggggtacagatgcttatataccctctttcataggaatatgggagatgggaaaatgtgggtgattttaaggtggatcgtaaatgatttttagggtgattcagtggcctggagaacatacagtggcctgggacaatgactgttgggcctgcagagcagasaatggtttctgacaaaaatctgtccaggtgtgttgacaggcttccatctttcttcttgtactgaagtaagttaatgaaaactcagggaagagaccagaagtaattgttgtcttctttgacaggtctggactttaggcagataaggtagttatcagagtaaagctgcttccagtatctgctggtttccagggacctttaatttaaaatgattagcatacaggatgccatattttggggtgtgagtccctggtcttctttatttcctttgtctgaaacttccttagaagtttcactataagctgagttggtgtctgtggagagagaaatcgggctagtaattgagcggcaaaggatcccattaaaccagcctctcattttgggggatagtccagttcaattaaattgttgtgtctcatttcagaagatggcattgtagatgagttctcaaagctaggcctctgtatatgatgtaggcaaacaggtatttaataagagagacatttctatggaacaagacaaacmaagcttaatatctggtatagtctataaactagtttctttagagtctggagggcagtcaattgggaagattaatagcaatctattttcctagattgtaggttgtgtgtaaagtttgtccaaatataagcttttgtggtgatttttttttcaaagtcacgttgactagctttagctggtaaggccttaggaaaaaggcagggtttttagttttttggatttttttttgagacaaggtcttgctctgtcatccaagctggagtgcagtgatgtgatcatggctcactgtagtcttaacctcctgggcaaagccatcctgccacctcagctttccaggtagctggaaccaaaggcatgcactacacacctggctaatttttaaaaattttttttcaaggyggggtctcttgatgttgcccaggctggtcttgaactcctgagctcaagggatcctcctgacttggcttcctaaggagctgggatttacaggtgtgagccactgcgccaagctaaaaaaggccgttttaatttttagtgattctaagtcagaagagtgggtgaaaaatggaaaacattagtctggaggttagcaattttatgagtccagttttattttcattagactttggaaatttttacccagtccggtgatacagtttcaaagttatcagaaacctttatttgtcagcattcttcccatgctttccatgatcctccttgaaaataagacacttggccaggcatggtggctcacatctgtaatcccagcactttgggaggctgaggcgggtggatttcctgagctcaggagttcgagaccagcctggccaacatggtgtaaccccgtctctactaaaaatacaaaaaattagctgggtgtggtggtgggtgcctgtaatcccagctactctggaggctaaggcaggagaatcacttgaacctgagaggcagaggttgcagtgagccaggatcgtgccattgcactccagcctgggcaacaagagcaaagttctgtctcaaaataaataaataaataaaattaaaaaaatatattttatatataatatatatgtattaatgtgcttttaatactaaagctgattttaataaactttacaaacmaatctgtctaatcttgatcagctttgactagacmagataaaatttccataaaccttttatawcctcttagaatttgttttctttttttttttttttttttcttttattgatcattcttgggtgtttctcgcagagggggacttggcagggtcataggacaatagtggagggaaggttggcagataaacaagtgaacaaaggtctctggttttcctaggcagaggaccctgccgccttccgcagtgtttgtgtccctgggtacttgagattagggagtggtgatgattcttaacgagcatgctgccttcaagcatctgtttaacaaagcacatcttgcaccgcccttaatccatttaaccctgagtggacacagcacatgtttcagagagcacagggttgggggtaaggtcaccgatcaacaggatcccaaggcagaagaatttatcttagtacagaacaaaatgaaaagtttcccgtgtctacttctttctacacagacacggcaaccatccgatttttcaatcttttccccacctttcccccctttctattccacaaaaccgccattgtcatcccggcccgttctcaatgagctgttgggtacacctcccagacggggtggtggctgggcagaggggctcctcacttcctagtaggggtggccgggcagaggcgcccctcacctcccggaccgggcggctggccgggcggggggctgaccctcccacctccctcctggacggggcggatggccgggcggggggctgacccccccccacctccctcccggatgtggggctgacccccccacctccctcccggacggggcggctggccgggcggggggctgacccccacacctccctcccggacggggcggctggccgggcgaggggctgacccccccacctccctcccggacggggcggcaggccgggtggggggctgactcccccacctccctcccggacggggtggctggccaggcagaggggctcctcacttcccagtaggggcggctgggcagaggcgcccctcacctcccggacggggcggctggccgggcggggggctgaccccccccacctccctcctggacggggcggctgccgggcggagacgctcctcatttcccagacggggttggtgccgggcagaggggctcctcacttctcagatggggcggatgctgggcggagggtctcctcacttctcagacggggcggctgggcagagacactcctcacctcccagacggggtcgcggccgggcagaggcgctcctcacatcccggacggggcggcggggcagaggcgctccccacatctcagacgatgggcagccgggcagagacgctcctcacttcccagatgggatggctgctgggaagaggcgctcctcacttcctagatgggatggcagccgggcagagacgctcctcactttccagactgggcagccaggcagaggggctcttcacgtcccagacgatgggcggccaggcagagacgctcctcacttcccagacagggtggcggccgggcagaggctgcaatctcggcactttgggaggccaaggcaggcggctgggagatggaggttgtagcgagctgagatcacgccactgcactccagcctgggcaccattgagcactgagtgaaccagactccgtctgcaatcccggcacctcgggaggccaaggctggcggatcactcgcggttaggagctggagaccagcccggccaacacagcgaaaccccgtctccaccaaaaaagtacgaaaaccagtcaggcgtggtggcgcttgcctgcaatcgcaggcactcggtgggctgaggcaggagaatcaggcagggaggttgcagtgagcygagatggcagcagtacagtccagcttcggctcggcatcagagggagaccgtggaaagagagggagagggagaccgagagggagaagggagaggggagaggggagaggggagaggggagaggggagagggagagggagaggcagaggcagaggcagaggccagaatttgttttcattctttattttctttccctagctttttattgttgttgttatttagtttttatttcataatcataaacttaactgcaatccagctaggcatgtaagggaacaaggaaaacacggaacccaaagggaactgcagtgagagcacaaagattctaggatactgcgagcaaatggggtagaggggtgctctcctgagaggagagcacagaaggaatggtctggtggtgaagacaaaacaagtcaaacttactagacttatccacagtcagcaatggtgatcttcttgctggtcttgccattcctggacccaaagcgctccatggcctctgcaatattcatgccttctttcaccttgccaaagaccacatgcttgccatccaaccactcactcttggcagtgtagatgaaaagctgggaaccttttgtgttgggtccagcaattgccatggacaaggtgccaggacctgtatgctttaggatgaagttctcatcatcaaatttctccccatagatggacttgccaccagtgccattatggcgtgtgaagtcaccacctgatacataaaccctggaataattctgtgaaagcaggaactcttacaaccaaatcctttttgtccagtgctcagagcacgaaagttttctgttgtctttggaaccttgtctgcaaacagctcgaaggagatgcggcccaggggctcaccatccacggtgatgtcaaagaacacggggttgaccatggctgatagtacagggctcctggtggtggcagcaaagcctctttgcccaactttttatatctgtttagttttatctatatcattgttttcctccattcatttattctgaaataaccccccctctttttttttttttttttttgagatggagtctcactctgttgcccaggctggagttcagtggtgtgatcttggctcactgcaacctccgtctcctgggttcaagtaattctcctgcctcagcctcccgagaagctgggactacaggtgcctgccaccacgtctggctaawttttgtatttttagtagagacggggtttcaccatgttggcctggcttgtctcttaactcctgacctcatgatccgcccgccttggcctcccaaagtgctgggattacaggtgtgagccaccgcgcccagccacaaaggatttttaaaaagagctttctggtcagaagttggcttaactaaaagctgatattcaggccatatatatatattttttttttttttttttttgagacagagtctcactgtcacccaggctggagtgcagtggtgcaatcttggctcactgcaacctccatctcctgggttcaagcgattctcctgcctcagcctcctgagtagctgggattacaggtgcacgccaccacgcccggctaattttttgtatttttagtagagacgggttttcaccatgytggccaggatggtctcgatctcctgaactcgtgatccagctgcctcggcctcccaaagtgctgggattacaggcatgagctaccgtgcctggccaatttttttattttttaaaggctttctgctttttctcttttggatctcatgccctgggaaattttttcagttcactgaaaccccctttaaaaaaaaattatgtttagtccttgtgttcacttcctttcttgttggcatgatctttgctgagaaaaatgtaaaatttcttttttctttktyttttttttttttttttttttttttgagacagggtctcactctgttgcccaggctggagtgcaatggtgagatgtcaccttactgcaaccttgacctcccgggctcaagtattccacctcagccttctgagtagctgggattataggtgcacaccaccacgcccggctaatttttgtattttttgtagagatggggtttcgccatgttgcacaggctgatcttgaactcctgggctcaagtggtacattttccctcagcctcccaaagtgctgggactataggcatgaactactgcaccctgccttgaaaatgtaaaatttcattagccttttggggaagcttaaaatctctccaaattggcttctccaaaactggttgttccatgtatttctacttcttccttttgccacctttgataacccttaaaggggtctagatgggacttctgacaaccctgagatcccttgaggaagacaaaaaaaaggtgccactggttgggcgcggtggctcacgcctataatcccagcactttgggaagctgaagcaggtggattacctgaggtcagaagtttaaaatcagcctggccaacgtggtgaaaccccatctctactaaaaatmcaaaaaaaaaaaaaaaaaaaggtgccactgaccctctcttttggggcctctcgttttccttatagagccccaaaagtcactaatgggttcatgtcaggtttaaaactcttctctcttttgaattaaactctctagtcwttggcttttgtatcgatacatgtgtctatatatgtatgtatatgtctatacatgtgtttattgtgtatatggtaccaataacgaatgagtacccccaaaagtcaggagtcaacaaatggaaattcaaaacaaaactttttcttttttttgaaacagagtcttgctctatcgcccaggctggagtgctttagcatgatctctactcactgcaacctctgcctccagattaagcgattctcatacctcaacctcctgagtagctgggatcacaggcgtgtgccatcacacacggctaatttttgtattttagtggagacagtttcaccacgttagttaggctgatctcgaacttctggcctcaagccatccgcccgctttggcctcccacagtgctgggattacaggcgtgagccatcrtgcctggcctcaaactaatttttataagtgtttcttttttttcctctgagttaaaagacttgcatctgcaatggactgttaccttacaaggaatcgaacccacgctgcagcagctaaccagtttattgccagccactagaccacagatcatagtgcctttttgcaggcccttcaggggatccaaaacaagcagtttgagtgtacaaagaattttaacttgtgttttgaatctgatttctgtcttttaaaaatcttgccaagggagtttctaaggctgtgttctttctgtatctttttatgggtactagaaagatagctgtttttttttttttycctcaggccaggtacggtggctgtaatcctagcactttgggaggccaaggcgtgtggattgcctgaactcaggagttcgagaccagcctgggcaatacagtgaaaccccgtctctactaacatacaaaatattagccgggtgtggtggtgtgtgcctgcaatcccagctacctgggaggttgaggcaggagaattgcttgaactgggaggcagaggttgcagtgagctgagatagtgccaccgcaccccagcctaggtgacagagtgagactccatctccaatcaatcaatcaatcaatgttttatttaaataaataaataaagtttttttttttttttttttgagatggagttttgctcttgttgcctaggctggagtgcaatggctcagtctcrgctcaccacaacctcagcctcctgagtagctgggattacaggcatgtgccaccatgcccagctaattttgtatttttagtagacatggggtttttccatgttggtcaggctgttctcaagctcccaatctcaggtgatccaccagcctcggcctcccaaagtgctgggattacaggtataagccactgtgcctggtctaaaatgttttttaaataaagccaatttacttagcgacttaagccaataagccttcttcatggaaagtctcagaggtaattttctaggttcagaataccagatgatataaccctcacattcccccaaaatatttactttcaaaaataggctaagatagcgaaagactcttgttttcatagacagttaaggatggtgtttatgtgtgtgtttcctgtagtatcccaccaatacgtggggggctgctaatcatagacctattaatttgagacaccagctaggccctccctggattggacttgcccaggactaaccaggcaataagagttgagatttcttccttctcactgaagtaattttatttatttattttttaaattaattttaaaaattgaggggggagacagggtcttgttctcttacccacgctacagtgcagtggcatggtcgcagttcactacagcctcaacctgctgcacttaagccatcctcccacctgagcctgtcaagcagatgggagtacaggcacgtgccaacatacatgcccagctaatttttaaaaatcatttgtggagaggaggtctcactgtgttgcccaggctggtctcgaactcctgagctcaagcgatcctcccaccacagcctcccaaagtgctaggattacaggtgtgagccaccgcacccagcttcagtgaaggaatttttttaaaaggagaagaaaaagataaaagagttgagacaataaaatcaggtgtgagtcactgcacccggccctctttctcttttgaaaaggccttgaaagatggctctctccttcaccttttgttgtgtcctgtaacttttactaattatctaaagtaagggagaaaaattgtttttgaaaacaggcaaataaagtatcttttgaacatggcttttattctgcatgcctgttatatctgtatctttatatgtgtcatatagaagtgatactttactgccaaactacatgaaagagctctaatcaagtaatttaaaaaatgtaagtgcttatcacattggtaaaagctagctcagatgccttttaatttacataaccttggtaaaactctccagtgatttaaaaatcttaaagtcatgtttaaaccctcaagtttttttttcccccactggaaatttgggttactagaagttaagatagtagaaacataaaatatgcttttattaaaattttattggctggggtgcagtggcacaagcctataatcccagcactttgggaggctgagacgggtggatcacctgaactcaggagttcgggaccagcctggtcaacgtggcaaaaccccatctgtacaaaaatacaaaattagctgggcgtggtggcgtgttcctgtaatcacagctacttgggaggctgaggcaggagaatcccttgaacccggaaagcagaggttgcagtgagctgagattgtgccaatgcactccaccctggaggatagagcaagactccgtctcaaagaaaataaataaataaataaacacacggatgtcaactctcaaaaaaatgtaagtttcttttttgttaagaaactaagtggcttgggctgggtacagtggctcacgcctgtaatcccagcactttgggaggccagggcggatggatcacctgaggtcaggagttcragaccagcctgaccaatgtgatgaaaccccatctctactaacaatacaaaaaaaattagctgggtatggtggtatgcacctgtaatcccagctacttgggaggctgagacgggagaattgcttgaacccgggaggcggaggttgcagtgagccgggattgtgccattgcactccagcctgggcaacaagagcaaaactccgtctcaaaaaaaaaaattcatcgcaaaaaaaaaaaaagaaagaaagaaactaagtggctcacgcctgtaatcccagcactttgggagactgaggcaggcggatcacaaggtcaggagttcgagaccagcctggccaacatggtgaaaccctgtcctactaaaaaaaatacaaaaattagccgggcatggtggcgagtgcctgtaatcccagctactcgggaggctgagatgggagaattgcttgaacccagcaggcggaggttgcattgagctgtgatcacaccactscactccagcctgggtgacagagcaagactctgtctcaaaaataataataataataataataataataataataagctaagagttgctttataatgaagaaaattatacagataaaactaaatggattttttttttwwaaaaaggaaaacaaaacaagccagggcaacaaaactctgagccctatggttaccaagaaaatagtcaatataggggaagggcaaaaccaagtaactatttaaaaccaaagggtgtaatgtaaaggaattgttccattttgtagattggtatcattcagcttctttttttaaaaaaaactttagtggattgtgaaaataactgctttaaggacaaaattcttaattttaaatgctacagaatttaagagcttgtttgaattaatgcaggacccagaactcattactgaacagtcactgagtatatatgatccaaacgcaaagggggtttattcttgaaaaagcaatcagcctagtgggccagataatgccattataaggtctctttgccctgagaagggaactgcccaactctccctttaaaataccaagtgaagtaccccagatgaagcagttagtatgtttcatatacaagccatgttgcactagctttatgataactgggatatcctcccaccaaatatgtctattacccaggtcatggtaaatttggaggttaagagggcccgttttacatgggtgccctcctacagaatcataggtctgtttaagaagccttaccaaatatcctgtccctcataggtcttacagatgcaaccccatgctgggaacgcaaaccctttgtaccagaaaaggtaaaatggtctggggattaaaaaaaaaaaaaarggcttcctgggaccagaacataaaaacatacaggttaatagaactgtaaaatgtaagatgtttaaacaagctttatctaaggtagttgtaaccccttttacctaaatgtcttatgaaaatgggtactrtaaggctgggcatggtggctcacacctgtaatcccagcactttgggaggctgaggcgggtggatcacaaggtcaagagttcaagattagcctggccaaggtggtgaaaccgtgtctctactaaaaatacaaaaattagctgggtgcggtggcaggcgcctgtaatcccagctactcgggaggctggggcaggagaatcactttgaactcgggtggcagaggttgcagtgagccaagatcgtgccactgcactccagcctgggcaacagagtgagactgtgtctcaaaaaaaaaaaaaraaagaaagaaaagaaaagaaaatgggttctacatctaattgggggatgttttcccctttctagtactgtaaaactgaagatgtaaatctgctcatgtaaatcctccattgcatagccttttgtgtggagcatttatcggggctgatggcaaaaactaagccctgactttttaagtgcagattaagccattatttatctctccctgttttacttccaaggaaaccgaaatcatggtattctgaagactagaaacatgaatctccctcatttggtatcccactgaccctggatctgtttcactgctaatgctctgctgctaaaactatacaagctgcctccctttgggccagggcacatgaggttataagggctggttttgagggataaaattaggtcaagattggctggtcgaggtggctcacgcttgtaatcccaccactttgggagaccgaggcgggtggatcacttgtggtcaggagtttgagaccagcctggctaacagaatgaaaccctgtctctactaaaaatacaaaaattagccaggtgtggtggcacatacctgtaatcccagctacttgggaggctgaggcaggagaatcgcttgaacccaggaggtggaggttgcagtgaactgagattgtgccactgcactccagcctgggcgacagagtgagactcttatctcgaagaaaaaaaaaaggtcaagattaaaccctccaaatcaagaagggggtactaaaaatgcccaaacagctggtaaaacaaaattggttgycttctaaactattatgtrttacttytgcatccaccccaaccataaaaattttctgcttactataaaattaaggaaaaatatttactaacattataaagtaccatggaacaaagcctcctgggtataatactccaaattataagtcgtgaagataaatatatctacagatacagatatgtatatatacatattttaaattatttctcagaatgatgcttatgttttgtatagctaattgctataagtctgtaacagaaaccaagcttacagtagctccacataaaagttaaaaataagtcagtctgccgggcgtggtggttcamtcctgtaatcctagcactttggtaggctggggtgggcggatttcctgaggtcaggagttcgagaccaccctgggcaacatggtgaaaccccatctctactaaaatacaaaaaatcagccaggcgtggtggcatgcgcctgtagtcccagctactcaggaggctgaggtaggagaattgcttgaacccgggaggcggaggttgcagtgagccgagatcacgccactgcactctggcctgggcgacagagccagactccatctccataaaagataagattaaaaaaaaaacaagtcagtcttgtaactttgttttttgggtttattgttggcttttttttttacttaataattttaagaagtaatgaatgcctgtccacatccattcctatatggcctaaaacaattgactataagtcttttgactcttaaggccctcagccatagggagtcctgccaaggaaaaaacactgtagaattatatgacttctcctgtgacaaaaccttttctcccaaataccagtatatggtgcaatacaaaagttgtgggaaaaataggtttctacttttaataagtcygtaacaatttaaacaccaaggaccaggcatttctcccatttaatttatatcctccctcaggatgctatacctatggagataaattggcggaaagagagattaaatttattacattctaatttaatgttggtatcacaattttcaaataagatttatcacagggttcaaataacccttattaaggagtacaaacacactgtaagtctattcaaagaatagatgatgcatgcagggtttttcctggctgattgggttgtttactgccctcagattctacctataaccctgagtgcccaaatcttcactgtctttatgatatttgttattatattagcattaggcatttcttgtaaatattatgccagatacagcaaaaggcaaaggcacagttaaagacccggatcataatagctcagaaaatagatctgatccgggatttttttttagactaagcctgactccatttcaccccttaaacaattggctattacatcaggtcagaccatgtcctccccccattatccaaatcgctaatatttaaaactattaccatcaaatcaaaggactctagaaacaagccttcctagtcctgtgggaccctgccagatagccaaatcagacaactctaggaatgaggtttcctagcacgttgggacctgctggtgtttgttggtctacacatacattctatggaatgctttttggccaagagaggggactgaggactaagctatgattttttttatcttgcccaaattcctttctaaggggtctgggtaatcatgccctaaaaaccataaattctcatcagatgggttttatttaaccctggatatctattgtgacttactttcctatctgactctggcataacaaggaagaaactaaaaatgttttaccccaaaatctgtttccttcccataccttgaaattgccctacaaagtctcttctgggaaaaatccacattctgtagagaatcccctctcccctttgttttccttccttctcagatccaggaaataatcaactaagagctaggcacccttttaagtccaataagaaacgatttacaacctgctctctctgaagtccgctgagagcttcctctgcacaataaaacttggcctcctcaatcctttatcataacctgaacattcctttctgtgaatcccaggtctttagacaaactcaaccaattgtctgccagaaaatgtttaaatttacctacagccccgctttgagttgtcctgcctttctgaacgaaaccaatgtatttcttaaatgtatttgattgatgtctcatgcctctctaaaatattaagctctacccagaccaccttgggcacatgttctcaggacctcctgagggctgtgtcatgggccatggtcactcatatttggctcagaataaatctctgaaaatattttacagagtttcactctttttttttttgagacggagtctcgctgtgtcrcccaggctggagtgcagtggcgccatctcggctcactgcaagctccgccttccgggttcacgccattctcctgcctcagcctcccgagtagctgggactacaggcgcccgccaccatgcctggctaattttttatatttttagtagagatggggtttcactgtgagtttgactctttttggcaacagtaatatggctcccaacgttggcctcagagaagactcagaaccccaaaggagttgcccgagactggaggtaaggtaccagcaggggcccattgaagccccactgagttcgagcttctccttcggtggaactgttaagtcgtcctgagccccggacctcccttcaagggctgatggttcttgattttttctgagctggttttttgctaggaagttgttgtttaaggatcctgattgtagtttgggtatgcattctgaagggaattctctattgctttttctcctaaaatttatcttgattcggttcatctgtgtccatttgtgtgaggaactgaactgttgctttcatagagactgagtttttcagctctgaagagaaagggtgtttgctcttcccagctgaaaggtgcccctgggtgactgggggctttgtgggagtgtccaggggttgacccccaagacgtacagcggccctaaagggaaatccctttagggattaatccccaaaaacaattaatttaaaaaatggctcatccaggaaacacacatgagggctgatcacccagcgttttgagccctctcagaggtcacagacctctggagagagacacttaagagggcagaaacgactcagtggtgacactgtggagtcctgcctgcaagcagcacgcatcaatccaccacacatcaatccaccacacaagaaccctaggctacagctcagctcctctaaggagaaaaaaaaaaggcgagaaacaaatctaagactaaggagaaaatgaggagaatgtccccttttcgggtccttcataggttttatggcacctctacttgccagaattgatataaaatggaagtaatatggtctttgtgcacatttgcattaagaaaaaagagtcctaaggtcaaactgaaaactatagagttctaggttctgtttttttttctgcctgctttagatyggctgttacttttcgactgagataaaaaccactgttctctgtttttttgcaagtcggtgaagttgtatttgtctcatggcaaaagtattgaattaatagctatgggaactgtgtgtgtgtgtatttaaaggcctttataatagacttatataattttacgttcaattggcaattgaaacccttttaatttmcctctagcacaccagactttctcttcttaccttatgatgtaaattttgctatctgattttcacctgagttgcctttaatatgcaaatttaaggctgtttagctgacagctgcctagggtaggatttttaaaaaacggaacaaaaaggaggttgttatgagtctatgccatgtgcttctatcggcatacctaataagtctatatatttatgtgtgtgtatacaatattttcactactgaaaatatataaagagctctaattaattggcttaaaaatatataaaagcgggtagggcgcagtggctcacgcctgtaatcccagcacttttgggaggccgagacaggttggatcacaaggtcaagagtttgagaccagcctggccaacatggtgaaaccccgtctctactaaaaatacaaaaattagccaggcatggtggcatgcactgtagtcccagctactaagactgaggcaggagtatcgcttgaacccgggagatggaggytgtggtgagccaggatcacaccactgcactccagcctgggcaacagagcaagactccgtttccccccacaaaaaaaaataattwtatatatatatatgcatgtggtggccatggtgcctcacgcctgtaatcccagtaactttgggaggccgaggtgggtggatcacctgatgtcaggagttcgagaccagcctggccaacatggtgaaaccccttctctactaaaaatacaaaaattagccagccatggtggtgggcgcctataatcccaggtacttgggaggctgaggcaggagaatcgcttgaacctgggaggtggaggttgcagtgagccgagatcacaccattgcactccaggctgggcaacaagagtgaaactgtctttaaaaaaaaaaaaaaaaaaaaaaaaaaaggccaggcatggtggctcatgcctgtaatcccagcactttgggaggccgaggcgggcagatcatctgaggtcaggagttcaagatcagcctggccaacatggcaaaactccgtctctactaaaaatacaaaaattagccaggcattggtggtgggcgcctgtaatcccaactactcgggaggctgacacaggagaatcgcttgaacccaggaggcggaggttgcagtgagccgagatcgtaccattgcactccagcctgggcaacgagtgaaactgcgtctcaaagaaaaacaaaaaaccaagaaycttgtagagtgaatttttgccctcaaataaaataactgggttgcttgagagagagagacatttagggtaaaacagcctaaccattgtgaatgatctatgtaagtcataatacggttagtaagaaggaatttttaaaggggttgtataattcggttggctatgattaaagaaaatcatatctttctagagattagtctttaatatttaaaaaatgcactaacacaaaacttaaattagttaaaacaagattttattacaaatattgagttatttttaattcaataaatttttaaattctgtaatgtgtttcctttaacattcttcagattgatatcttaaaagtgccactctttccgttttttgttttttgtttttttttttttttttttttgagatccagtttcactctcgctcaggctggagtggagtggtgcaatttccactcactgcaacatctgcctccctggttcaagcgattctcctgcctcagcttcccgagtagctgggattacaagcatgcgccactgcacccagctaatttttgtatttttagtagagacggagttttgccatgttggccaggctggtcttgaactcctgacatcaggtgatctgcccgcctcagcctcccaaagtgctgggattgcaagggtgagacaccgcacccagcctttttttttttttttttttttttgagaccaaaaaaannnnnnnnnnnnnnnnnnnnagattagtctttaatatttaaaaaatgcactaacacaaaacttagttaaaacaagattttattacaaatattgagttatttttaattcaataaatttttaaattctgtaatgtgtttcctttaacattcttcagattgatatcttaaaagtgccactctttccgttttttgttttttgttttttttttttttttttttttttttttgagatccagtttcactctcgctcaggctggagtggagtggtgcaatttccactcactgcaacatctgcctccctggttcaagcgatcctacccagctaatttttgtatttttagtagagacggagttttgccatgttggccaggcgggtttggaatcccgaaaaataaggggattggccccccccgcccccccaaaagctgggggtggcacaaggggggaaacccccccccccccttttttttttttttttttttttttgagaccaaaaaaattaaatcaatgtatttgatgtcttatgcttccctaaaatatataaaatcaagctgtagagcaccttgggcacatattctcaggacctccagagggctgtgtcacaggccatggtcactcatayttgcctcagaataaatctcttaaaatattttacagagtttgactcttttcgtcaacactggccactggacttcacccaaaaataaggcctccaagtggtggagaccaagaagctcccacttggtcacaagtcragcttccaaggacataagatgagaaggaaacctcatctggtttttattttggggacccacagcacaatttgtatgtcatyctgataagaattttaaaactcacccaccagtctggagggccagcttgaccaataggcttacaggggctttattctgatgttgtactttatggtaccctactctatgacaaaataacacaggaagatataacamgagaaaaagactattttggggagaaaaagaatcagacaatgtgaatattcataccaaaaacatatcaaagttgctacacctaagactaatcatacaaatgttcttttcccattaatcttaaatttggaaaggaaaaggagaccaaaagtggtttttgtctctttattcatgtgtctttttctttttactagtgtttccgtgtgcgttgataaatttttccttttctcatgtcaatctgccttttgtcagctcattttcagcaaaactttagaaggtggaggggaggctacctttgtgcctataagcaacatctgtgctcagatgaaggcgcatcatccagaatttttgtactttttccagcccccaaaatgagtcattacctttaccagaacccactcccttatttttttcctctttccttttcctgcttcctctttttcccaaactgtataatcaattagctcaaatgtagccttgctatttcagaggatctttcatttgatatttgatgccacttcaatgaaaatgggaccccaaaatataagtggatagtaataaagatttttaataagtataggagaccttttataaagttcatttacctgtatactcttatctaatatgcaaaatgctggaagttttatattcttactctgatagaatttttwaaaaatgcttagggttaatagccaatttttgtttttctggaaaattcatggttcrcctatttaccttgctgattgggactaggttctcagagcttctagatagctaaacacaggaaggttcctggaacatatccttttgggtttttatggaacttcattacataggtgtgactaattaaatcattggccattggtgatcagctgaactttcagcctggtggggggtggggtggggctgaaagtcctaacctgctaatcatgcggtgtccttaggccatatggkccttgtgggagcatcatagagtgtacttacacaaacttagatggcctactacacacctaggctttatggcacaacctgttgctcccaggcacaaacctacacaacatgttactgtactaataagcagtttaacacaatggtaagtatttatgtatctaaatatatctaaacacagaaaaggtacaataaaaatatggtattataatcttatgggaccactgttgtatatgtggtctattgctgaccaaaatgtcatgatacggcacatgactatatatttcacagcataacagtgtgtcagtgataactgtggttgtgtttttttttttaagtcctcgtgtaagacacagtgrggaatttttttttttttttttttttttttgagatggagtttcactcttgtcgcccaggctggagtgcaatagcgctttctcrgctcactgcaacctccgcctctcgggttcaagcgattctcctgccttagcctcctagtagctggaactacaggtgcccgccatcacgcctggctgactttttgtgtgtttttagtagagacgggtttcaccatgtaggccaggctggtcttgaattcctgacctcaggtgatccacccgcctcggcctcccaaagtgctgcgattacaggcgtgagtcaccgcgcccagcctatagtgaggaatttacagatgaaacgatatagctggaatttgcttaaagtttctctaagaaaaaaaaatgggtagcatatatgaattggaaatcacagtggcaaaatgttggttactgttgaagctgggtaataggggttcattcaattatcytctcttctgtatgcttcaaattatccataataaaaagttttaaaacaattaaatagaacaaccaagggctctgcattatagagtcatcctagaacccaaggctcattctgtcttcaacctgtggccttgggtcatcccagcatcatccagccagcaaatgaaaaaaagctggaatgcgggctgggtgcggtggctcacgcctgtaatcccagcactttgggaggctgaagcgggcggatcacaaggtcagtagatcgagaccatcctggctgaaataatagaaacccggtctctactaaaaaatacaaaaaattagctgggtgtggtggcgggtgcctgtagtcccagctactcgggaagctgaggcaggagaatggcgtgaacctgggaggcggaggagaccgcgccactgtactccagcctgggtgacagagagaccctgtctccaaaaaaaaaaaaaaaaaggactgcaagggcacacactttcttaactgcctgaacccagaagtggtaaatcactttcattcacattccattctcaagtaacagtcacacagttctacctggatgcaaagagatagggagagagtctagctgcagtatgcctgggaagaaaataaatgaagtttgcagtagcaatagctagtccctccatagaccattttctgtccttagagaatttcttttggtcctacctttggtcccctggttaactacaactctcttttaaaattcatctttcagccaggcacagtggctcacgcctataatctcagcactttgggaggccgaagcaggtggatcacttgaggccaggagttcaagaccagcctggccaacatggtgaaaccccatctctactaaaaatacaaaagttcaccgggcgtgggggcaggtgcctgtaatcccagctactccggaggctgaggcaggagaattgcttgaatccaggaggcaaaggttgcactgagctgaggttgtggcattgcactccagcctgggcgacagagcaagactcctccatctcaaaaaaaataaaaaataaaaaataaaaataaataaaattaatctttccacaactttcattcccaattctaacccacctagtttcattcatgaaaatctttcctggcagggcagggtggctcatgcctgtaatcccagcactttgggaggccgaggcgggcagatcacaaggccaagagatcaagaccatcctggccaacgtggtgaaaccccatctctactaaaaatacaaaagccgggcgtggtggtgggcacctgtagtcccagctactcgggaggctgaggcaggagaatcggttgaacctgggaggcggaggttgcaatgagccgagatcatgcccctgcattccagcctggacaacagagcaagagtccgtctcaaaaaaaagaaaaaatctttcctaatttctgcctcaggtataatatttacaaagtctgtcatgctccctcacccctattttcttttcttttttttttgagacgttgtttcactctgttgcccaggctggagtgcagtggcacgatctcggctcactgcaacctccgcctcccgggttcaagcgattcttctgcctcagcctcctgagtagctttgattacaggcgtatgccaccgtgcctggctaatttttttgtatttttagtagagacggggttttgccatgttgaccaggctggtcttgaacttctaatctcaggtgatccacccactttagcctcccaaagtgctgggattacaggcttgagccacagcacccggccaggagagctttatttctcataaaaagttgcaacctgctggctatcctgtcaggcagggaagcatagcctccgctcagaagctaaaaacagacacttggagtgaggggtaaaggaaacaggagtttatgctaagcagggtggccaaatatacatatttaataagctatcggcagagtcatgaatatttatgaaaggagaaacacgtgcatgctcagttgagcttcatatctgtccataagacccatgttcaaaagtggcaatgttaaccatgatctgagrtggasttttcagccctctcaagtcaaaaggtgaagcagaggacacagaaactatgcattctccttagcctggccagatccactgcatggtcactggtctcttatcaggaagcaatgctggttagttgttttgtcctaactgcaaaagggaggggcagtgtcaggcagttggttgatgtcaggtggagcaagtcttttcagagggctggtttctgtttaactttctgtttaagaaagcctaatgttggtaagtgaaggagggggtataaagagatgtgtctgacctcacaccctgttatggccgagaactcagttttcaaggtttctctggggtccccttagtcaagaaggagtctgttcagtcacttcagggcttagaattctattacttctcagtgtctttgtcatgtttattgtctgtctcacttgctcacttggtggttacattctacaacagggttatctaatcttttggcttccctgggccacattggaagaattgtcttggggcacacataaaatacactaacacctaatgatagctgatgagctwaaaaaaaaaaaaaatcaaaaatgtctcataatgttttaagaaagtctatgaatttgtgttggaccccattcaaagccatcctgggctgcatgtgagccacaggttggacaagaaggttgttctagaaggtgagaaaactgtaagacgagtattgaaaagggctttttgagagctctgaaagcccctttcagctctcaaattatatcaaaagtacatggattatcacgatgcatattgggtggggaggaatgattaagtaatgggggccgggctcggtggctcacacctgtaatcccagcactttaggaggccgaggcgggcggatcatctgagctgaggagttccataccagcccgggcaacatggggagacccggtctctacaaaaaatacaaaaattagccaggtacagtagtgtgcgcctgtagtcccagctacttgggaggttgagtcaggagaaacacaagcccaggtggcagaggtttcagtgagctgagatcacaccattgcactctagcctgggcgatggagcaagactgtctcaaaaaaaaaaaaaaaattaaacatgtggaatagctagatattatattaatgggctattatcaagaaaacttacctggaaaagttttattctaccagcgtcacattgagttgatattaataatcttacgattttataccatatcatgctttatacaactctttttaatctgttatctcatttaatcccccagtagcattttgaaatagatactgttcagttgaggaaaccaaagctaagggattaagtgctttgttgaaaagcaccgcaggcctggcgcggtggctcgtgcctgtaatctcagcactttggtggatcacctgaggtcaggagtttgagaccagcctggccaacatggtgaaaccctgtctctactaaaaataaaaaaattagccgggtgtggtggcgcatgtctgcaatcccagctacmtgggaggcggaggttgcagtgagccgagatcgcgccattgcactctagcctgggcaacaagagtgaaactctgtctcaaaaagaaaagcaccagcaagtttgtggcaggagtagaacctgaatccaggtcttctgactgatgtttatccccgtacaccttacctaactgcagttctttattgttcccattcccagtttggatcgctattggtttttattacatatttagttccctttcccacctaagttagctctagtcactgcattcctgttataatacttcgattctgttccagagagaagtggagatcctgatgtttctcagtgccattgtgatgatgaagaaccgcagatccagtaagtttagttcacttctcagactcaaggttagatctaatgccctttggaggtgctttgcttcatgttaagagagtggcartcatttggtaaatttgtcctacgtttaattccaaggctgaatttgaacttggacttctatcccctccctgtctcctatttcaaagtgccccatgaagagggacaaagaatgggatataggagtgcacagcccagcctgacctgtgacatctctgtgtttcagtcactgtggagcaacatataggcaacattttcatgtttagtaaagtggccaacacaattcttttcttccgyttggatattcgcatgggcctactttacatcacactctgcataggtgaggagactgcctttctttctttttttttttttgtaagactgtgttgatagacttgattgtggaaaccacagtcccaacagttgcaatcccaaacatgtttctccatacccttcttccatatctcatacctaatgaattatatatgtagctcagatgataacagtttacagagactgttattgtagaggtagggaatgtgttggtggtctacatatatccmcaagtgtgtattatttgggggctgaaatccttgggttggtttggaagtaaattccctgtgtaaggctttttatgtttccttcgacatcttctttctgtatttagtgttcctgatgacgtgcaaaccccccctatatatgggccctgagtatatcaagtacttcaatgataaaaccattgatgtgagtgctctttcccctttctgtttcttgggtcccttgtgggtgattttgtagttgtgctctccattcactaggaggaacaacagtgcttcaaaatggatgtcacgggcactgtggttcattatgagagccgggggagagggaacaccaggatgaggaattagatgctaaagtctgaaccttcccaggaggctatgtggatccagctgacttttcttccctgtatttggcaggaggaactagaacgggacaagagggtcacttggattgtggagttctttgccaattggtctaatgactgccaatcatttgcccctatctatgctgacctctcccttaagtgagtagtgcaaagggagggatggtggaaatggagatgctgtgccttccctctcactgtttttggcttttctttttcttttggccttgattttcacacatggtaaccaaaggcatctccctctcccctcttaaatatctatacttccactttccttgatccattattttttttcagcatattaaataatatattcttttcagatacaactgtacagggctaaattttgggaaggtggatgttggacgctatactgatgttagtacgcggtatgtaaagacctgggcagagggtctgagcagggaaatcactttgagtgatacatacagggacatttagagaactttctgggccctgcaggtacaaagtgagcacatcacccctcaccaagcaactccctaccctgatcctgttccaaggtggcaaggaggcaatgcggcggccacagattgacaagaaaggacgggctgtctcatggaccttctctgaggtacctgaaaggaagggcaggtgcatgaagggtgcagaacagtaggtgggctttcaagccctacccgggtttgattcacagctctgccacttgcccattagctttgagggtgtggactagttactagacctcatgttttaattcatttagcaaatatatattatgtgcagacctgctagtactgggtaacaatcattagttaagatttggtctcaggccaggcacggtggctcacgcctgtaatcccagcactttgggaggccgaggctggcagatcacctgaggtcaggagtttgagaccagcctgaccaacatggagaaaccccgtgtctactaaaaatacaaaaatagccgagtgtggtggcgcatgcctataatgccagctatttgggaggctgaggcaggagaatcrcttgaacccgggaggtggaggttgcagtgagctgagattgcaccattgcggtccagcctgggcaacaagagactccatcaggraaaaaaaaaaaagattctgtctcgaaggccactgcacctattgtctgtaggtgttaggttccctgtcagttaattggaggtaataacccctggcttacagggttgttttgcagattacattaaataatttaggtataattcttggcacggtgattggcacataatgggtatttaactattagttgacttttctgggtacctaaaaaagaggaaggttagggaagatttttgtcctttgcttactccttcctttcccagactttgtgtaaaatacctcttacttcccaggctctttactctcccttccaacccagatcctgacgtgtgcatctcttttgtgcaggagaatgtgatccgagaatttaacttaaatgagctataccagcgggccaagaaactatcaaaggctggagacaatatccctgaggagcagcctgtggcttcaacccccaccacagtgtcagatggggaaaacaagaaggataaataagatcctcactttggcagtgcttcctctcctgtcaattccaggctctttccataaccacaagcctgaggctgcagccttttatttatgttttccctttggctgtgactgggtggggcagcatgcagcttctgattttaaagaggcatctagggaattgtcaggcaccctacaggaaggcctgccatgctgtggccaactgtttcactggagcaagaaagagatctcataggacggagggggaaatggtttccctccaagcttgggtyagtgtgttaactgcttatcagctattcagacatctccatggtttctccatgaaactctgtggtttcatcattccttcttagttgacctgcacagcttggttagacctagatttaaccctaaggtaagatgctggggtatagaacgctaagaattttcccccaaggactcttgcttccttaagcccttctggcttcgtttatggtcttcattaaaagtataagcctaactttgtcgctagtcctaaggagaaacctttaaccacaaagtttttatcattgaagacaatattgaacaaccccctattttgtggggattgagaaggggtgaatagaggcttgagactttcctttgtgtggtaggacttggaggagaaatcccctggactttcactaaccctytgacatactccccacacccagttgatggctttccgtaataaaaagattgggatttccttttgattgcgcgtttgtgtgtttctgtattagaaaagcctgacaactgcagaggaattgcccatcttaagggcaaaggccatcctatttggtttcaccaaatgccgggcattgatccccaggactggcaagagttggagaagtctagtttccataaatctagaatagcggccacatgttgttaggtggtgggtttactctgggattggcctgcggttgccagggaggagagtttggcsgcagatggtggcacacaacatttagcgccatgcaaaggtacagaaaagattgcgcgaagcgaggctagcagtcggacctagtctccgccccttcctgctgtgttcaccatcccagcgtcccctgtcccctccacccgaagcgatgggtggttccgtcaggcgcttcccgcaccttcccgctccctgcttgcaaagtggttgtgccccaaggtccgcctccaggccacgtgggtgctgcgggccaagctttcccttcctttgagagaggtttccgctgtaggagcagagcttccgggctgcgctcttcgttgcccagtttccgctcagtggtcgcgtctccgccccccacccaccagtcccgctgcattctcggccgggctctaggcgccatggctccccgcgggaggaagcgtaaggctgaggccgcggtggtcgccgtagccgagaagcgagagaagctggcgaacggcggggagggaatggaggaggcgaccgttgttatcgagcattggtgaggggcctggagagtaacgggagagagggaacagtggcgccggggggggccaggggccccggtttctaacctctccgtctctccctagcactagctgacgcgtctatgggcgcaacgccgcggccctgagccaggcgctgcgcctggaggccccagagcttccagtaaaggtgaacccgacgaagccccggaggggcagcttcgaggtgacgctgctgcgcccggacggcagcagtgagtggggacctggatgtgggggagagggacgtgggtgaaagggacgtgggttccgaagacaggaagcgctattcttagaaaccacggcagtctcatgacttcagagacgtgctcgtgggttccgaagtattgtaacttcgcttcattctggcctttcaggtgcggagctctggactgggattaagaaggggcccccacgcaaactcaaattccctgagcctcaagaggtggtggaagagttgaagaagtacctgtcgtagggagatttgggtagaagccctcatgctgaggtttgaaatgggaagtggggggcgcgaccgctgttgaggaagagaaggcattgatcttggtgtggctacaagtacccacctggcgtgggtagctcacgcctgcaatcccagcactctgggaggtcgaggcaggagtggatggccaacacagggagaccctatttgaaaacaaaaaacaaaaaaaagacacaatattgttttctgtctagtgtgccctaagtggaatttatgtcctttgggagactgtagttgacttgccctgggggtatggacaagttttccatttggaagtttatttcatgttacttcatttatgcttatccctaccctcttctgtttggttcttgggtgttctgttactgtcctgtgttaacactgcattacaataccattaaatttggttacaaggattttgaccttgtctttgtccctagtgcttcatacagtgctttggcatgttgttctgcacttattatgttgagtgagatttggaggaaggatgcaatccttgagcttcagggtttgtgagttcaagggttggggaacatgtcttcctcagtccttaagattgcccagatcctttctctaaccttatttcccttctcatttttgcagctttgtgtccctggtgatgttggaacattaatgatggaacatggccaaacttcagtcatgatcctgaagccatggtttcttccctgccagaaatgaaggttcagttatgaggcaaccctctagtaaggcattgtaaaagttactggatttggtttaataaaagttgaaataaagtatttgagtaatagagtaaaacttaatcttaagggatggacaaagccagccttgtggagttggtagtccttgtgtttttcatagcccaagatagccatgtgacctggaacttttaaaaaaaaatttttttttaagagccagagtctcactttgtcacccatgctggagtatagtggtgctatctcggctcactgcaaccattgtctcccaggttcaagcgatactcctgcctcagtctcctgagtagctgggatcacaggtgcacaccaccacgcctggctaatttttttatttttatttttagtaaaggcggggtttcaccatgttggccaggctggtctcaaactcctgacctcaagtgatatgcctgccttgacctcccaaagtgctggggttacaggcatgatgagccaccgcacctggcctgacctgcaacttttatgatctctggtaaaacatgagaaatacttgtaaaaattatgggagcaaagtaaataatttattttttaaaaaagcaactgtatctttttcaacttactttttggaagtaatgatggaagtacatcttcttggcccctgcagaggttttagctagacttcctaatactggcagtgaataagccccacgttgggtgctggacagcatccatcactcccacccacttagtattccacccaacactgcttcacaccttcctctggaacattttcttaaacaataccccaccacagaggagggtgttctttctcagcttttcctaaattaccagtgactggatgccttatgacctgagagatctggccttggctgttacctatgacccaccagaattggggagcacacagtttgtttcagttgtcactaaccggaaaatagattacaaataagatggtacaagttcataattttctatctatggtacccttggcttctgcctggcttctgaggcttagggaagggaggaagggacctacaaagagccagggtacacctgcctcttgtgctgagggcacgtgccagcttctctgccagtaagccttttgctagctaacatttcccaccctcccaaggcccctaacctgccctcccctctccactatgttagtatatctacctctgtttctgactctgaggaagggtcaggccacacggagggaacagtagtgggtaccagcctcccctctgctgtccagtccaccacatcaatctcttcctcttcagagctggcaggaagtgagcctagtagttcagagtgaccagatacctccttgcctgccttgggagaagggtataataactcatctgtagtcaaggagacttccagcccagtctccacccagtttgagcagggaggtgagaggtccccataagacctctggggagtatcaagggagctgacatggagaagtttgtcttcctgaccatccagtggctgggagctggtaatttcaaggtctggtgtccaacggcctcctactgaaagcacttcactcacctcagagggcatgacaagggggctaaggagctcagttggccctctgttctcaccagcaggttccttttccaattctgtgagctccctgggccagagttccatgtctggtagacaccattcttccccttcaatccagttctttcctgtttctgtcagatggtaggtaggcgttctgcagccctcagcccctggactctccagagaccctataggtggttcaatgtctgagccacagagcatgaagtccaggatctcctccagctcactggtggcagcagcacttgtgattcggtactcctcagcctcacagggctgctccagcagagctgtgtcaaatgcatagggttctctgcagtcaatagccaacataggttccttctctaccagttctggactggactcaaactctgacttcaccactgggtggtctggggagtggctagcagagaccagaatgtcttgtagcttagtgcacatgggggagtcctgacacagttctgttctagtaggtgacatttcctgctcattactggagaatggctgagttcctgaaggctcttggaagtctcctccgggatctgggatctgggggctatcttgagtgtttttgagaggagtctcttgtaccacttcccagcaagtcccattgacaatcttcctaagtttaactctcccaacctgcccctcctctgcagagtctgagttaggtgccctgacttcagggctccgcttcctgctcccacctgtctttcccagaccagatgggtttggggtgctctgcagaggactagctctgcctggttttggcttgtcctctggtgtttctttatttacactcctctgccgccaaagacgccggccaggggttgcaggcactgagctagatccacttaaaatgctggaaggctttgatgtacagataccaggagatggctttgagcgactgagcctgatctttctgggcaacaggtgtttgtccacagaggggtacaagctgggtggggagagcactgtaggatcaagggcagtgtcattcttgttctctctaggctcttgactatggcttgatggtgaagagtttttttcttgtggagttgggcaggctctggccttcctcttgagcagaagagtgccagacaaattgtctgcattctgtcggttgttttcctggggcccctcttccttccccaaggacttcaatcttattgccccaagaggacaaggagtttgattagtgggcagtggggtgtgagggtggtggctgggtgtcaccactctggcagagattggtgcagcacttgttggttgtaagcactctcggttcagccttcggccctgtggggccttcaccaactttccaccctcaagctgaagggattccagctcagacacacggagctgacgggcagcagatagcacatcctgggcttcttcttgagatacttccatttctgaggtatacaagaagtccaccagcttcctaagtgtgctgatcttcaggccacccagctctagcaccaccttcccaccctgagctggcctctcccgctccaggcgctctgtgaagaaggggctacaagctgacaggatgcagcagtgagctggaactgcctcacctgaagggaaacccaaatacttttgttatcaggtagactggcatgttcatgggctaagcatagacattactacccaaatgtactgccccttcttttattttccttccatgggacttcaagtaaaagaaaaaaattattcttctgcctgcctggaaccttctgccattaccttttgcctagctatttttttttttttttttgagacagtctcgcttggttgcccaggctggagtgcagtggtgcaatctcagctcactgcaacctctgcctcccgggttcaagcaattctcctgtcttagcctcccgagtagctgggattacaggcgcatgctgccacacccggctaatttttgtatttttagtagagacggggtttcaccttgttggtcaggccggtctcctgacctcaggtgatccacccgcctcggcctcccagagtgctgagattacaggcgtgagccaccgtgtccagcccgctaccttgtttctttattctcaaaatctacctttgtcatcacttccttcagaaagcctcctggggctgagtgcagtgccacatgcttgaaatcccaactgttaggtaggctgaagcaggagaattgcttgagtccagggctttgaggctagcctggggaacacagttataccttgtctccaaaaaaaaaaaaaaaaaaagccttcctccaccccaccacaagtctgagttaggtgttcctgggcagaggtactctgtagctatcatggcacttagctatctgtattgtaattatccatctccttcactaggctgtaactctgtgaggacaaggtaccacgtctgtctttctcactgagatatattcagtgcctgacacaaaataaaggatcatcattcttgctgaatttaattttattgactcacacaagagttcaaaaacttttatagaagcaacttgtggtctaacagaaagagctatggaggtggatgatctgctgtgctctacccactgcctaccaggcagtggtctgttctgagccacctcatttaatgggtacttcccaggcaatctcactttgtttcttccatggctttaattacaaaaggcttgctgatgattcccagatccatacctctgcctagatctctttcctgagggagtaaacataccacagctggcatgtctacatatatgcctcacaagcaccttcaatgcaac

SEQ ID NO: 98127 - DNA, 20620 bp, Homo sapiens
aggctttgctgccaccaccaggagccctgtactatcagccatggtcaaccccgtgttctttgacatcaccgtggatggtgagcccctgggccgcatctccttcgagctgtttgcagacaaggttccaaagacaacagaaaactttcgtgctctgagcactggacaaaaaggatttggttgtaagagttcctgctttcacagaattattccagggtttatgtatcaggtggtgacttcacacgccataatggcactggtggcaagtccatctatggggagaaatttgatgatgagaacttcatcctaaagcatacaggtcctggcaccttgtccatggcaattgctggacccaacacaaaaggttcccagcttttcatctacactgccaagagtgagtggttggatggcaagcatgtggtctttggcaaggtgaaagaaggcatgaatattgcagaggccatggagcgctttgggtccaggaatggcaagaccagcaagaagatcaccattgctgactgtggataagtctagtaagtttgacttgttttgtcttcaccaccagaccattccttctgtgctctcctctcaggagagcacccctctaccccatttgctcgcagtatcctagaatctttgtgctctcactgcagttccctttgggttccgtgttttccttgttcccttacatgcctagctggattgcagttaagtttatgattatgaaataaaaactaaataacaacaacaataaaaagctagggaaagaaaataaagaatgaaaacaaattctggcctctgcctctgcctctgcctctccctctccctctcccctctcccctctcccctctcccctctcccctctcccttctccctctcggtctccctctccctctctttccacggtctccctctgatgccgagccgaagctggactgtactgctgccatctcggctcactgcaacctccctgcctgattctcctgcctcagcccaccgagtgcctgcgattgcaggcaagcgccaccacgcctgactggttttcgtacttttttggtggagacggggtttcgctgtgttggccgggctggtctccagctcctaaccgcgagtgatccgccagccttggcctcccgaggtgccgggattgcagacggagtctggttcactcagtgctcaatggtgcccaggctggagtgcagtggcgtgatctcagctcgctacaacctccatctcccagccgcctgccttggcctcccaaagtgccgagattgcagcctctgcccggccgccaccctgtctgggaagtgaggagcgtctctgcctggccgcccatcgtctgggacgtgaagagcccctctgcctggctgcccagtctggaaagtgaggagcgtctctgcccggctgccatcccatctaggaagtgaggagcgcctcttcccagcagccatcccatctgggaagtgaggagcgtctctgcccggctgcccatcgtctgagatgtggggagcgcctctgccccgccgccccgtccgggatgtgaggagcgcctctgcccggccgcgaccccgtctgggaggtgaggagtgtctctgcccagccgccccgtctgagaagtgaggagaccctccgcccagcatccgccccatctgagaagtgaggagcccctctgcccggcaccaaccccgtctgggaaatgaggagcgtctccgcccggcagccgccccgtccaggagggaggtggggggggtcagccccccgcccggccagccgccccgtccgggaggtgaggggcgcctctgcccagccgcccctactgggaagtgaggagcccctctgcctggccagccaccccgtccgggagggaggtgggggagtcagccccccacccggcctgccgccccgtccgggagggaggtgggggggtcagcccctcgcccggccagccgccccgtccgggagggaggtgtgggggtcagccccccgcccggccagccgccccgtccgggagggaggtgggggggtcagccccacatccgggagggaggtgggggggggtcagccccccgcccggccatccgccccgtccaggagggaggtgggagggtcagccccccgcccggccagccgcccggtccgggaggtgaggggcgcctctgcccggccacccctactaggaagtgaggagcccctctgcccagccaccaccccgtctgggaggtgtacccaacagctcattgagaacgggccgggatgacaatggcggttttgtggaatagaaaggggggaaaggtggggaaaagattgaaaaatcggatggttgccgtgtctgtgtagaaagaagtagacacgggaaacttttcattttgttctgtactaagataaattcttctgccttgggatcctgttgatcggtgaccttacccccaaccctgtgctctctgaaacatgtgctgtgtccactcagggttaaatggattaagggcggtgcaagatgtgctttgttaaacagatgcttgaaggcagcatgctcgttaagaatcatcaccactccctaatctcaagtacccagggacacaaacactgcggaaggcggcagggtcctctgcctaggaaaaccagagacctttgttcacttgtttatctgccaaccttccctccactattgtcctatgaccctgccaagtccccctctgcgagaaacacccaagaatgatcaataaaagaaaaaaaaaaaaaaaaaaagaaaacaaattctaagaggatataaaaggtttatggaaattttatcttgtctagtcaaagctgatcaagattagacagatttgtttgtaaagtttattaaaatcagctttagtattaaaagcacattaatacatatatattatatataaaatatatttttttaattttatttatttatttattttgagacagaactttgctcttgttgcccaggctggagtgcaatggcacgatcctggctcactgcaacctctgcctctcaggttcaagtgattctcctgccttagcctccagagtagctgggattacaggcacccaccaccacacccagctaattttttgtatttttagtagagacggggttacaccatgttggccaggctggtctcgaactcctgagctcaggaaatccacccgcctcagcctcccaaagtgctgggattacagatgtgagccaccatgcctggccaagtgtcttattttcaaggaggatcatggaaagcatgggaagaatgctgacaaataaaggtttctgataactttgaaactgtatcaccggactgggtaaaaatttccaaagtctaatgaaaataaaactggactcataaaattgctaacctccagactaatgttttccatttttcacccactcttctgacttagaatcactaaaaattaaaacggccttttttagcttggcgcagtggctcacacctgtaaatcccagctccttaggaagccaagtcaggaggatcccttgagctcaggagttcaagaccagcctgggcaacatcaagagaccccaccttgaaaaaaaatttttaaaaattagccaggtgtgtagtgcatgcctttggttccagctacctggaaagctgaggtggcaggatggctttgcccaggaggttaagactacagtgagccatgatcacatcactgcactccagcttggatgacagagcaagaccttgtctcaaaaaaaaatccaaaaaactaaaaaccctgcctttttcctaaggccttaccagctaaagctagtcaacgtgactttgaaaaaaaaatcaccacaaaagcttatatttggacaaactttacacacaacctacaatctaggaaaatagattgctattaatcttcccaattgactgccctccagactctaaagaaactagtttatagactataccagatattaagctttgtttgtcttgttccatagaaatgtctctcttattaaatacctgtttgcctacatcatatacagaggcctagctttgagaactcatctacaatgccatcttctgaaatgagacacaacaatttaattgaactggactatcccccaaaatgagaggctggtttaatgggatcctttgccgctcaattactagcccgatttctctctccacagacaccaactcagcttatagtgaaacttctaaggaagtttcagacaaaggaaataaagaagaccagggactcacaccccaaaatatggcatcctgtatgctaatcattttaaattaaaggtccctggaaaccagcagatactggaagcagctttactctgataactaccttatctgcctaaagtccagacctgtcaaagaagacaacaattacttctggtctcttccctgagttttcattaacttacttcagtacaagaagaaagatggaagcctgtcaacacacctggacagatttttgtcagaaaccattgtctgctctgcaggcccaacagtcattgtcccaggccactgtatgttctccaggccactgaatcaccctaaaaatcatttacgatccaccttaaaatcacccacattttcccatctcccatattcctatgaaagagggtatataagcatctgtaccccactgggtcattctcctgcaattccctcatgctatgcacgttaaaataaaatttctatgcctttctcctattaatgtgccctttgtcggttgatttttcaacaaaccctcagagagcaaaggggaagcttttccttggcccctacatgctatatggcagaagggaaagtgctttaagtttatgttccgagcagtccctccacccataccaaggaagcacagcaaggagcttgggacacttcccaaagaaatcccaaagatttctttacaacgtattttttacaattcctttacagtagcccccaaattttatccactttcgcatcttcaggatcaagcagagtgcctagagtgtacactctagaaatgtttattgaattaagaagcggctgacagtgttgtgcaggtagtgtggccagaagagtagtttcaagtcccaggcactcattagttgtatgacctggggcaagtcacctaaatataccgagatccatttcttcaccaatgaaacaggaatattactacttgccttgtctaccttactggctcctcaggagtctttacataatgagcggcactgtaaaacgttatacacgtgtatgtacagttttgatagggctgttaattagtctcaatggtgaaacagaaagaaacctggactcaacagtcaaaagctgttgggccgttgtgcatgggctacgactaacatgttccgttttcccatcttaaacacaaagtttagactcgatgatggttcggaccctgcacttaatagtctctaagtccgctacaggctcggaacctcaggtgtcctcagagaggtaaaccccagggttcccagatacacctgcaagggcagggacagtcaaggtcgcggggtactaacacgcgggaggctcacccagtcaaagtcacacgggttaccgtcttcgcgttgggtgggcagaccgtggcagagcggcggcagtttcctcacgagtaggaaggcagcagagagcagggccgacagaaggtagtaaggttgggcgagccatcgtgaaagtcgcggcaccgaatacacgagagcaattagaggtgccaagaccgccatcttttcggccgtaacggccactgctcgccggcgtcgtaggtctcgccccgcctcccccaccataacgactgctattgggctatatcgcaaacgtacggcctctaaacccggatgtagttctctgaacgctgtggtaggtcagaacccaaaaaagaacttaatattttattggttagtctagttgtcgctttatccgcctaagtcattttattggactgtagcaagcggagctagcagaagactctaataaggttaaatagcacttcctgaacgttctcataaggcgacggaagtagttgttgaaaaaaggtaggcggtgcctgaggcatccaatgacaagcggctccttgagaaagggsgggggggtactccttgaaagcattgtccaatgaaaattaccaacggcagacacggagacagcgccggggcggagggtacgatggagaatttcacggcactgtttggggctcaggctgacccaccaccgcccccaaccgcactcggcttcggaccaggaaagcctccacccccgccaccgcctcctgcgggcgggggacccggcacggccccgcctcccaccgcggccacggctcctcctggcgcggacaagtcaggagctggctgtggccctttttacctcatgagggaactgccaggtgagtactcggccttgccaaagccagccaatcaaatcttagagaggaggtgatgggcgtggctctcagccggctagcggaggtgcgaggtaacctaggcaacgcatacccggactgtggagccctaagtcggaagcgctgttaggattcacaagcagagggatgacttgaattcaaccaggatgagttgaattcaaccaaagggatgaatggcgggcaggggcgtagtgcatctccgttactgtcttttgcaccatgtccaggctgtgtccctgacactggtttatgtctctctaaaaaatgacctagggctgggcgcggtggctcacgcctgtaatcccaacactctgggaggcggaggcgggcgaatcacctaaggtcaggagttcgagaccggcctggccaacatgatgaaaccctgtctccacaaaaaacacaaaaattacctgggcgtggtggcgtatacctttaattccagctactcgggaggctgaggcgggagaatcgtttgaaccccgggaggcggaggttgcagagagccgacattgctccactgcactccagcctgggcgaacgagactccgtctcaaaacaaacaaaatccagggtttgagtttggaactcgagaggcctgatttaatatctttggggacccaaagttttagttacaggtctcccacagacttgctattggtttggggcaagttgccattcttccttctaaggttccggcatttcctggtctgatcaaaaaagggataagaatcgaaccaaactcttcattcaaaaaattattttgttgagtacctatgtaccaagcacttttctaaatgctggagacagttgtgaacaagactgacaagatgcttgccttttttgggatgtacatttcagtggaggaggcattgtaaacaagataatgtcagaaagtggttaatgctaggaaaagaaaacatgataaaaattgaaggtggccaggcgcgttgctcacgcctgtaatcccagcgctttgggaggccgaggcagaatcccttgagcccaggagtttgagaccagcatgggcaacatggcgagacccagtctctacaaaatatacaagattaaccgggcgtggtaatgcatgcctgtagccccagctactcaggaggctaagggaggagaatcgcttgaacacaggaggtcgaggctgcagtgaaccaagattgtgccactgcactccagcctgggcaacagatgagaccctgtctcttaaaaaaaaaaaattgaggggcagaactactttagctagagtggccagagatgctctcttcacatagctaacatttgaactaaaatgtaagcatagacaaagggccagccatgtatggacaggagggagagacaattgtagatacaagaaatgaggtcagaaaccctgatgtgagaaaaagcttagaatatctgagggacagaaaatcagttggactccagtgaagtgaacaaaaggaaagagtgttagggagagagatgaagctgggagagttaggcagaggcttttataaagcartaaaggcatttagattgtaaatacaaaaggaagccatttaaaaaatttttttatagacacaaggtctcactgtgtcacccaggctggactgcagtggtataatcatagctcactgtaacctccagttcctaggctcatgctgtcgtcccacctcagccttccaagtagctaggactacaggcatgcaccaccacagttggctaacttaaaatttttttgtagagactgggtcttactgtgttgcgcaagctggtcttgaactcctggccaacagcagtcctcccgccttggcctcccaaagtgctaggattataggtctgagccactgtgcccagccaaggaaagccattttaacataggaagttggtcaaatgcacttgtttataatcatttaagcagccacatgacaaatagaaagtggggaaattagtcagaagttactgctcagtagtccaggaaagataatggtttgaaccagagcatagcagggcatagagaagtaaatggatacaggatgttagaggtagagctgacagggttgaaaaatygaatacagggccaggcgctgtggctcacgccagtaatcccagcactttgggaggctgaggtgggaggattgcttgagcccaaaagtttgagaccagcctgggcaacataatgagaccccatctctacaaaaaataaaaataaattagctagggatagcagcatgcacctgtagtctcagctrcctaggaagatgaggtggtagaaatcacttgagcccaggaagttgaggctgcagtgagccatgattgtgccactgcactccagcttggatgatagaggaagaccctgtctcaattaaaaatatatattgtatatagaagtgaaggaaatagaggaattgatgcctttttaagttttcggcttgaataattgggtgtatgggtacggagacttggaagatgaggaaggaacaagtttgaagaggtggaaatcaagagttattttggacatgtttggtctccaagatgcctcttttttttttttttttaaacagagttttgctcttgttgcccaggctggagtgcaatggcacaatctcagctcaccacaacctccgcctcccaggttcaagcgattctcctgcctcagcctcccgagtagttcggattacaggcatgtgccaccacacccagctaattttttatttttagtggagacagggtttctccctgttggtcaggcagatctcaaactcccaacctcaggtgatccgcccaccttggcctcccagagtgccaggattacaggcgtgagccactgcgcccagcctcccagatgcctttcattgtctcaagtcttatttccacatcatgacttgagggaaatagcaacaaatattggtatagtactttgaagttcacaacacacttacatgcagtatttaatataagtagtatttaatacttagaatagccctttgaggtagcattactgtctacattttataattgaaaaaactgaaacatggagaagttgacatccctttgattagttagtggttgatgtccaccagcggtttcttttaatctttcttttgccttccctattctgattgtagctatttgtatcagtcagttgacagatattgaatatatgttctgggcaaatgctgggtgtatgaggcgggtgagatggagagagagattagtaatgctggtcattgcttttcaaggagtttagttaggaatgtaaaatttgtggtttaaggatagtgactatatttcctgtcacctccatctcattttgtgctcatgcctcacaacagcaattaacaatatcttagccatcaatattaagaactacctaatggttttcaaagtgtgttgctatccagaatgacagtgagaataagatgtcacttgagctagaccttgaataatccatattggtgaagaaaaattaggaagaattttcctaagatgaaataatgtgaggggtgtttttttgaggcgataaggagatccatttggatggatcagaaattttgcataggagagtagtggttgatgaggccccaaagctaagttggagtaagatgtaattagccttgagtgccagtcaaaggaatttgagctttctcctgagggcaaaaagaaaccattaagatttgtgaactgaggagtactgatttccaaaaatatctggaacatgtgggtgccatggattgaaatagagaagccctgagtgatgttggcaagatttggaatttcaaaacaattttttttttttttatcttgttgggcagggtggttcacgcctgtaatcctagcactttgggaggctgaggcaggcagatagcttgagtccaggagttcaagacyagcctgggcaacatagggagacccctgtctctacaaaaaatacaaaaattagcctagcatggcagtgtatgcatgtagtcccagctacctgggaggctgaggcaggaaagtagtttgagcccaggatgcagagattgcagtgagctaagattgtgccattacactccagcctgggtgacagagcgagactgtctcaaaaaataaataaatataaaaagtaatctttgtagaatagtcaaaactggaatttgaactctcaagttacagtttagaaaaagcacagactgccttctcacctgagccttaaggataaccatctggacagrggagagttggcagagcaggggaaattcagaagattgtaatggcaagaggcagtgcccagagttatgaggagagatactgtgacattgggtctcctgccattaccctcgctcagtcttctgagttgtttggtagtaaagggaaggaaaaggatgaataaggcctagaggtatagagggaaagtgccttgtttatttaataaatatttattaagcacctaatgtgtgtactgtgctgggcactagcgatacatgaatgaacaagacattgtctgtgcctccaaggagcttacagttcagtacctcagttttcccaagtgaatgattataaacaagccatttttgtcatttgtaccctctgtgtctatcataattacaaatgaagttgtagttagctatttctacccttgctagtaggtccttattaagttactaataaatgtatattttttaaaaaagaatcagccatgcaatatttatatggatagtgccttgcatacatataatacttttttttttttttttttgagatggaatctgactctcccacccaggctggagtgcagtggtgcaaactcagctcactgcaacttccacctcccgggttcaagcagttcttctgcctcagcctcccaagtagctgtgactacaggcgcatgccaccacacccagctaatttttgtatttttagtagagatggggtttcaccatattggccaggctggtctcaaactcctgacctcaggtgatctgcctgccttggcctcccaaagtgctgggattacaggcatgaaccactgtgccaagcctgatactttatgcttttcagcatattttcatttgaaccttgggagaaaattatgtgtatgtaagatagctattattccattccacagataagaggaaactgaggcatggaagacagccagaataattctagttgcctgacttgtttttttgtttttgttgttttgttttgttttgttttttttgagacagggtctcactctctcacccaaactggagtgcagtggcctgatctcagctcactgcaacctccgcctcgcagggattacaggtgtgtgccactactgtccagctaatttttgtatttttagtagagacagggtttcaccatgttggccaggctggtcttgaactcctgacctcaaatgagctgcccgccttggcctcctgaagtgctgggattacaggcgtgagccaccgcgcctggccattagttgactgacttctaatcaaacatttcttcctggatgcgtgctgtggctcacacctgtaatcccggcactttggaaaaccgaggcggcggggggtggcggatcacttgaggtcagaagttcaagaccagcctactcaacatggtgaacccccttctctactagaaaaaaattagccaggcatggtggtgtgtgcctgtgatcccagctacttgggaggctgaggtgggagaatcacttgaacctaggaggcggaggttgcagtgagccaagatcgtaccccgctgcactccagcctaggcgacagagcaaaactcccgtctcaaaaacaaaaaacatttattccttttaggcaaggcatcatactcagtatcacgaggaagaataaagatgttggtaacaagttaggcagtggtagctagaaaaaaatctcccagttcttttcttatgtaaaggtgattagtgtttcttgctagtaaaaaaaaaaaaaagtccttgacaagacccttaagtcactgggtcatatttggccccctgagcatggttgtagctgagctgcaaggtcgtattttcctagctgtgtcagagaatataatttttcactaatacattttatgagaaacactcagaacagcatttaccacgaagcaagcatcatataaatcaactccagttaatcttaagagagtggagtgtctccttcattgggctagagcagttcctgtctctgccctattggatttttgcctgtttttccccttcccattggaacctaccattgtgttgtattatacttttcatgttatttacttttgctgtttttttttttttttttgagacagagtctcgctgttgtccaggctggagtgcagtggcgcaatctcagctcactgcaacctccacctcccgggttcaagtgattgtcctgccccagcctcctgagtagytgggactacaggcacgtgctaccacgcctggctaattttttgtatttttastagagacggagtttcaccgtgttgttagccaggatggtctcgatctcctgacctggtgatccacccgcctcagcctcccaaagttctgggattacaggcatgagccactgcatccggcctgctctgtttctttaaaaataaattttaaattttaaaatctgcacttaaaaaatgtcttatttaggttaatatatagtccttcactccctgggtctactttgaagactgatcttttttatttttattctgcgttgtctaggtagcacagagctgacaggcagcacgaatctgatcacacactacaacttggaacaagcctataataaattctgtgggaagaaggtgaaggagaagctaagtaacttcctgcctgacctgccagggatgattgatctgcctggttcccatgataacagcagcctccgctctctcattgagaagccccctattctcagtagctctttcaatcctatcacagggaccatgctggccggcttccgcctccacactggcccggtgagtcctgttggaggaagaaggcaaatggggaggcctaaacatggagatggtttttctctccaagtctgttccttcataatggagcagaatggatgataagagcaggagagatttcctccctctactcacctggaccttcctttggttccttcagttgccggagcagtgtcgtytgatgcatattcagcctcccaagaagaagaataagcacaagcacaaacagagccgtacccaggatcctgtccccccaggtaagaagcagttytattcaaagcmaaaaaaaaaaaaaaaaaaaaaaacctgaccttctgaatctggtttgaacttccataggtaaacccagttaagttccgtatggagctctggactcctaaattcccctgaagaaraaaccaatgtactgtggtctcttgggacttgggacagggactctagcagcacctctgtatcctttctggccatttggacaaaagcagttgccccgacttgggattttcctgtagtcttcagtggttcattaacagtagaggattttgagctttacaggtgataggtacctaatgtctcctacagaaacaccatctgattcagatcacaagaagaagaaaaagaaaaaagaagaggatcctgaacggaaaaggaagaagaaagagaagaagaaaaagaaggtagagtagaggcctattgccacaacccagtgagtttccccagatctcacccctgtcctaaataccctagagttctttgcctcaagttggacccaagattgaaaacccaaggcaggttgcaggtttctcctgtacagcctgatcaaagccaaggctagttcctagttgttcttaccctgcttctttctcccccagaatcgacatagtccagaccacccaggtatgggcagctcccaggccagcagcagcagcagcctacgctaataggaccactggactctttgccaggatggcttttcctgctgtactgaacctgctgataaaagctgccttccaggctcttggacactgccttgggagcatcctgcagctgggacagaggccagctcctgttgggctcagttgagactaagtaaattaggagagagagggacatgcttttgtaggctcatcccagttggttttctcatggacatctcttcctctcccaggaagcttacmattttcttctctctcttttgtgcmatttgtctgatttaggacttgttctgtgttttctttaaaaaaaaaaaaattacatttatcaaactggctgaagtgtgactgcctgttaagaggtatgtgcctttctgtgaatcaggatttaagacaaggcattcctaagacttgaggggatttgggtcttgtcattacatgatctcactagcaggcagggaaccaaccaaaatgaaaagtgacccaagcttactaatactccacagcagacacgtaacactctgcccattatgttgagaaccaagcgcctcggtgatctcaggctccatctgaagagctgatccaggtagggctcaacagtgtattctaggtcaattttgtgtcgaaagagaatagccaactgaaaacacatggacagtcacccatgtgtttcaacaagattggttctttaggtcagaagcctgtgatcttttgagatgaacttctggcaagcaaaggtaaagcttcccttctctttacaagaacttttgacctgcttcggtccttagttaagacaataaagttatttagctgatgtgaaaacatttctaaaacagcaacaaaatgtagcctaaaccatcaaaatgtgaaaaacaaaaacaaaaaacacttttagtttttccagctggttaggtaactgaaaacatccatgagaaaacctgaattaatgtaatctgactttaaatttaacacagttaaaatctgttgccgtgaaagccaaggttgttcctgaatcagtgggtggaaaaccactcattcagctggtttaaatccaggatttcagaataagagtttgctgggtttttttttttttttttttttttgagacagagtcttgctctgttgcccaggagtgcagtggcatgatctcggctcacggcaacctctgcctcctgggttcaagtgattcttgtacctcagcctcccaagtagctgggactacaagtgtgcgtcaccacacctggctaatttttgtctatatatatatatatatatatttttttttttttttttttttaaattttggagaaagagtcttgctctgtcgcccatgctggagtgtagtagtgcaatctcagctcactgcaacctgcacctcctgggttcaggtgattctcccacctcagcttcccaaatagccaggattacaggcacccataaccaacgcccagctaatttttgcatttttagtacagacggggtttcaccattttggccaagctggtcttgaactcctgacctcaggtgatccacctgccttagcctcccaaggtgctgggattacaggtgtgagctactgcacccaaataagagtatatatatatatatatatatatatatatttttttttttttttttttcctgagacggagtcttgctctgtcacccaggctggagtgcagtggcgtgatctcggctcactgcaagctccgcctcccaggttcacgccgttctcctgcctcagcctcccaagtagctgggactacaggcgcccgcaccacgccaggctagttttttgttatttttagtagagatggggtttcactgtgttagccaggatggtctcgatctcctgacattgtgatcagcccgcttcggcctcccaaagtgctgggactacaggcgtgagccaccacgcccggctaagagcttatattcttaaattttgagtaattaaagggctctggtcaactgcttgagatttagtgtctaaggatacctatttaaaattagagcacagcttttgtccaataaaatgcaatatatctaattgaactgacaccgatatctagttaacctgccttcaacaggctttcatacctgttactatgtcacctttggctgtttccaaaattagctttactttccagagactaaatcctgtattaaaaaacaactgtagctgggcatggtggctcatgcctgtaatcccaatgctttgggaggccaaggcaggattgctcaaggccagaagttcgagatcagtctgggcaaaattggttgagagtctatctctaccaaaaaaaaaaaaattagctaagcatggtggcatgcaactgtaagtcctagcttcacagaaggctgaggtgggacgatcccttgagcccaggaatttgaggatatagtgatctgattgtgccactgccctccagcctgggcaaccagaatgaggccctgtctcttgaaagaaacaacttttaagagttctctaagctttcaaataacaagcagttttggtgatttcaagagaccttttttcaggaatttttgaattaaatcacccaaataaaaacaggacctgttgtttttagaaatggagtctctatgttgcccaggttggtctggaactcctgggctcaagtgatcctcttgcctcagcctccctcagtgctgggattacaggtataagccaccgcactgggtctcttttttatttttttagttgttaagtggctaatttcattatagtcttgcctaaagatgggctgggaccagagaagtttatgaggttgtcactgataacttcccaccagagatcgttcaccctgtctcaaccagacaaaataacacaagtcagggggcgctggttagatcaggatttctttttattcctcgttggtttaaaatggctaatcagaataaaaaataaaagggcctctttgtggaggctgggatctcccctatttagaggttagaacccaggtatcccctctacccagcaccatagtgaggtgggctgaggggtaacccccaagggacaatcggaggggcctaggcctgccactccttctctctatcccccgtttttggcatgtgatgaaaaatattgctttttggattcttctctcctggccttggattttaaaatcaagttaactgtgtaagctaggggaggctccaaggggccagtaggagcacactctaatccctctcccccaaggaggggattatccaatattgtttgagctaggccaagttattttcctgatctcccaccaccaccagtgtcttgaagttttgacccctttcctagggaaactaaatgccaatgagcctagaaaactaattctcctctccaagtccttccctcttgtgaccaaaattccagactcgcctctccccaggcttcttcctaatcacacttagcaccagcagaggatgctatttccgtagttagtaactgggacaaatgagagggaaccacaggaaaaagactgacgtctcccctcttttcctgctggtctgaggaatgggaagagtaagatccccctccgtatatgtatccctccctcattttcccatcccaggatagatatataatttctttgatatttataatatatatatatatatattatatgtacacacacacctggtaacgcagaagaggaaaaaaatagaatccgtaacaataataaaaaaaattatttctggtttaaaaatgatctggttccctccagggcgagcaattgcacaaatgtccactgagtctggtccagggatcaaggaagggaaggtcttaaaagataaaagggggggttgctaccccagtctcagggccccaactctccgactccccaagcctactgcattttagaaaacactcctcatcctcttggaatcggtggtttaaaaaatgtccatgcacgggaggggagccccttgagggaaggaaggtggccacctggggccctttggtgtaggcgcagaggcgttggggaggggaggtgccgaaggctcacaccgaaatctcataggtggtaccaccaacccctgacaccttcttgactcctcccctcgtggggctactgagaggtggctggcctgggccaggggaggctgagcctaagctcttgggctgcccgttggatttgctgtaggtggtcttcagctgtacttcatctctggaaagaagagacaagacgtaggtgtcaggaaatgggacagaaaacattggaaagggagacagtttcaaaggttcagagaaaaaaatgatgttcttttctatatccatactttcttacccaaacattcccctttattgccctgcttaaaataagcctgattcccaatctctcctatgtactactactctctagtaacagctatcacatgtacttactcccaagcaaatacttttaggaagatagcattatggaaaaagtattaatcttcagtctcttaacaggaattgcccatgaaggcaggtagagtcaaagtgaaaataaagagctaccaggatacccctgggtccacctacattaggatgtacaacagaagccctgatagcttttgcagagcagtatgctaatttgaaattggctaagggtcaggatagtactaatacttacttgggtgtcagtaatggctgcaaggccacttcttctgtctcagagacaccaggttgggctttttggctgctgtaagacatcgatcggcccaggtatggggctgttgggcctggttcaggggaccctactccccggccccttagcccatctggcttgccaaaacgggggacagctgggcgtcccagtggagtcttgcccaaaggtgatctctttgaatcatctgaggaggaactagtacgaggggcatggcccgagcctggtgttgactgaatgcctgagtcccccaagcctggttcttcctcacggcccgggagtgggggtgactggcgcagcaacttctctcgttcctggagagaggccacaatgtggcgcgacagattgtcgtaacggactggtgagggctctcggtgtgttgggccagttggcaccaaacgtgggtgcctctcagcttcccgttgctgggccagcctggctgacaggaagggagaggtatagcctaaaggtgggtctggctcaggccctgcctgcactgactcaaaatcagggctgtctgaaggtgtgagcaagctgtcataagataggcttccattgcgtgtctggttggccaggctcttataggaggtggaggtggtgccctctgaacgaatggattgcaactggcccagctcaaagcctgtgccctgggctgacttgaggctggaggagcgtgagccactggatagtggatcgaagtgaaaacttttgccaaaggtaggagaacggaagctctctggttccaagctgggctctgagcggtagctggggtgacggctgctctctgcaattgaggttggctccttcaagctgtccccacgactcaactgaggaagaaagtaaagcaggctcttagtgctccttttgtgacagaagctagaccccagagctcaaggagttggtcaaaaagagaattatgtgccaataataagcttagaactcttacatgcattatctgggttaatccctcaagaaaaactgaattcaggcaaatatcatctccttttcagatacagaaagcaagacgtagaaaggctgagtatctcgcccgtgggcagaactgggttataaactcggatcaagcactaatctattatgctatattgcccagtctgatgaaggacacagtatcaaggagattgagttccacgaatgccaacaattagtgaaatgtcctttcttctgccttttccttcccctaatcttctttttttcccgtaacagttggcatttgtttgtgtgtgtgtgtgtgtgtgtgtgtgtgtgttttaagcccaggctggagcgtgatggtgcaatcttggctcactgcaacctcagcctcccaggttcaaacgattctcctgcctcagcttcccgagtagctgggattacaggcgccccgccaccacgcccagctaatttttgtatttttagtagagacagggtttcaccaagttggccaggctggtctcaaactcctgacctcaggtggtccgtctgcctcagcctccccaagtgctgggattacaggcttgagccactgtgcttggcctttttttttttttttttttttttgaggtgtagtctcactctgtcaccagactggaatacagcagtgggagctcagctcactgcagcctccacctcccaggttcaagcaattctcctcccaggttcaagcgattctccttg

SEQ ID NO: 98128 - DNA, 16478 bp, Homo sapiens
tttcttaatcctccaccatccctatgggatgggacctattgttgtctgcagaaatcaaaacacagagaggatggatagcttgctcaaggttaacacaattagtaacccatgggagctgagatcccatcacaggaagacaccagaatcaatgattttcactgctagtccatgtcaccttccaaacaagagcagagagaaagaggggaagggattgtgttagaccagcatttgccatgctttcttctgctgctagagagagtggtagatgctcctcagggaaaatcaaagcaaaaagaaaagaaaacaaagggaggaaaaaaaaaagtcatggtcaaataggtttggaaaaaagtgagttaaatgaagtttaagcaaggtttaggtttcttgactatctggtttctaaaatctatttaaatgctaatgaagttatatatctgtttttgttttgttttgttttgtttaattttattttccttactatagagacagaatttaatatgttgcctaggctggtcttgaactcttgggccgaagtaatcctcccacctaggcttcccaaaatgctaagattataggcatgagccactgcgcctggctgaaactgtatatctctaagagggtaaagagtaggcttttttgtggagcaaccttagccagagaatatcctttctcccaaccccacagaaaaccctatccatgtcacgggagaccctagttttccacagaacacaatgtggagaacctgatccagatgaaccccatcattgtcagttgaaactgaggcccagagagggaaaactacttgctcaggtctcagtggggactggaagatgcaggtcacagccagctccacaacttcacacctcccggcatctctgctgatgtgcgtccatccccctggctcatcttccctctttttttttttttgagacggagtctcgctttgttgcccaggctggagtgcagtgacgcgatctcggctcactgcaacctccacctcccgggttcaagcaattctcctgcctcagcctcccaagtagctgggattacaggcgtctgccaccacacccagctaatttttgtatttgtagtagagatggggtttcaccatattggccaggctggtcttgaactcctgaccttgtgatctgcccgctacgggctcccaaagtgctgggattacaggtgtgatccaccatgcccggcgtcatcttccctcttactttaagacattgctggagccgctgaaccaggaaggggctctagcaggaatcagaggacagtgtgagcatctttacaaatcccagcctacttttaggaaatagtgagggcatcgaattcaggaaccccaggactctgggtaagaccccagtgggtggtgggaaaaaagccctatccctgtcttcttgcctcctgtcctctgcccaattacccaggtgccctcggtactatcactgagaaagatggtactgccaagggcagggggtatttttagtgtgtgacaggagtgtccacttttcttactgcctgagtcatgccctgagccctatttggggattgttttctttgtaactacaccccccaaaaagggcaggagcatgaaggagctaacccggggcccccacacacctgtttttgtagatcctccagtatatacagtacttaaataggaaactccgagttaagatgtcataatctacccccatgctcccgggggcagttggagagtcagattgctcagcagaggccagggagagtacggctccattcttcactcaaggaaacgcttccttgcccaggcccaccttttccaaaaaccacaggctggtagagctggcaaagctccagagaccagttggccctggggttcccaaatttcagccatttttatacaccacctctataattttgctacatctgcactgcctatattccagtttcctgaattacttcctttgaatcaacttatttttaagttcagtaaatgtatttttaaaagacactgtatcactgttggaaatggaaactcagtatcacttaccagagatagaaagtaactgtaaaaataaatacaatggaaacaaaatggtgttattcaattctatctagatacttctgcttgcctaggctctcaggggagagtagcaattgttccataggtgttctaggatgccagtataaaactgtgaccaggcactgctcatgcctgcaatcccagaaccttgggaggccgaggcaggtggattgcttgagctcaggagtttgagaccagcctgggcaacatggcaaaaccccatctctacaaaaaaaacacacacacacacacacacacacacacacacaaaaattagccaggtgtggtggtaagcacctgtagtcccagctactcaggaggctgaggttggaggatcacctgaccccaggaggcagaggttgcagtgacctgagattgtgctcctgcactccagcctggatgacagagcgagaccttgtctcaaaaaataaataatacaataaaattgtgaccacctcagtggcttaatcaaaaagaggcaacatgactgaaaaggcattatgtgattcaatgttctttaaagccaaagccagaacctaccgaggggcatcaggtgaacaccatccaacgtcatgtcaatgtagcccaaccatcccagctttggggaagcacttctctctccttcgtgattgggccccatgtccaagtaggagccaagactgaaccacggacttcctgactcccaggccagagctctctgagggtggggtcttcacctcatgctgggctggggcatgaccaggtctgcttgtcttctctttccagagatggagcagaaggaagggaagctctctgaggatgggaccaccgtctccccagctgcggacaaccctgagatgtcaggaggtggagcccctgcagaggagaccaaaggcacagctggaaaggccatcaatgaggggcctcccactgagtcaggaaagcaggaaaaggcaccagccgaggacggcatgtcagcagaactccagggggaagcaaatggattagatgaggtcaaagtggaatctcagagggaggctggtgggaaagaggatgctgaggctgaacttaaaaaggaggatggtgagaaggaagagaccactgtgggttctcaggagatgactggcaggaaagaagagaccaaatctgaacccaaagaggctgaggaaaaggagagcacgctggcctctgagaagcagaaggctgaggagaaagaggccaaacctgaatctgggcagaaagccgatgccaatgacagagacaagcctgaacctaaggcaacagttgaggaggaggacgccaagacagcctctcaggaggagacaggccagaggaaagagtgcagcactgaacccaaggagaaggctactgatgaagaggccaaggctgaatcgcagaaggctgttgtggaggatgaggctaaggctgaacccaaggagcccgatgggaaagaggaggccaaacatggtgcaaaagaggaggctgatgcaaaagaggaggcggaggatgcagaggaggcagtgagtgaggcaggaaaggagcaaggaggctctgtcgtctcctgcttctggaagcaagccccctctgcttcagtcagttgggaaagtccagttttcctcctgatgatttccagagcccagggtgggggaggggggacaaggagtgcagcaccgtagtcccaggctgcctttcagaactttctgaagtcctcatgaagccagggcaggtgctgtgtgaccatgagctcacgcagatcatgctcattccaggagccaggcagtcccagcgaagagcaggagcaggacgtggaaaaagagccagagggaggggcaggggtgattcccagctccccagaggagtggcctgagagccccactggggaggggcacaacctcagcacaggtgagtgagagcccagagcccatgggatgctgcagaggccacctgggggaggggcgcaagaagcatgccatggatagccccagcttccctccctcctttcactttcctccagatgggctgggtccagactgtgtagcttccggacagaccagtccttcagccaggtaatgtcaaactctggggctccagctccaattccccctacctcctgcttccctcagcgtccaccatcaactcagtctgggttcccccagcacctgatttcaagatattcgaggattcctggcattcagcttcctatcccagggcagagcccaggaaacaaaagaagccagaggcatggtcggctgcagtggctcacgcctgtaatcccggcactcttggaggctgaggtgggtggattacctgaggtcatgagttcgagaccagcctggccaacatggtgaaaccctgtctctaccaaaaatacaaaaattagctgagcgtggtggtgggcacctgtaatcccatctactcgggaggctgaggcaggataattacttgaacccaggaggtggaggttgcagtgagccgagattgcgccattgcactgcagcctgggcgacagagcaagactccctctcaaaacaacaacaacagcaacaacaaaaaaccagaggcagaaaggagcacgaaggatacctggtccacttcccatgccatggctgaagtctgccctgtggcatccctgacacttcacaggagctccttatctttcagctgaacatgtttccatggtgccagtcatccaaaaagcatgatcagaaagcccgagttgggacaatggttctgccatgtaccagctgtgtgaccttggccatgtcactgaacctcttctcatctgtgaagtgggcatagcaattgtatctacctcgtaggattattctcaggcttcaatgagtaacaagtgcaaagcactttagcccagtgcctggtccctggcaggtgctggataaaataagaggcttatgcttgccattgcacaacttcagtcattagaaggattatctggagctgaaatctgcctccttgtcctccccccattttttttttttttttgagatggagtcttgatctgtcgcccaggctggagtgcaatagtgcgatctcaggtcactgcaacctctgcctcccgggttcaagcgattctcctgcctcagccttccaagtagctgggattatatgtgcgcgccaccacgcctggctaatttttgtatttttactagaggcagggtttcaccatgttggccaggctggttttgaactcctgacctcaggtgatccacccaccttggcctcccaaagtgctgggattacaggcatgagccactgtgcccggcctccttgtccctttcttagggaaagataaccagtgaatagtcacccagcaggcacagctggatgctttacattcaccttcttacatagggcaggtaggtattcttgtcctcattttacagatgaggaagctaaggctcaaacaatgtgacagtcccaagatcacacagcaaataagaggcaaagccatgccaagcgcagtggctcacacctataatcccagcactttgggaggctgaggcgggtagatcacttgaggtcaggtgtttgagaccagcctggccaacatggtgcaatcccatctctactaataatacaaaaattagctgggtgtggtggcgggcacctgtaatcccagctactcaggaggctgaggcaggagaatcgcttgaacccgggaggtggaggttgcaatgagccaagatcacaccactgcactccagcctgggcaacaagagcaaagctctgtctcaaaaaaaaaaaaaagagaagcaaagccaggttccaaactcaggtcagacctcagaggtgtcctagctctacccacatgtcctcaccagaccacattctcccccaagttagactgagactcacgattccttctcaatgtcctcccagtgctgggcacagctgcacacacccccttagactgcagtgccacccaccctccagccccacagccccctccctgtgtcctgcagtgctggtcccagcctctctcacacgtctttggacttctccatatagtgagtcttcacccagcgacgtgccccagagtccccctgagtccccttcctcaggggagaagaaggagaaggcaccagagcgcagggtatcagcccctgctcggccccgggggcccsgggcacagaaccgcaaagccatcgtggacaagtttggcgggtaggacacaggccaggggctgggctgggctttcccataggaaccctgggttggtgggagggtggcctcaggggcagtgggaacagcccaggccaaggcaggaggactgacacctgggggctggggatcctcccagtggggcccttcatrgcctcctgcctctctggcttggccttgcacccctctcccctcacagggcagcttccggccccacggccttgttccgcaacactaaggcagccggggcagccattggtggtgtcaagaacatgctcttggagtggtgccgagccatgacaaaaaaatacgaggtgggcatggggcagagctgcgtgggtggggcaggggtccagggagggtccaagtggtgcaaaccccaaagggtgggagggtgggaagggggccaagtccaggccatctggctgagcctcactgaggcctcctctgtgccctgcctgccatagcatgtggacatccagaacttctcctccagctggagcagtggtatggccttctgtgccctcatccacaagttcttccctgacgcctttgactacgcagagctggatcccgcaaagcgccggcacaacttcaccctggccttctccacagcagagtaagccacagccatgggctggcagagctggatgggagcctaggcgaggactggattcacaggggttgagtagtgaggcagttacaccgatgctggtgccacacattcatgtatccaacagacattttttgagggccaggcactgtttcaggccctggggatacagcagtgggtgaaaaagacaaaaatctctgcttgagtcaagcgcagtggctcacttgtataatcccagcactctgggaggccgaggcaggagaatcgcttgaggccaggagtttaagaccagcctgggcaacatagtgagacccccatctctacaaaaaatcaaaaaattagctgggtatggtggtggatacctgtggtcccagctattcgggaggctgagatgggaggatcacttgggctcaggaagtcaaggctgcagtgagccatgattgagtcactgcactccagcttgggtgacagagcaaaactttgtctttaaaaaaaaattacaattttaaaaaatgaaagggaaacttgcagtctggacttacagctctaagtgaatatcagaagggcaagcagctctgctctcaccaagtgctcctgacctgcaggctgtgaaccaactgtcctgctcctgcagctgcctggactctggttctgagtcaggcagagccactggaaggtgggaggagtcatcagatgacaaagacaggccgacaggaggcatcaggcagctgaaagcccaggaggtcgtggggatgtgtggagaaggagagaggagaatagaagctgaggtgcctgggtttgaatcctccctgcttctccctagctctgtgaccctcgccagctggcttaacctctctagaggccccacatcacagggcttgttgtgaagattaagtgtgaagaggaaagagtgtctgccacagtcatcacaccccactgcccattccagaactctcctccgattcccatggagtccggggatgaggggagggagtggccaatgccgaagcccccagtggcgaagcccttccccacccacgccccaggctcaatgggaatgaaggttttgcctctcccacgtagagggacagcaccctaacccaaaaccatggggcactgcattggttgcagggagcttgtcccattctccaaaatcctccagtgtgtgtccttcccacagctcccagtctggcgtggattttggccctgcagtctcagccccaagggaggatttcctctggggccctggtttctcctatgccagcacctatggctggctttggtaggcagggactgctgagacccagcttcagagaaagggtgccagaggtgtcagacaggcccccggggttgtgttgctcactttggccttgggcaaaccaccaaaacactctgagtctcygcttcctcttctgctggctgaggatggaggggaggagtctatgagaacgtccaaggggaagcacctgataaagcatgaggtgggcaggaggtcccaacactgattagctcagattgtyggcctcagcaaagccagtggtgtcacagagccccaaagggcagctgcgaagttagaaaaagaggacttgttgctaagtgccagcagctcctgaaacacaccaagcattcctgcctcggggcccttgcacctgctgtttcctctgcctggactcctttccccagatgtgcacatgacttactctaagaggcctaccctgagcaccctattaaaaaataccacagctgggtgcagtggctcacacctgtaatcctagcactttaggagaccgaggcgtggggatcacttkaggtcaggagttcaagatcagcctggccaacatggtgaaaccttgtctctactaaaaatacaaaaattagctgggcgtggtggcacacacctgtaatcccagctacttggaaggctgaggcaggagaatcacttgaatccgggaagcagaggttgcagtgagccaaaatcacgccactgcattccagcctgggcaacagagcaagactccatctcaaaaataaataaataaatacattaaaaatatataaaaaataccagatctcctccaacataagaacataccctgtctcccttcctgccttattttcctccttagcacctctcaccatctgatgtaccatctactttgtgtgttgcttactgtctcctgccacaagaatttctatgccatgagagtgcagaagttttggttttattcactgatgaattctcagagcctggaagagggcctggcacataataggctcctgataagtacatagagactgaatgagtgatgctcctggagatgctgcagctgcaagccaggactctggctaggatttggtttctgtcctttatcttttttttttcttttttttttttttgagacagagtatcactctgttgcccaggcaggagtgcagtggtatgatctcagctcactgcaacctccacctcctgggttcgagtgattctcatgcctcagcctcccgagtaactgggaatacaggtgcctgccactatgcccagctaatttttgtatttttagtagagatggaatttcaccatgttggccaggctggtctcaaactcctgacctcaggtgatccagctgcttcagcctcccaaagtgctgggactacaggcatgagccaccacacctggcccctttaaattcttcctgaggggcctggtctaacagaagctccccggttccagaggacagatacatacgcatgtggaagtggtgggttaatgtagaactagagaccagagggtcctgckcccatgtgaggacaataagtgcaatgaaaatgtgggcttggaatcagacccagctgggtttgagtctttttttattttaatttttgtttttattttttggagaagctcccattctctgaaaaggtctcactaggttgtccaggctggtctcgaactactgagctcaagggatcctcccgccttggcctcccaaagtgctgggattataggtgtgagccactgtgcctggcctaaaactcattattgaattattcactggtgttggctttggggttacctgtctacatcctgtgacctacctaaaggaagccacagcacctggcctgggtttgtcttaactctgttggggtctcagttatctcatctagatatataatgggatgattggcttagatgatctcccagccccaacatcccagcccatcctatgggcttcgtcattgctgggctgcctgcacccatccccttggctcccatatccttcacctttgaccttctgctcctcattccaccccattccttaggaaactggctgactgtgctcagctgctggacgtggatgacatggtgcggttggctgtgcccgactccaagtgcgtctacacatacatccaggaactgtaccgcagccttgtgcagaaaggactggtgaagaccaagaagaagtgaggaggtgactggctctgtgggcagagatgggcagggtgcccagctcagcagccayggcccgggggttcccttctgctccatggaggcaccagagccagrggcttaggcaagggtgtgtggcgttggttttaactgcattaaaagtacttttgtaaaatcctgtctggcccctcagtgctctctccatacttggcccaggaacctctgcactctgggataataaactctggccataggggattcctcacctgctgaggtctcaataactgcgcaaggtgtttgggaaaggacaatggcctggttcccaccactaaccagctgtgtgacacatacagttaacctctctgggccccagtttacagtctgaaaggggataatgagagttccaaccttatgaaggtgttgcaagagttaaacgagataatgaaatgggcaaaaagctttgcccagtcctgccactcaagtgttcagtaagtggtcgccaaaaataaaaaacttacattttgactctggtggcacttcttctggttatcttcccctcttttcacacttcttctcaggttaggggactccagggcaggagctggagaagattctctagaaactagtgggatctgggtgacttccttgactcaaatcaccccatattctatctctgaaaagccagcagtattccaggagcttacaacaattgcaaccagaaagttcttcttctgggttaagttaatcccttaactgaagttaatccctggctgaagttttggcttgtttttgtttttccattgctcatgagatacaaacccctgagctgattacaatttcctgctaactatccagtctggctttatcagccatttggggcatgtgtgctgatgaaagcagctcatgaaaaatacagaaaacaaaacacaccccagccataaccctggctcacctgcaggggtgtggattggcagagtggaccccagcaatccactgaagtgctctgtgcctcaattgcctcatctttaaaatgggggtgttggccgggcatggtggctcacacctataatcccagcactttgggaggctgaggcgggtggatcacctgaggtcaggagttcgagaccagcctggccaatgtggtgaaaccccatctttactaaaaatacaaaaattagccaggcgtggtggcgggcatctgtaatcccagttactcaagagactgaggcaggagaatcgcttgaactcaggaggcggaggttgcagtgagccgagattgcactgctgcactctagcctgggcgacggagtgagattctgtcttaaataaataaataaataaataaataaataaataaataaaataaaatggggacatcacccctgtggaccttctgaaagctcctctgtccaaggatggcctatttttccatggccaacattccttatgatgtttagggaacattcaagggaagcaaggtcagaaatttatgcttaaatccctagtcctctatggtcctgatgaaaccaccccatcccctcatcaaagactcagctgcactccagaattcatctctgactttaatggcttaagcaagaacatggtttccgtggctccccctggactgaatgctggaggatatatacttcacagtctgaggcctggtcccaggaactggcaatctaacaggatggcaagtggttttgaaacatatagattttcaggatggaagtttgattcttcagattgtgactcatccgtggaaaataaatggtttagcacctaaatctgtatattcccatcagtggcttggctgactcagttgtaaatagggtaccctccatctgtctcccacccatatgctccactgtccccaggccctcagtgcctgagccctagggggattcgagttggctgctggattcatttcctgcaagcaggcctgcaaggtgacctgtctctctaagatggagagctggagaactggcctgtaactgcaaacttaaactcccttggctctggggaatgtaaagggtgtgggaagggtgcacctgtggccaggtgaacctgggagtgagtccatacacaacacacacactcatagctcccttccctccaccacacacacacacaaactaatgactaacaacctaagaagggaaaaatgaatggggaatgggccacagggggctctggcctcagtccatgaggtgtgtccgtccgctatgccgaggatccagtgcacagagggtcagaacatgagttaggagggccggtccactccgaatcggagggtgaactcttcggcattctttctgaacagctccggattctgtgtcagcaggtcagcgaggtccatccgcaggggctccctgatattcggtctattcaccagcacattgagggcctccaggactggggagagacaggccagatcaggatatcagggcagagggaagggagtcatggctgcccgttcccaatgtcctgacactccacactcactccttgggggaaaggttacatcgcttaggattactctacgaccagatcaaacgccccgctcattcttggctggtgacacccaaggccttgactgattacatcagtggttttcaaacaactacattccatggcttcagagaagctcctcatcacaggggccactgagataagtgaggtttctgggtcttatccccatttcaacaaaaactgctctgttttcctccattatattggtagtccaaataaacttttccttgggcaaaagaggtctaaggctaaagactgaaaaccaccactgccccctggctcttcatctttcacagatgcctttgggaacctagtgaaggcagcagcccatctcccgagacagatgtgcacatccacatgcaaaacagacagttcccagaccccctgaagctcatccaaggaccactcctctccctgctcccactcccaccaacctaaggactttcatttcctgagttaaaaactcctgagctggtccaggtggaggattgcacactgattcagccacaggctctagagctgtgttgttcaatatggtagccattagccacatgcaggcatctaaatttaaatgaattaaaatcaggctgggcacggtggctcacgcctgtaatcccaccactttgggaggccaagatgggtggatggcttgaactcacgagtttgagaccagcctgggcaatatggcaaaacctggtatctacaaagcatgcaaaaattagccaggtatagtggcatgctcctgtagtcccagttactcgggaggctgaggtgggaggatggcttgagcccaggaggtggaggttgcagtgagccaagattgcgccactgaactaactgcctgggcaatagagacagaccgtgtctcagtagaaaaaacaaaaaggattaaaattaagtacaattaagaattgagttctggccaggcgcagtgactcacacctgtaatcccagcactctgggaggcggaggcaggcggatcgcctgaggtcaggagttcgagaccagcctggctaacatggcaaaacccctctctattaaaaatacaaaatagctgggtgtggtgtcatacgcctgtaattccagctattcaagaagctgaggccggagaatcgcttgaacctgggaggtggaggttgcagtgagccaagatcgcgccactgcactccagcctaggcgacagagcgagactctgtcttaaaaaagaaaaagaattgagttcctcagttgcaacagccacatgtggcttgcgagtcagccaagtgctgccgtttgtcatctgtatgaccttaggcaaccacttcacctctcacatgcctcagatgtccgggtctactaaacaacactacctcacgggcttgttggggaaataaaaatgaagtcggcaggtgatgtttttagcacagtgccgaaagtgctcggtcaagtgacaggtattatcattatgaggccagttccctccactgtcatttaggacaccgagtcccagaaaggaacgaaaacttgcccaaagtccacagagggaacagcgggctttcttttcccgagcccttccctgtgcagccaagctgcctctcccatgaaccgcagcaacgttcctctgtcacaactgcacaggtataagaagagaggcaggaggaggtcagtctgtccaggaagcatcccttctatctcatagtaagttcagccaagactcacaatttttatctcctctctttggggcttttcaagctcagaataagctgtgaaccccctctccagtaatctctacccagtatcagtccctcctccaagcaaagcccaaccccaccttggcaagtcttggtgcaaggcttccagttctcactgctgatgatgggcaggcaaatctgtccgttctcgtccacgttggggtggtagatcttggttgtgaatttgatcatgggaggcttgaacggatactccggcgggaagctgatgcgcaggttgaaggctttcaggtggtagggaggttggtcctgtgcagagagaaaaggggtcaagctccagtctggttttcctcccttcctgccccaatccgagggtcctaggcatcctctgcttcactcccaggaggaatcatgagccaggacacacacagcacctgcattcatttgacaattgagtcatggattagtgaaaatgtgaaatcaccaaagggcactggcctgggaggcagagaagtctgatcctggcttttgctgtgtgaccacgggtgagccacttcccacctctaggcctcagtttcctcatttgaaaagtggataaagatggactagatgagctctaaggaccatctcagctttcaagactttctgagattatggaagaaaaggatggaacatcctttcttaaaacattagaatgggggtgaggaaatggagaaaatgaggaaatcctaagaactcaggagcttaggaaaataaaatggtgcagctgtgatggaaaacagtatggccatttctcaaaagattagacacagaattaccatatgatccagcagttctacttctgggtagacacccaaagaactgaaagcaaacaggtatttgtataccaatgtttctagcagccaaaaggtgaaagcaaaccaagtgtctatcaatggatcaatcaacaaaacgtggcatatacacacaatggagtattatttagccttaaaaggaatgaaattctgatatatgctacaacacggatgaaccttgaagacactatgctacaggaaataagctagacaaaaaaaggacagatttgcaagataccacttatgtgcagtacccagaatagtcaaattcatagaaacaaaatacaaaagtggtcaccaggtgctggggaaagaaaggaatggggagttactgaaggggtacagagtttcagtacaggtagacaaaaagttctagagatgaacggtggtgatggttgtgcaacaatgtgtgtttgtttgtttactgaagcagggtctcgctctgtcacccaggctggagtgcactggcattatcattgctcactgtaatctcaaacttctgggctcaagtgatcctcccacctcagcctcctgagtagctggtactacaggggcccaccaccatatctggctaattaaaaaaatttttttgatagggtctcactgtgccagggctggtcttgaactcctggacttgagcaatccttttgctctggcctccagattactgggattacgagcgtgagccaccatgcccagctgtaatcctatttaatcctatttaatgacactgaactatatacttaaaaatggttaagatagtaaattttgttatgtgtattttactatgattaaaaacaaacaaactcaggggctggagtgacctaggggttgggagctgcaaggagccagcagaagaccctctagactttgagccacctgaacacttttctgagcacctgtctgtgctgtcctgtgctaagggtttgacatgcattagcctgtgcaacagagtatgggggtcacacagactccggagccaccctgcctgggtgtgattcaactctgacactcactagccatgtgatctaactaggtcaggtgcggtgcctcacgtttgtaatcccagcacttggagccaccctgcctgggtgtgattcggctctga

SEQ ID NO: 98129 - DNA, 36117 bp, Homo sapiens
aagccagctctacctgggagccctgattacctgaaattccaagagaaatataacctttgtaagtgaacataaagctgtggaagcttccttaccccggggccagctctgctgctcctcctttgacatgttcgttggcctgccatggtacagtaactttgcagaaatgaagagaaatcagctgggtcttaggcttcaatgtgagttgggcgaccaaactggggtatgaaagacacccaaatgcaaaaataaatgactcagccaaacaatccctttcccctcacccacaaacctcacttctgacttttaccaagtcagatagtttggctctgtatctccactcaaatctcatgttgaactgttggaatccccagtgttggaggtggggcctggtgggaggtgattggatcatgggggtggtttctaatgattttgcaacatccccctagtgctgttttgtgatagacttctcatgagatctggttgtttaaaagtgtgtagcacctcccccttcacccttttcctcctgctccagccatgtaggacgcatctgcttccccttcaccttctgccatgattgtaagtttcctgaggcctccccagccatgcttcctgtacagcctgtggaactgtgagtcaattaaacttcttttctttaaaattacccagtctctggtagttctttatagcaatgtgagaacggactaacgcagcaggggaggaagggctggaaaatatattctgctcatgaagctggaggttctactacgtcacatgacaaacgacatgcatataacaagaaatggacaagggaaggctaataatataagctattataatgtttataagaaagattggcctgaatttttctatcttataatgtgaagatttggaattaaggctattatggtctcaaaaaaaatgagttgggaaatgcctctatttttttctattatctgaaagaatttaaaatctgaaagatcagtactatttcttcctttcttccttaaatgtttggtggacactgctagttatgttccctgaacctgaacctgaaattatgggggagttttaaattaaggatactgttatggacctaatcatgcccccaccccaaattcatatgttcaagccctaacacttataacaagatgtgactttatttgcagatggagcctttgaggagacaattaaggttaaaagagactaaaagagtggggctctaatatgattggtgtcattatgagaacagacaccagagagcttgcttgcttatactctctctccatatacacacagatattttatctgtgaaaatatctagaactatgaaataataaactttgtgttgttttaagccactttgcttgttggctgtttgttacagcagcaataagaaactaatatgaggagaaagagtgatttttttttttagcattttgcagatgtgaaaaatgccacacacttaactgatgctctgtctatataagagaagaggctttgtaaggacatggtgagaaggcagtggtctacaagccaggaagagaggcctcactagaaactcacactgatggcaccttggtcttggacttctggcctttaaaactgtgagaaaataaactactgttgtttaagtcatctactctgtggtattctattacagcatcctaggtagactaatacagatataagctatcaaaattaatataggatcattcagctattctattacttcttaattttggtaaattatctttcaagaaaaattgaaatgtcaagtattttgatataaatatttattcttaatatcctcctattatctttgcaatctgtagtgtctgtggtgatgtttcatttttcatttctgaaatttgtacttttctttatcttggtcagtctatctaaaggcttatcaattttattaatctttgcaaagaaccagttttggccttgttgcttttctttagtgcacatttgtttttaatttcattgatttattcttatctttattagtcccttttcttctttaaatgtttgagaaacttccaatgataaaccttgctctactatgaagctgaatgcttgacaattcctgttgagacaccatgaggctttctatcaccattttaatccttgtatttcaaaatggatagaaagctaaagattattatttatggactaattgtgaaataaaaaatatttttaaaaaatggaaatccaaacaagtgactaaaaataaaatctaggcatatacagacaatgtggggaacagaaggaaacttcaaaaaagtctttaagactcatagagagctataataagataatgcatccctgaaaccaaaactgcatgttataaatgaatacagaataagaaaaaatgcaaagtacaaatatgatataaattattcaacaacagtctagtgaaaaatagctgaagaaatcttctagaaactagaacaaaaatgttaaagtaaacaagaatcagaggataaaaaaacaataatttagaggattatgccagaaaatgactttcaatctgtaaatttaaatataaacagagcatcaattaaatgtgtggcatttttcagatttgcaagatactaaaaaaaaattcatctcatattagtttcttattgctgctgtaacaaacagctaacaaagtggcttaaaaaatcacaaagtttattatttcacaggtctagaggtcgggaatctgaaatgggtctgcagggctatgctcctttcatgttttgtgtgtgtgtgtgtgtgtgtgtgtgtgtgacagagtttcactcttgtcgcccagcatagtaaatttacttgtgtaacaaaaaaaacacaaaatatcaatggcttaatacacataattttttctcccagaagatctttttgtgagaaaaggggcttctagcagtcacctgctatcctttgctcagagctcctccctctatcttcaaagccagcagtgtagagtcttctcccctctcttgacatcttgtcttcctctcataagaactctttgattatgtccagccacccagacaatccagggtaatttagcccatctccttaatcacatatgcagttccttttgccatataaaatatcaacaggttctggaggtaaggatatagacatctttgggggccattattctatctactacactcctatttacctttttccaagaaggtattagagaatgtagttcatttttaaaaagggattaaacaaagaaaaaggaaacaagggatctaacacacaggagagcagtattatgttggagaaaccagcaatcctaaataaactaaaggctgtaacgctgtaggaagagtatctgtaaggaaaaaaaatctactggattaactgatgtatttcactgtgatgctttagcagtttgccagtgtttgagaacagataaataatacattaaaaatggcagttaagagaaaggaaagtaaaaagttgtattaaaagttaatgcgatcttagtatactatgtgccttggggttgaatgacatttacctagacagtagtgataacactaaatgttgatttagccaaagcctatgatatcactattgacaggtgaagggacaagaagagtgtatgaggtagagagggaatgttcacacacttggaggtggtgttgttacaaaagacctttatcactgccttccacaggagaaagtcagtgggtaatgtctgaaattggaaaatcaagaaactgcaatgtaagtatatttagacatgggggtaacagatgaaatatttaaaagacttgaattttcctttggtgagaagaattgagaatagagtagaagggttgggtactacagggttttctttaacctagaatgtggcaaactgttagtgctcaccaatatgtgtgtgtttctctacatttctcaggatccccggcagttaaagtgggggccttgggactaaattctggccaacagaatgtggccaaattgatacatgtcatttttagagttaaccttgggtaatttgccatactttctttcttgtcaaacaagctagtcctagaaggcagcagaaccattaaaaataaaaacatctggccttgaatttaacatttcgtctgcctagaaatagccacaatggatcttttgtgaggaaaaaaaaaagtgtattaaaccaccgatattttggggttttctgttacagaagtaaattcactatgctggttttaaaacatggacaagaaatctttgccaatcctttgagaagagggatctatgtctcctttcctaaaatggaacaggactttgacacatttgtaagcaaaagaaagtgggggaagtagcaccgcgttactttttgaggcaaggtcagaaaaggtcaggcaatttttgccttgttcattgcaacactccctttggagctctgagtttaagctaagaagtctgactaccttgctgccatactgtgaggaaaccccggccatatagttacagaagctctgctagcatgcccactctagtctttctaattgagttaccaaagaaaagctgatgactatgccctattgacaacaccacctgtgaacataataaaatggttgttttaagccaccatattttggagtaatttattacatacgatagcaacccaatgctcaatctaacaagtagtattatttgctttttaatctgtgcaatttaactactttgataaaatttagagttaaactaaaaaggaaaatggttgtgaattcttcttggcttatagactttgctattctactttccctacccagaaaattcacctttctccctaaatcactggctttcaaactttttaaggtttgaaatacagtaagaaatacattttacaaacaagccctagtgcacacatacacgcatatatacaattaaaagctccataaagcagtactttactaactaacactaaatttacttacatgcgctgatatttccaatctatattgtttcttttttttaagtttaaagagatttccttgcttacaaatgggtcaagacctccactaatgggtcccacacaatcccctttccagttgaaaaacactgtcctaaacctaaatcattcttcaaggccttacccaagtccgaaaaagaagcctttattgaccactccattctcagctttcttgaaattcctgtaatttattaaattccattttttatctcagtagtaagaatattgcattttctgtacttgaatttaacatgctttacttgatatcgtgagcacttctagggcattgtaatgtcctttatctaccacttgataaattcagagtagtcaataaaacattgctcaacatttgaccattgtgttttaaaatcttagttgttagagtgcacttccgtttgcgcattgtttggggagaggcacggacaaatgttctaataacttatccacatattatacttcaaagtggaaaaacacaaagtactcttaactctatatgcgtgtttttatgcaaactaaatcattaagatacaaatgatttttctaatagctttcattaccacacagcacacgaaataatgatattgatatagccacgaaagactaatgtaaccaagttctcacaatcaaaatatctttgaggtgggcaaaatgcaaacttttctctgggatcaacatttcttcacaactcactgcaactacgccttgacagtatgtttcgagaaccgcttcccaattttgttgtcccagcaagaatcgggaggaaactgggtgaaaggctgcgaggcttgaggcgggtcccggacgaacgcggccctgcccctcgccggagcctctcgggagaagtgcgacaccgccgctgattgagaggctgaggcggaacttcccgtctaaccccccccccgctgtcgtcccagcctgttgcttaagccgcgcggtgtgcggtgtgcgcggcccctgccttagcaacgacgctagtaactgcctggctcctccctctggtgtctcccggaaagcgctccgtctggtccgtgcgcgatcacggcccggcgcgtggctcgggctcgggcggagctggagacgtgtggagctgttcgaggactcgcgggtgtgcaggtctgagtaccactccgatccctggtggaggtccccgcgcctctctggagaccagtggtctggccccagaggtgcggccgcgggaagtggacattctttgtcaggaccctagcggaggtcgcgctgggtgtcgcctgtgagggggatcctcggtttctgcgcggtctcttgctttttttaggatcttgcgggccctttgggaaaaaggtttccaaatttttcctcaaaaaaaaaattatttttcctaccaatgattttcggtgcattccgccccaacgaaaagtatgtcctggcaaagtcagttccctaggaaccccatactttattttattttatttttagtatttggagtggtttgtgggggtttggttatcacggaaggggaagcgtagtacagacgtagaattagtgatgccatgcagtgtatttaaaatattgaggttgtggttacataataagcaaaagagcctgtttcttacgtctaaattatttattgggaatgtaggacaaataaggaagtatattaacattttcagtcgccaggcccacaaagttggatggtaaaatcaatactgtagatcgcagcatgtaaggactaacccagtgcaccatgaaaacgaaggcaagacagtttgttaccatatggcgggtggtgtgggagaggccattgatcctatatgaaaaagggtactactaccttggattatgaaaaatgaatgttggacctgtaggtcctatgtgaccaagttcttaaaaacactctaaagaaaattggaagtggtttttttctaatactgaattggtccacaatataggacaggggagtctgtatagtgttccattgggaggtgagtcagcttacaataatggaagaggtagaagctttttgttattattttggagaaaaaaaaattgccagcctgccacttgtgctaggctgcagacggcccataaaggtagtttgtcagatacttcagtagtgagatgcttactggatgtgttttgcagaatggttttgatttagttaacaagtgtttgttgagttcctgctgttgcataagaatcaggaataggtgagatcagggaaggaatctgctcttacagagttgaatgctggaggggatagattcactaaagtacctccacaataaatgcatttttccatgtcaaatatgtggaactaataataagtactcaaagaggtttaagacattgctgtggcccatctatgagttaataaggaactgaattagaatcctgactttgagagtgaagatagaggattatatacaaggtagatgcaacttggtgagtataattaatttggggtggaaattgggtagaaggaggaataaaaaattaatgtatttttagccttaagttccagaatgatggaygcaccatcaaggtgttaaaattgttagttccttaggaacagtctttatgttttctaagtctttttagcccccatgactcaaattgtacttccttgcacatatttgatgttaacaagtatgttttaaaaattttaaataaccccatttgcaataaaatcatttgcaatgattttctcacagtcgaggcaggctgttggctcggttaggacagatgccctgatcatgtagtttcagagaccactggagggagctgcccatgatttacaattgctggcctcttctacgtggccacctcagccataagtgagagtatataggtgaactaagaggtggagccataaacatttctcttttactgtcttacaggtatttgtggtggttgatttttctagaggaaggttatttatataaagcttcactaatatccatttagttatgtggatagcaggtccatgaactgcaaagtgatatttctgaggtatctctaggaggaatgcactttcagtgccctaggataactccaaaaactcaccagtagttttctgttaaatgtcaggcaaccacagtaactttcatgacatccacaggaactacatttttcagtcccactatgcctgggcctttgagtggtacatgcattcccactaaatagctactccattacccagggaaatgaagtcaggttgagctactccaatcaaatttcattttttaggatgaatcccatcatctgaataactcaggactattaaagcctcaaaatgtttctctgtaagaacctcaggcaacaccaggacaaacccaaagagagtttaggtgaaacttagcttcgtatgtgcagcaaagagacgccaacagagcatttgcaactctcatttctggggactattaggatctcttcccaagctttttttttttctctgttttagagatgggatctcactttgttgtccagactgttctcaaactcttgtgctcaagtaatcctcccaccttaacctcccaaatgctagtattataggcatgagccaccatgcgtggcccttcccaagcttggaacttccttacctgggtcgtagatggactctaggagatctccaaacctcctgaaattgtgtgcaaaatattgtgtctgtatatgcattttctagggatgcggtttaatattttcatgtgattcctaaaagaatctgaggctcaagaaaagagggcatcttaatatcctgcactttcagtcattgagggcatgatcacaaagatcaaagccatttttaggcaggtgagttggagtggcagtcagaagtaggtaagattttctatttgtgaggcaggaacaagggattggaccattgttcttaaatactgctttcttacccaaaatgcaaatctgtgcgtaatcagtacacagcaaaaatatttactgtattttgtttttccccttgggtacatttggcaagtrcctttttctactataaccggcgtttttgtatctctttatttgtatctcaaactcactgggacttacaatcttaaaaaaaaaaagaaaaagaaaaattcatttgatgagtaattaaattagtgccactaacttcttctcagcaaattatgttgtattttatgtttctctggactttttgttcactttctgtttgggagaccacaaaatgtttcctgctggagtcacagcatttctcttgtcgctgtttctacttaaagtgcctggagcttcgtagttaaaccacaatgccagaaggctttataataagagaattattttacagctgtggaatgcatatcgaatcaatagggcaccagtgttgtttctcccttgaaagatatcttccttacagggtatacagatagcaattttggcagccatcacccttctttgaagaaaatattaagtgggaaagttattttaccatttttctctagtackaaagaatctgaatgatgtatgtttttaaaaaacataaattcttagagtaagtggacattaatgttactctgtaaatttttaaaatttataggataatatattttaccttatgggatattttacaaattgtaatgagtagtagatgcctcttattttttattggatatgaagttttatatgtatatgcacacatgtacacagacacactcacacatatgtagtgtgtgtttaagttggagagggttatatcttttagaacataaccaactaaattttgccaattccactagaatsttctatttttcatkaatgtcaattcaaagtcagagccaacagggttgaatatatccctgtctgatrctaacgtgaaaccattgcattcctaatatctggaaaacaaaactgccatctctggaacaaaaaagggttcttgaaaaatggattctcagtacctgaactttatatttgaaataactttcagtttattgcttttaatcttatgttttaaagtgtgccratttggtggtttaaaacatgtttaataagtactaaaacagcacacaattgtgacttaaattgagtaattttctttgtagactgagtaaaatgttttctgtttttatttttccttctcttgatactttttttttacagtgcacctatgatatgtgttttagaaatagccrttaaactttggtttgaatgaagaatgtctctcaatccacctatatttctcaaacgaagtraagaaaatagttcaaaatttgtggaaacaaaacagtcacaaactacttccatagcttcagaagatccccttcaaaacttatgtttagcatctcaagaagttcttcaaaaagctcagcaaagtgggagatcaaaatgtctcaaatgtggtggttccagaatgttctactgctatacatgttatgttccagttgaaaatgtacctattgaacagattccacttgtgaaggttagtaagaaatttaattgtttgaaagtatgaaaatagattttttaaaaacatctcatgtatacctactctaattgataaacttaataaataatgttattattgttagaaacaagtgcttgttgctgcaaagaaaaactagcacttagacagaaaatttctcagcagggcacatttacttctgcagaagggtgctgcgcctgatcgcaagagcacaccgaacaaaggaaggaagggatttttaaccctaatgcagttcctgtccctgtgtccttcccttattggctagggttggaccacacaatcaaaactgattccagttggctaagacttaaaattttccaaatagggtaaatgcacgatttgtaaaaggaggggttaggagtggtctgtccactatagtataaggcatgtctggacatgtttggccatgtcagggcacaacaagagtgggagggttgtttgcaggctggaaacgagagtacaaggagcttgggcttctgaacaaagaataagaacatcacacaattaaacattttgaagaggaatttatcattcctagcatgaaaaccaagtgtatttatggaaaatttagccctacagaccactaaacctctttgtttttcttgtctctgggtctgaaatggtgtttttaatgaaaccaattaatttttcattaatgattttaatttatttacaacatgggaaaaaatgtgtgatataaacttatgaatactaaaaaaaaagtttatagacaccctgaaggagctccaaacactcatgtctttggactgctccttgagaaaatactattctagtagaattagagttgattttcacctaagattttgtgacttatcctatacatggggatggagcagatttcattgaccaaaatgaaaataaagtaaaatttaaaaactaagaccaattccctgggctgtgttatcattagagtgattttaagcccgatttgattgcttacctttatactttttgggctcaccaacactacttttgtataggtaaaaggtctgtagaacgtcatgtctacataatcaaagaatttattatatatatgttaacttgtctaacattatcccaaactttaggaataaatcaattaatgtataaaatttgactgtgtaagactttagagagactaaattctacacatggactcattagaacttgccagtaaaaaaaaaataagttgtagctatattttaaaatttgttttgatgattttaaagttcatttgaatttgaagtaagaagagtactttgacactcatattttatttgaatttcagtttagcctatatcatcttggccagtccatggtctcctcagcatctaaaatcacatgtataggctaatggaaagtttactagccaagaataagtaagtgtggaatttaatatgatcttcacagtttgctccgaaaaaacaagaacttgagggtaataattattttcaagtttcccattatcttacaggaatgttacattttgaagtatggtttttgaagtatacgtagaattattctattttacatttctctcatagccatgtaaagaagggattccattaaaagttttatcctaaggtgtattgtattaaaaaatggattgcatattataataataataatcagtaatatagttacagggctgatattttcatagatatttaataatagagggtattttccaaatcagtggtctaatatacaccatttaatagaaatgactcaagacattagtgtttgatcatctctcaatggtctggactgtgcagagttttctaaagtgtttatattttaatggccttgtataaaatttgatactttaatatacattaatggtaataacagctctacaaaatgtcctttccaatttttactttatttttattttaacaaatcattcagcatttgcttttagatagcctacttgggaaaggaggatgacaatataatgagtaattccctcccaattttagtctagggaatgcattcataaatatagtcatatgtctcctaatgacagggatacatcctgagaaatgtgtcctgagaaatgagtcgttaggcaaattcactgttgtgcaaacataatagaatgtacttacacaaccttcatagtatagcctactatacacctgggcaatacctattgctcctagcctacaaaatctgtacagcatgttaytgtactgcatactgtacacagttgtacacacaatggtattagtgtatctaaacaaatataagcatagaaaagtacagtagaagtacagtataaaaatagtaatcctttatgggcacttagcatgaatggaatttgcaggactggaagtttttcttggtgagtcagtggtgacttgtgagtgaatgtgaaggcctgtgatgttactgtacactactgtagtttttataaacactgtatacttagggtacactacatttatgaaaaatatttttcttcaataataaattagcttactgtgacttttttactttataaactttttaaaaaacttgtgataacacttacatttaaacacaaacacattgcacagctgaacaaaaatatttctttatgctcttattctgtaaccttattcctatttttattatttatttatttttactttttaaactttttttgttgaaaaccaagacacaaacacgttaccctaggcttacacagtgtcaggatcatcagtatcactgtcttcttccacctccacatcttgtcccactggaagctcttcaggggtaatgtatggagctgtcatctcctatgatagcaatgccttcttctggaatacctccttaargacctgcctgargctattttacagttaacatttcttttttctaattaggatgagtgtactctaaaactaaaaaaattaagtgtagtatagcaaatatataaaccagtaacagatttatattatcattattaaacattattgtatagcatgcttttatatgactggcagtgcagtaagtttgtttacatcagcatcatcacaagcatataagtactgcactgtggtgcaatgttacaatggttacacttcgctaggccataggcatttagagcctagaatttaaaaggctctcttggggaaagttgataatcccatgggaaaatgcttaggtctccttgtcagtagcattttgataaacttgggcagaaggatttgtggtaagtctcttttataaaacataagtgttcgagagcagattgatattctttacttgtttgaaaacagaatgtctctactcagactgccctctggtcaacactattttttttttttaaacacagttaagctttaatgtccatacgaagcctcagagcaaatgtttttgtagcttgtaaaaaagcaaattttttttctttcttttttaattatactttaagttcttggatacatgtgcagaacttgcaggtttgttacattgatacacatgtgccctggtagtttgctgcacccatcatctacattaggtattgctcctaatgctatccctcccctagctccccacscccagacgggctccagtgtgtgatgttcccctccctgtgtccatgtgttctccttgttcaactcccacttatgagtgagaacatgcgttgtttggttttctgttcctgtgtggtcaacactattttgttactctgtactcttgtcattatttaagaaataatcttcttttaacatgtgtgaactagaacacaaacatggatttccatgatttgatctgtttctgtgctttggttttatgatgtgagagatctcacgctcatggaaaactarcaataccttggattgtgtacaggttttgcataattatgcttgcagactttagttcataaagctttttcttttatcatataattaaaaaaataggctaggcacatgatttataaaatttgtcaataacactcctgtgttcttgatataaatgataccctccaagatagctagctgatcagaaatattgataacttttggaattttcagctttactcatcagccatataagaagttcacatttatgatctgctttctttttcttttcttgtcatgatctgcttttttttcttttcttacttcctaccttccctgggctaagataatactgatgtggtgctcagagaccctagggagagggaaggtagtttcaactgagaccgagcgtcatgaggaaactctgatgtagtgttcagccagaagtagactgatgtaaaatcatttgtgaactgcctacttaaatggtaaattttccataactagaagttggtttgatgattagaagcaattgggcctaacttataaatgatcattgggcctaacttataaatgattgctaggcctaagcggggagggtaggagatacagcatttgaaaccctaattgaaaactatttgaggaattcatttgtaggccaaggtcctccaggggtgtattatttatactgttctgtccccaacataattgtccaggaagaaaaaaatttgaaattgaaattatttagtagctgctccattcaaaaatagttttggaactaatgacacacacacacacacaacatggaagaacctcaaaataattattcttagctaaagtcaaatgaagagggtatattgtatgatttcatttatataaaattctagaaagtacaaactatagtggcagtggattactgattgcctgaggagggcaattgttgatggtgagaggagaaggaagaagggcttgagaagacttttgatagtggcaaatcattattttgactgtagcagtggattcaagaatttaacatatgttaaaacttattagattgtacactttaaatatgtacagtttaagacataagaaaaatagttttgtcctccagggtaaaatagtgtgcccagggtaaattcctagaatcctacttatttagcatgggatgggaacttggagatggtgggaactaccaaataaaacaaaaggtcatttaaaagctgaagtcaagaacacatctccagagggtttcttatatatagtaagggagatatgatttggcatttttttcataatcatggctgaatgcagtacttgtataagcattacaaagagagctaaaccaaaaaagccaaagtgaaataagaaaaatataatttacaaaatccaagagaatattatttttgcatagagacatgttacagacaacatctataacaaataatgaaacttcaagggaaatacttaggcaacaggggtccccaatccccagaccacagaccagtaccggtcctaaggaaccaggccgcacaccaagaggtgagctgctggagagcaagcgaagcttccgtctgtatttacagccgctscccatcactcgcattaccacctgagctctgcctcctgtcagatcagcggcagcattagattctcataggagcatgaaccctattgtgaactgtgcatacaagggacctagattgcatgctccttaggagaatccaatgcctgaagatctgtcactgtctcccatgtcctagatgggaccatcaagttgcaggaaaaccagctcagggatcctgctgattttacattatggtgagttgtataattatttcattatatattataatgtaataataatagaaataaagtgcacaataagtgtaatgtgcttgaatcatccccaaaccctctccccaaaccctggtctgtggaaaaattgtcttccacgaaaccagtccttcttggtgccagaaagattggggagtagttaggcaagatgattttgaagacagttttgtgatataaagattacacctcttaggtctattgttactattttttaattgataattatttaatttgtgctattgaaaatgtgatgccgaaaatcatgatgtttcctgcaaaggataacagttttgacttgaaagtatgtctaaggaacagaatttcaacttgaattttagatctgaagctttttgcccaaacttacatttctttttaaaatagcgtaagaggccaggtgtggtggctcactggtaatctcagcactttgggaggctgaggcaggcagatcgcttgaggtcaggagttcaagaccaacctggccaacatggtgaaaacctgtctctactaaaaaaatacaacaattagctgggcatggtggcaggtgcctgtaatgccagctacttgggaggctggggcagaattgcttaacccaggagacggaggttgcagtgagccgagatcacaccactgcactgcagcctgggtggcagagtgagagtccatctcaagataaataaataaaaataaaataaaatggcataaaataggcaaacctaaagtttataggatttattaaaatgtccttggcacacatggtgaaatgcaaagaattggagttaatataacttaagtgaaaatgacattggagctttgctttaagagaagattctctgttaaatgagttgaaaatagttgtcctaatacatgaataacaatgccaaggaagaaatttgggttggttttgtaacaatcaccattcttaatattatggtatatcttttaaaccatatgcatatttataggagtttattgtgagcttcctatttagctttaaagaccytttttattaacataaaaattaaaatgtttatatatttttttatttgtgctttttttacctttagcttccattgaagattgacatcattaaacatccaaatgaaacagatggcaaaagtactgctatacatgcaaaactcttagcacctgaatttgtaaacatttacacgtatccgtgtattccagaatatgaagaaaaggaccatgaagtaggcaacttagtttttataactcttcacattggatataaaaatgaattttaacctccattgcctttctgaacttactcaaacataatttaatatttttcttagtaaagtattatgctcaggtaatgttagacaatatacagtttatttcattgatatcttcaaagatcagatgtttctagactgctatgcgtttttgagtctttctgcattttatagctcttctgccttatttcttcaggtttttactccttgccaatactattgtgcctgcttttaccttttctcctctccttctcctgtttgtgctacatatagatgatctaatttgatgcaaactgggaaaccagattacaaatattgttggaatttctctaaaagaagaaagactgagttaggatattcaggaatcctcctaaattaagagctttagtgcatagcctttataacatttcttttggctgctcagaggccttccttgctcatttttagattcttaattggttttcacccagttgcaattgtcacattggtgagaaatyatgggtcttcttgctgaaaagtaattttacaatgtgtctcaaaaaattaaggccttgggtactgaaagaagcatgtaaaagccttttggtctcttggaggccatttgttggtgtggctagtatagaaacaaaattaaaaattagtgcattcatttgttccaggaagaacttggtaaatttttactttcctatttatatcwatatctatatatatatatatatatatgtatttttttggttgagtttatataaaaaattatgtttgtaaataatatttgagttttggatctaggaaaatgtttctttctctggtcagctagactccatttatgttgattaaatagaatgtagtgctatgttctgtaaggagatgtgatacgcttataatttaagaaaattcagaagccctggactttgctaactggatatagggggaaatatagacatgtattatgaatatttaaaaacttttacaactttgaaatgtataaaattcaaggtttttgctttttaagagtcgtgctctgttgctcaggttggaatgcattggcatgatcacagcttgctgcagccttaaatttctgggcccaagcaatccccatacctcaggctcccgagtagctgaggccatgggtgtgcgccactacttccagctaatatttttattctttgtagagacaggtctcactatgttgcccagactggtctcgaactcctagggctcaagtgatcctctcaccttggcctcccaaagtgccgggattacaggtatgagccactgtgcccggccaagattttttgtttcataattttattttattgtgattttgtttttatctttttattttaaaaatttgtgtgctcattgaagaaaatttgggaaatagagaaacatatggggataaaattcccttgattctccaacatttattcatttaacaaatatttacttggtgcctgctttgtgccaggagctgttcagacattggaagctctaacaatataaatctcagtaaaaatgtgcggaaagaaaagtggtatcatatttatgtaatttttcctggaaggttagattttttcattttaatttttcactgtaataaatatacttagatattgtaagtgtctgtgtttaggattattttattacattcacataatgagatcgttgaaccaaagggtatgaatattttaagactcttgatttaaatggtcaaattgcttccatgaagagttatgctatttaatcctgctctcaraccaccatttcctcaccagcattcactgtatcatttgttttatctttggcttatgatatagatgaaaatggcatttaatcattgaacagttttcagtggttcttttacgaagtatcatgtactttgctttttatcttatgaaaaattatataatttagtctttttatttcaagtatgactaacttggcatctatcagtcagtgaataacttattttgaaataatagttttaattattatattatgattataaattactaggggagagccaaaaactttaccatacatattaaagaaccatatacaatagaaccaacctaatgcttatttctcagatattcaacatatctttcttaaaattttaagtcaatcaaaatttatatattttgaagatcatagtagcacactgctaacccaattttctttgttttaggttgcactcatttttcctggacctcagtctatctcaataaaagatatttcttttcatctgcaaaaaaggattcaaaataatgttagaggcaaaaatgatgaccctgacaagccatcttttaaacgcaaaagaactgaagaacaagagttctgtgatttgaatgacagcaagtgcaaaggcacaacactgaaaaaaattatatttatagatagcacctggaaccaaacaaacaaaatattcactgatgagcgacttcaaggtaaaaaaaaaatgtttttttggactgctcctccctcagacttattttgaaaaaacttcaaacttacagataatttgaaagaggagttacactgaatacctatacattttgccatatttactttatttctctctttttattatatatgtgagtgtgtatttatatattatatattttttggttgatcaattgaaagtaagtttcaggctttgtaacacttcacccttaaatattaagtgtacattttccttttttttcttgagacagtcccactctgttgcccaggctggagtgcaatggcacaatcttggctcactgcaacctcctcctcctgggttcaagtgatcctcccacctcagcctcccaggtagctgggattacaggcgcccaccaccacacctgcctaaattttgtattattagtagagacggggattcatcatgttggccaggctggtctcaaactcctgacctcaggtgatcctcctgccttggcctcccaaagtgctgggattataggcatgagctaccacgtccagcctaagtgtacattttctaagaataagaatattctcctatattaataaagaatgacatctcttttataaacaccctaatggtgaatacatttactaagaagttagatcttctattttgttttttttgttttttgccttacaggttttttgttgttcttgttgttgtttgtttgtttgtttttgagagggagtcttgctctgttacccaggctagcagtggtgcaatctcagctcactgcaacctctgcctcctggggtcaggcgattctcctgcctcagcctcgctagtagctgggattacaggcacaccatcaccacgcctggctaatttttttgtattttcatagagacgggtttcaccatattggccaggctggtctctaactcctgacctcaggtgatctgcctgccctggcctcccaaagtgctgggattacaggtgtgagccaccacgcgcagccttccttacagtttttaaaaataacttttttgagtaagaattaacatgtagtaaactacatgtttccagagtattaaagttttctcatatgtgtacagctgtgagaccatcactacaagttaggaaatgaacctgtccatcccctgccaaagtttctgcctgaccttttataatctttctcatccagctttccccacagcacacttccacactctccaaccccatctctaatcaatgatctatatctaatcattatagattagatgcattttctgggatattatagaaattgaatcatatagtatgtactcttttcctttttttggtttggctttctcacacaaaataaataacttgacactcatttttgttgtagcatgtatcaataggtcatacatttattgccaagtagtatttcgttgtatggatatgctacaattagtgttatctatttatctgttgatggacatttacactggttgtttcccattttctactatttcaaataaagttgctatgacacttgtgtaaaaaaaaaaaaaaaggatgttctcctgtataataaatacagtaccattatcactcctaagaaaattaatgaaaattacataatatcatctaatatactgtccatattcaaatttccctaactgacccaaaaataccttttgtagcttccccccatatagcatttaaactcgtcacggtttatttcattattatgtatctttagtctcttttaatctagagtagtcctgtttttatttttcatgacttagacttttgtgaagaggacaggtcaattgtctgaatgtttcattgtgattagtttcagtctaaatatgttgcctaggatacttacaggtaaggataaatccagggttgtctatgtctagtttatatctatcgtttgggtataattattaataacatgtaattttactctcagaaatgaaccttttagctgataaattgtatggctaaccaattcataggtgaattcatactttattgttgcatcaaattaggaggcacataatgcaaattgtctatcatttgtgataactttcattacttgattaaagtggtgattaccccatctctccattataaaggtttattttttctctttgtaagtagtggtaatctatggggtgatgttttcagactgtggactgtttcccaaaaacttttcaccagtgattttagtattcattgatgatccctgcataaattgaataattacattgagaattgaaaaatagtgaaattttaattacatgatttcttcctacattagttagccagtattcttatgtaaagaagagcttttcctttttctcctgttctttatttctttctctttccacccctttttgagatcattatgatcttatggattttctttttaattcaatatgctataataaattatagtgtagcatcaataaagatgctaatctttttgataataatctttttgatgctctagttctctcaaattttgccagtggaaacccttcaagtacttcatggcatggcctcatttgtctttttggtgcaacaggcaagttcacttgtactttttttctgtctcagacctggaatcaattgtttttctaagaagctatagtttcttttaataggaaatggtattagaaactaagatctggtraattcattacttttgggatgtcattgcttcaatggatagagccaggaaaaatacatagttatgtatcatgagttcacacagatagttccaattcatatttaacattataaggatttttatttcttttagagtgaaaaacttggytcctaataatagtgatttaaaacagttactttacttgtccatgtatgattagaaggcaagaaagctattcagttgatattaggcagttgctaaaacagtttgtttcaaactgggagagcttctctcaggctagtgttaaaaatgtgcattatctagaaaagaacattttgacactttttggagtctgattggtgttcattaattccaagctgaagtgagtgacaacactagatttaacgagcttaatttatatagtttatgcatctgagatcttcatacacattagtaaagttgctttgaaagtctaattgtgtgcgctttgtgtcttatgtgtgtgggagagagtgaagggcaggtactacggagcataagatctttaagaaattttgttgccgatgtttgatagaaagacaaacgcctaagccctaaggctgtgctctttgaaagagagaaagggaacactgcctgccacattcctgtggatgtttacagcagcaggttacttgccagtttgaagatttttctgagccatttttctttatagttaccttatatggtaattgaaaagataaatgaaaaaacataagtaaaaacccttgacaaaactataaaaggaattattgtggtattattcaaaatctcttttcagagtgtccaaatttggcttgcctaaaatcagatttgtacaaaagatttttgttattccttcccaattcacatggaaagtatcatatatttcagttctgtgctagatcaaaaatttttaaaggggcttcttaatctctttaaaatcataaaaggaacagatttctaaaggcaagttttctgcatgacctacttcaacccctgtcctttgtggctcttcattgcaccacaggaaacaattagggctctatacatatctataacctctgtatatgtgaaatactgatttctgaataaaccgagttacttccataagaaacaatccatggtttttataaattgttggctttaggctttaaaacttcgtcatttcgtgagattaatctgaacaaactgagtctatacctcaattaaaccctcaggtgtattggaaattatgtttccattattttactatgaatgctgaggttaagaatccctttaacaatgtaaaaccttactgttttgccaaatttttacagaaaaatagctctgtgtgttctaccagtgtcaaaataaaacacttgaaggtagagtgcctaatttaattataaaaggtaaacctaaacctacaggtgaagaatgatataacattcttaaagatttatcataggaagccttggcagaatgtagggggagacattgtttctttttgttggatgtgagtccaaattatatttaaatggcattatactgtaattggttataaaaattagccagctctttcccttcagtttgactgtattgatacaacttttaaagtgataactttattcatattataagctttgcctaaactacactccctgtcagtgagtgctgtgtcctatactaccttattcaatcctcacatcaaatatatgaggtaaaggatgtcaccctcactttgcaattgaagaaactgaggcagcacttttggaaggaaaagccatttgtaattatctactttaagtttctactgctaaaatattttactagttttgagccaggtgtagtggctcattcctgtaatcccagcactttgggagatgaaggtgggagtatcacttgaacacaggagttctagactagcctaggcaacatagcaaggcctacatctcaacaaaaaataaagtaattagcaaggcgtggtagtgtgcacctgtagtcttaggtacttgggagactgaggcaggaggattgcttgagcccaggagttcaaggatgcggtgagctatgctcatgccactgaactccagcctggacaacagagcaaaatcccacctcaagaaaaaatgtttacgatttttactataattttattataaagttactgattgttagaaatactagggtataaaaaatattttgcattcaagaaactgaaatatttaatgttgtctagaatgcatacatatatgagaatggtaaaagagactggagaaattcaaattatgaatgtcatattttattcagcatgcttgggcatttgttcttttatccatagtgctgtggcatcattaaaaaatttttaagcttgtcattgacatgattagattgtattttaagtctaatggaaagaattgggctgggacatgacttcaagctccaattccttcactaaataagcaaagaggttttgtttgtttgtttttaactgttttatatttttaaataaattgtgatacatatgaaataatatatacacacacacacgtatatgtaacattaagttataaagcatagtgatataatgaacaattaagaactcaagcaccagtatttctaacttccatttacctatgttttcccttgtgccattccccttcttcccctgacagttattttcctgaattatgcttttttagattatagtgttatatatatgttttcataaactatatatgatttagttttgctttattttgagctgtgtgttgttttcttgggacttgctttctaaagtcacattttgtttctagggtttatatatattgtcatatcactgtagctatagtttattctatttcactgctgaataatatctgtgatatactacagtttatctggtttcctgctaatgaaacactttggttatttctagtttttcctattgcaaataatgctaytacacacattcttgtgcaagtacaagctcctctaggaaacatccctaggagtcacattgctgagttgttgagtatgagaatattcacctttacaggataatgccaaattgtttttcaaagtggacatacaaaggaatatttccatcattaatgtataagcgctccattgatccataatctctcctaccttggtattatcaaatgtctgatttttgccaacctagtattttaaaatggtgtctcattgtcatcttcatttacttttctctaattactaataggattgataattacattgtttgtttatttggccatatacgtgtcctattctgtgaaatatctatgcccatttttctgtgttttatcttaattgatttgtagaaattctttgtatattctagaatatagataatgttgcaaaatatcttcttgcagtttgtggttcatcttttcaatttcttttcttttgaggaaaaaaaacttttagtgtggaatttatcactatgtttgtgtcttgtttgaatccttctcttctgcaagatactatgtggctaatgatttgcctgaggttttttgtattttctgtgtaagtaatgccaattgcatttctttccagttcttatccttctaattaatttattgttctttattactatgttaaataagaaagacctctaatgcaatatttaattgaagccagttatttaattgtaggggtcatccttctcacgtttcaatctgataatctatgtcttttaaatattaagtttagtttatttacaattgctgtgagtattgaaataattggatctactttctaccatcttaatttttatttctatttgtccttttttataatttttgtttctttttttgattgaggttttttcttattctatttttattcctatttcaattattttagagaattgcccatatcacttaaaaagttcaaagccaaacaatgtttaacctctccttttttacattgtatggactttgtatgctgaagcttcattcagcctcctcctggttcacattgttattgttaatatcattatttttgtctgtcgtttattgtcagtctacaaattagatattattattgtttttgttttatacaggcaacatttatctggatttgcatagatgtttaccattttctttactcagtgttttatcaaatacatcctttaggaattcctttaatttggtctcttgttggcrtatgttcagttttcatttgtctattaaatgtttatcacttttttcgtgataggttgttctgctgggttcacaattttaggttgccagttctgtttttttgtttgtttgtttgtttgacacttggaagatattattctagtgtcttcaatattctgtctttggtctttggtcattctaattaccttttctttgtatatgatctgtcccttctccatggcttcttttaaaatcttctctttatctttggtgtttttcagttaaatatgtaatagaactaggcactgatttgtttatatttatcctgctcgagacacatgatgtttcatgtatctgtggctttttatagtttaaaataatttctggaaaagtcatagtcattatctctttaaccgctccctctcttccattctctttgttctctcttcctcgaactcctgttagtcatttgatcctccatatctctgaatatttttgtatttcttttattatttatttcttgtctctgctacattttacattgagtaaaagtgggatgtgacagtgggaaatcattagtgacttagaaattccagttggtcattgggccaattttgatgctaccttctctcttttatttctcacttyaaaataaaatttgcaaaaacaaaaaattaaatatagtatgagtccagttactggcctaaggagctaaaagcattctgggtttgtatgaagacagctgagttataacaaatgagagtactgttgtgtgactgcattaattattccctttttaaatgtacaagagcaaggcattctacctgactgtgttattgagctctgcagcatacatgtgacagagctaaaacaaacaagcaaacaaaagaaaccacagctttaggatactctgttcatgaatatagcctgaaaatgataatcaagaagtaaacttttaccagtattaaggaacattaagctgcctatctctcagtgaatttcagaatgatattttaaaagttagtttaggctgggcactgtagctcatgcctataatcccagcactttgagaggcagaggccaaggcaggaggatcacttgagccccggattttgagaccagcctgggcaacatagcaagacactgtctctaaaaaaaaataaaaataaaaaatcttagctggatatggtggtgtgcacatgtagtcccagctatttgggaggctgagatgggaggatcactgagtccagagtttgaggtaactgtgagctatgatcacactgctgcagtctagcctgggtgacagagtgagacctcatctctaaataaacaaaaaagtcagtttgtcaaggaaatgaaacccttctgaaaattggtgaatgcagtcctgtcagagatttagatttttgaagatgctgatacatagaagattggaagacatgaatatcttaaatgttaactacttttaattcattggtctaagactcagtgttaactgtcatgtataagattttattatttgttttatgttgcttctgtatataccttgaggtgtttaagaaaatatcttgtttcaaactgggattgaaggaagttatctgcagtctttaaaaaaaaattcttagaataattaagagaaatcattattattgtaccaagcctgtggttaagaagaaatatttatattttttctttctttctttctttttttttttttttttttgacagggttgttacaagttgagttgaaaacaagaaaaacttgcttttggcgccatcaaaaaggaaagccagatactttcctttctacaattgaagccatttactactttctggtagactaccatactgatatattaaaagagaaatacagagggcaatatgacaatcttttatttttctattcttttatgtaccagttgataaagaatgccaaatgctctggagataaggaaacaggaaaacttacacattagtttttaacaagccacttatgtctttttattttgctaacattaataaacttatatttgtgctttgttttttcttaagaaataatcatatataatgcctgtaagaccatttgaaaaaattccagtttcatatatatcacttcatatttcttgaaggaaattgtatctgggggaatttttcagagatactgttgattgaaaaacttacttcagaagttatttgctcagtgaaacctcagtttcattactacattttaatatagtgtgttatgtctctgtgattagatataacatattccattagatctaattagctatttatttcaacatctttatatcttttcacctgtactcatgaccacctttagaagtaaatggggttacaatctgctggctgaaaaataggtcataagtgatttttcttgaggttagtagcaaacataggcagaactagaattagaattcyggtatctagggctgtttctttaagtcctaaggttgttaaaagcagagactctggagctagactacctgaatctaaatctcagcctttctgcttatcagccatgtcattttcttccatttgtacaaagcaggcaatactgagcaactaccttataggaataactgagttaatatctaaggggctttcagcagtacctgaaatatagtaagtgttacatatatgtttactctttttattttatttggaattgtgaactgataataattgaagcctacctgctagtggccatctctgctgccaggtgaaaagagcctgacttagaatgaagtcagcgaaggaaagcagagtggagagaaaaagagagactgagtcctgatgacatcatttatttacctagacctagctgcttgtgaatagagccctactgtgctgaatagcttctgtctgctcttttctattctgctccctgctctgtgaggtaggttcctttgctctcttgcttttggttgggttcaacaaatgggaagcaccagtgggagattagaagttgagaggaaaatgaaatgatgttatttatttccctggctcctttcctgccatgtcatcatcagttggctgtgttcctctactaaatagtaccttatcaggaatcctatctcttctgttcccaagcagttaccccagttacctcactaggtttagttcctgctccctccctttaccccttttcacttagggttggtaatagcttacagttattactagccccagtatagttcactacaacttgttgctttacctaaaccctgctcatacatttgtaaatactgtagttgttttattacactcttctcaaatgtccccacttgaaatagccttctatttcttttggggactctgataaattcacctgtttgggtgaaataatagcacatttcctgaagtatatacagtgggacacatgatgttttatgggggaaagagttcttggtgaaattagtttgctgtacattacgttgtttccctcccagggattcagaaggcaaaacatattaaaggttctgaaaagtcctgaaataaacattttgaactttatttaagctgatatatcttaaacttacttgaatatgtagcacctattaacatgccatggaaataggacgtttggagtattgtaattaagaacaattcctattaatatacatggggcaactgagaattaaagaggtaagtaaattattgatagatcatacacctagttagtagcagagcctgttctagaatctggaacttctgatttggtttggttcagtaaggtcaccattatattatgctattcataaaaaggaatgtggattatataaggcttgaacattattagtcttacagtcttagccaaataaactaactggcttgcttattttagcagttattctacaagaatggaattaaaatagattttttttttcatgtttagaacttggccctgggaatagaggaaggcttgaattgatttaagcagggccaaagttggatttctctaggctaaatttggacttccctgagccaaaatctattgcatttaactggctttacaaaccaactaaacataacagttcagagggaaaagaaaaaaaaaagcgagagacagagaacaattctatcactcatttgcctccatctctcagctggcataagaaagatgacccacgtacttcataagagcctaatttacagctaaggccagataaaatctcaggttcttttcaaaagaagttagtaatacctattagaacaatgaattgactatacttgtcttagttttttttgtttgttttttgttttttgtttttttggtgtgatagatgtaacagtggccctaattctttatccttgcttgtattcatggtcatttttcaggttcctttgaagtactccccccactgtgattctgggtcatctgcattcagagatttagtgcatttttacttacacttgtgcttctgctgttgacataagaatatgcatggctgagttagcctgctggagcatgagactccatggaacagagccaggttgccctggtcaccctcactgaatcttgtctagattggctgatggccagccaaacccaagatatgtgaatgattccagccaagatcagcagagtcatctaactgacacctacctgattccaaacatgtgagcaaggaatgtctattatgccaccaatgtcttatagctatttattgtggctatagatatctcatctttggatgcattatcagatcatcttcttcaagtaccttagaagattctcagtctcatgtttcttgggctcttgaccacttgctttgccttagctaccacctcatatagtaacagattaccagcaggtttgtatgattcctctgcttgagatcaattagccatatgttcagaatccctggcctataacaacacttctgtgctttaaaaaccccatgccacaatgactgttaaaagggctaggcgatgtagtctggtaggtttgtgaagttaactgtctgaaaaacttggatcaatggactagaaaaagctgctgggtaaattgctcttcttctgatggactgtatagagacactgtttttcatcttgcctgtccagaagcgtactctgtggccaagcaagtgtacttgccacatgattggcagtgtctcttcatggcttttcatgaaacagcagcaagtgctacacagtaatttatcagtttgcatttgcctcccattattgccagcctcacttcctttcttcctcgctcttaccagcctggattgtacctttaataaagtagtggatatatttcctttagggtctctttttctagggaagtcaggtgttttagtctggatttagttagaaaagcagcatcgttacaagtattacatgaataaagaagtttagtaaagaaattaaggtttaccccaatgtgagaattactggggtaataaaggtctggaaggctgcagcagaagagatttagagaagcagtgactaactaggtcagccggagattctcaaagtactcatgacttcatttgtagaaacatgtatatcttaagcatatcaagtgtctcattcctctaatctttctaggagccctttggttcatcctgaaggtccccctaaatcccttcagaagtcttaaaaaggagtaaatggccacaccttttatttgttcttttctttgaggccatgttaatggcagtcccttgatttggtctttgtactaggctgtttttaatgatcacattttatttgatgagaaacaattttattttctagttctgcatatcctaggttatgtatttcatttcagttccatttccatacccattgccttaattttgagcttgtctgtttcttacatttctcattttgacagaataagctgactgttattaagtacaatagataaggtacctaagagcctcgaaacatcaccaaataccatgaatgcattaggtatattttttgtcttccatgttactggaagcattaattatagcaactttttatctccaaatactgacaattaaaagaccctagtgaaaactttaaccaaacacttactgaccctacattgaaggccaccagccaaaaatcaccacccatacataagagccaaacatcactagacacttggtgaaatccttcaaatataaaaggggaaaaggaggggagaaaatccaaaggaaatagacaaacggagaataatggcaacaaaaaaaaaactgtcttcaaaataagagtatattatattcacaaaacaagaataggagagtgtgaaaaagaacaagcaataaaaaagatctcagaaatttaaaaagtgattgctgaaataaaaattaaatataagagttgaagataaaatatagcataagaatagaaaattctgaattccaaatacctaaggccaatcttagttaaaagttgtaaatgcaaccataggctacatgttacattgtatttaattaaaaaccttaagaggaaaggcaatagagcttgtaacagctattacccttggttgtaaaggagaaggttggagattatttgtataccaactacttaagtttacaaaaaataatgagcattaggtagatggaatgaaagtctattcatacactgtatattaagctctatatacactgcatatcatcatcatgacattgagtttctagctggattgcagagatgagccaaagcgcttctccccaaattattatttattcatttttgagacagagtctcactcttgtctcccaggctgcagtgcagtggtgcgatctcagctcactacaacctccacctcccaagttcaagcaattatcatgccttagccccccgagtagctgggatcacaggcatgtgccaccacaccccgctaatttttgtatttttagtagagatggagttttgtcatgtttggccagccttatctgaaactcctgacctcaagtgatcctgcctttgcttcccaaagtgctgggattaacaggcctgagccacaacacccagcctaaattatttttaattatgacattttttgtattcccttgaggcactgacaactatagtcttattttatatgttatagtgaatcatatttatctcattatatattacagaatattttgtttgatggagaaaattcactgacctgtgctgtaatgtttataccagcaattagctgattgatttactatgacctcactctttattcagcagttctgccactattactagctaatccaacaacgaggccttattttggctttctttcgaaaggtcatttctgaccccagcttgaagtttgtttattttcacttgaagagatctctcagaaagtcaaagaaaataggaggaaaaaaacttaagattaagggccaatctaagaggtccttcatttgaataataggagtaacagaatgggaaaggcgtggaaaaaaatttgtgatttctaaaattgaggacattaagtcattagagtaaaaaaaagatgtacattaaggcttatcatcaaggaatttcagaacactgtggatagaaaatactaaaagatttcaaacagaagaaataggtcgtatatcgaccaataatcaggatattaaaggacttcttaacaacattggaaactagaagacatggggtgatgcctttagaactttaagtgaaaatagttttctatttggattctatttttagtcatgcaattaatcaagtatgaatatagtataaagacacagaaggtctcaaaggtattacctcccatatattcttgagataaagatgcttaggagaatactgaagatgttttccagtaaaacggagaaggaaaccaaaaaccaaaaaagagagcattaagaagtcagcaggccaggcgcggtggctcacgcctctaatcccagcactttaggaggccaaggcaggtggatcgcctgaggtctggagtttaagaccagcctggctaacatggcgaaactctgtctctactaaaaatacaaaaattagtcgggtgtgatggcatgtgtctgtaatcccagctactcgggaggctgaagcaggagaatcacttagaacctgggaggcagaagttgtagtgagccgagatggtgccattgcactccagcctgggtgacagagtgagactccgtctcaaaaaaaataaataaaaaaataaaaagtcagcaaagggaagtttcagggtttcaggattcattcatccattctaaaaaattttgagtgcatactatgtgtcaaattattgtctaggtgatggctatagcatgccgaggtagtaagtgctaagaagaaaataaagcagagtaaggaactgatagtgactggtgcaggaaaggggtgccagtttaaatagcatggtcagatggaaaagcctgtgataaggtaaaattgagcagagacctaaatgagagagagtgaaccatgcgaataattaagtgaataatgttttaattatagggaacaatatgtgtgtgtctatatatatatatacacacaaaggtactgaggcagcagtatacttggcatgtttgaggaataacaaggacactagtttggaacagtgtgtgggagggaaaaaatgatagaagatgacatcatagggagtaatggtgtggagccatggtaagatgttaagattttactctgagtgatgagataggaagccatcagagaatttaagcaaatgagtgacaggatctgacttatatttttaaaggattatttggcttctttatgaaaaatagactgcaagagagtaagaaataaaataggaagatcaattagaatgctatttcagtagtccatttgagagatgatatttgcctggacaagggttgtgatcatgggcgagtggtacagaatgacaagatcctgcatgtatttttaaggtagagccagtatttgcagatagtttagacattgtggtagatatgaaaatgtgctgcctatatcccccttctaggaaggacttgctaattagctgcagggagtgtgaagaacagaaatccaccagtatcagcacttcatctgcaacagctatagaaaaagcttcacctgaggttaccctcgtcttagatctcagggcagccctcagtggagatgtaaggccttgctacttcagcctcatttattacactgtcaggcaaaaccttcctcagagctccctctattacaacttaatttcttcttctgcccaatcctgcttcctccccttcccctgaaaggtgacactttctaataaacatcttacaccccaaactccatctcagcattcctctttagaggactcgacctgtggtaattgttagtaggagtgatctgagctgccaatgagaatcccatcacatgtggcacatggaacaaaagcccatggctcaaggtggtaacttttattagtggtaaaatgagaagatttacccacggaagagaatgtgccagcaagtgcagtatatcaggtatttgagactcatgaaggaaatagtaaatttaagaataacagaattgaatggccaagtgccactaatgctctgtagaaagag

SEQ ID NO: 98130 - DNA, 13246 bp, Homo sapiens
tctaaacaaccaccgatagcgctgagacagaatggtgtccaagatatactactgagtgagaagaggaaattacaggtcacccaggacattacgcaaggcgcacactatttgtatcaaagaagggtggccacagacggaggaggctcccaccacaggccaacttcatcattgcaaagcctccgccagccgatccctggggaaacagcgcctccttggggccagagcgctgtatctgcaccccacacctccgcattggaggtgtcaggatggctgaggccgccttggagggtggctgcttcatctcaccgacccctggtgaagacgctaagaaatgatggtgctctaaaagaagtctctttggctgtttcgtttatcccatcagaaaagaacagagattcaaatcttgctatcaccatattgccttttcatcatcagggttagccacagcacaagctattgagaagctgcttggcaaaactcctgtgcccaagaggattgtgtcttatgggcttcagacacaatctctgccaaggagaacctgcagtctaggatgaggaaacagttatagagagtagatagataaaaagatataagtatttacaaatccatagtatagggttggtaataaattactagaacaaacaggaactgatttattacttacatcttagttctttccaaaaaaaattgtgagttacaatatgaaactgcagaggatgtcaaatcatttagggacagggagagcacgaggcttggagaaggaaggacagaattccatccctggccctctcacttcacacttggtatgactcttcactgccctttgacctggagttttgggggcaccaaactctaggtgaaaacctctctatacaatcaactcaaactgagggaagagagagaccctctcatattgttttatactgttttatactcagtacctgttttaagaaaaaatgacaaggaagtaaaaccaaagacaggcagcccggcgccaggcccaaaaccagtcctgggcctgcctggcctaaacccagtagttaaaaatcaactcacaacttagaaactgatgttattcatagattccagacattgtatagaagaacactgtgacactccctgccctgttctctttctctctgaccaccggtgcatgcagcccctgtcatgtaccacctgcttgctcaaatcaatcacgaccctttcatgtgaaatctttagtgttgtgagcccttaaaagggacagaaattgtgcatcggggagctcagattttaaggcagtagcttgccgatgctcccagctgaataaagcccttccttctactactcggtatctaagaggttttgtctgcggctcgtcctgctacaaaacctcttggtatgatactcaagactaatattaaaactgatattaatcatcctccaggaactaagtggggtaagtcaggaagtcagatgtttatgaaattatctctaaaacaaaaatgactagtaaaaggtttgagaactaggtgatgagataatctgtacaacaaacccctatgacacaagtttacttgtgtgacaaacctgcagttgtacccctgaacttaaaataaaagttaaaaacaaaaaaggtacattagaactagccctttaaaatctgaacatgattttttaaatatattaagtactttgagaattttacttagaaggttctttgtggggaaaagagagatgagactgttactgtgtctatggagaaagaagtagacataagagactccattttgttctgtactaagaaaaattcttctgccttgagatgctgttaatctgtaaccctacccctaaccctgtgctccctgaaacatgtgctgtgtcaactcaaggttaaatggattaagggctgtgcagggtgtgctttgttaaacaaatgcttgaaggcagcacgcttgttaagagtcatcaccactccctaatctcaagtacccagggacacaatacactgcggaaggccacagggacctctgcctaggaaggccaggtattgtccaaggtttctttccacgtgatagtctgaaatatggcctcatgggaagggaaagacctgaccgtaccccagcctgacacctgtaaagcatctgtgctgaggaggattagtaaaagaggaaggcctctttgcagttgagataagaggaaggcatctgtctccagctcgtccctgggcaatggaatgtctcggtgtaaaacccaattgtatattccatctactgagataggagaaaaccgccttagggctggagttggcacatgctggcagcaatactgctctttaaggcattgagatgtttatgtatacgcacatcaaaagcacagcacttttttctttaccttgtttatgatgcagagacatctgttcacaggttttcctgctgaccttctctccactattaccctattgtcctgccacattcccctctccaagaaatgcccaataatgatcaataaatactaagggaactcagagactggtgccagcgcgggtcctccgtatgctgagtgccagttccctgggcccacttttctttctctatactttgtctctgtgtctctttcttttctcaagtctttcattccacccgatgagaaacaccaacaggtgtggaggggcaggccaccctttcagttcttcacttaatccaagcacgtttttctgaagaaaacagcacaggcaacatcatagcaaaataggcgaatgaaaagtgacagttctctggaagagaaccatcattatcaagaaaatttgggccgggcacagcagctcacgcctgtaatcccaacactttgggaggccacggcgggcggaggccgaggcgggcgggtcacctgagataaggagttcaagaccagcctggccaacatggcgaaactctgtctccgctaaaaaatacaaaaattagttgggtgtggtggcaggggcctgtaatctcagctactcaggaggctgaggcaggagaatcacttgaacccgggacgcggaggttgcagtgagctgagatggcgccactgcactccagcctgggcaacagagtaagactccatctcaaaaaaaaaaaaaagacagagagagagaaaaaaaaagaaaatttgaattcatatgaattactttattacacttaatgttttatatgattaaagaagcttttttaaaataattctttagagaatcctatataatcagtgtagacagaatgatagaaagtctccttttgcacatgttgtcatttgtttcatactaattattgccaggcacaaagtgtgaggatttatagtccaagctatatagaaatgtcattattaataaataatgcttcacaataacaacaacaaaagaatgactagtgaagtctataacaacagttatgtggaaagtgctgggccaggcacggtggctcatgcctgtaattccagcacttgggaggctgagacgcatggatcacctgaggtcaggagttccagaccagcctgcccaacatagtgaaaccccatctctattaaaactataaaaattagccaggcatggtggcgggcgcctgtagtcccagctactcaagagggtgaggcaggagaatggcttgaacctgggagggggaggttgcagagatccaagattgtgccactgcactccagcctgggcaacaaaagcgaaactccatctcaaaaaaaaaaaaaaaaaagaaaggaaggaagtactgaaaaaagcgctaaaggagctatgattttgactcagtaggaactgagttaggcctcttggaacagatgaactatgatcttgggagaaagcggttcccagcaaagtaaaggcctagaggagaagccacacatggtccctcagaagaatggatgtcaaatcagtgtggcaagaacataaagtacacagaggggagagggaggcaatggaagaaaagtatggaaaggtacttaaggctaaacctaggagggctctgagcgctccttttttatatgagttttattctagagatagtcagaaattatagaaggctttcgaacaaaattagcacacgctcaggcatgtgctaaagcatagaacaattattctgttagggagtcacttgaggacattctccagcaaaatgatgaagtaaatcaaaaatgtaagattcatgtgttggctgggcatggtggctcacacctgtaatcccagcactttgggagaccaaagcggatagatcacaaagtcaggagttcaagatcagcctgaccaacaaggtgaaacccccatctctactaaaaatacaaaaattagccgggaatggtggcatgtacctgtaaccccagctactcaggaggctgaggcaggagaatggcttgagcccaggaggcagaggttgcagtgagccaagatcacaccactgcactctggcctgggccacagagtgggactccatctcaaaaaaaacaaaaacaacaaaaaaattcgtgtgttagtcagggttcccagagaaacagaaccaataggatatatacatagatacataagagatttattatgggaatgggctcacgtgattgtggaagctgagaaatccctccatatgccctcttcaagctggagaaccaatccagaaggtgctggatccaactgttaagaaaaatgaggagaggtcttcaggagagagtagtcaacagacctggggaacaatcaataatatgaacatggaaagaaaagagaaggaatccaaggaaaggagaggaccctggccattttctactacactcgggaatggcaacaaattaaagacctgctttgggaggccaaggcgggcagattgctttgagctcacgagttcaagaccagcctgggcagcatggcaaaactctatctctacaaaaaacacaaaaattagccgggtgtgatggtgtgcacctgtagtcccaggtactcaggaggctggggtgggaggatggcttgaacccaggaggcggaggttgcattgagccgtgatcacgccactgtgctccagtctgggtgatagagccaaaccttgtctcaaaaaaaaaaaaaaaaaaaaattaaagatctgataaggcagataatgaaagaagaaaagaaacattgcacacttacaaagaatcaggtgaaaagaaagaaattttttaaaaaagaaaaaaaatgaacagaacccagggatggggaaacactacgcccaacaaaaactatcatcatcatggatgatctgaatctgcagtgcatgcattttacacagtctcaatagtgcaaacacaagttatttatctctgacttctagagtccacctatggcccaatcacataagacttaactgtacagtagttccatatccaaggaggaaagagttccatataaaggggaaagaaatgaagggaaggaaacaacaccaatatcctgctcttacaatgtggaaaggcaagagatattgtttctagttgatagaactagaaattaagagtaagtttattacttaaatttccaatgataggccgggcacagtggctcatgcctgtaatcccagcactgtggaaggccaaggcgggtggatcatgtggtcaggagattgagacaatcctggctaacacggtgaaaccccgtctctactaaaaatacaaaaattagctacaggcactgaggtgctgaggcctcccaaagcagctacagggaggctgaggcagaagaatcgcttgaacccaggaggaggaggttgcagtgagccaagatcgtgccactgcactccagccttggtgacacagcaagattccgtctcaaaaaaaaaaaaaaaaaaaagaataaagcagaaaaggagaagcagtaaatgagccaatctgcatctagccaaccaagaagtcagtaagtaatgttaaatcagggaattgtgggtgtatacatttatctgtaaaagatgtggtgcagcttttccctggtgtcattccaacctgtgtggctgttctcttgagcagtggtcgtttatctccatccacmttctctcccacctaagtgcgtgccaccacccgatggaagattcgatggacatggacatgagccccctgagaccccagaactatcttttcagttgtgaacttaaaggccaacaaagatgatcactttaaggtggataatgatgaagatgagcaccagctatctttaagaatggtcagtttagggctggtgcaaaggatgaatggcacactgttgaagcagaggcaatgaattacgaaggcagtccaattaaagtaacactggcaactttgaaaatgtctgtacagccaatggtttcccttgggggctttgaaataacaccaccagtgtcttacggttgacgtgtggctcagggctagggcatattagtggacagcacttagtagctrtggaggaagatgcaagaaaagatgaagaggaggaggatgtgaaactcttaagtgtatctggaaagcgatcagcccctggaggtggtagcaaggttccacagaaaaaagtaaaacttgctgccgatgaagatgatgattatgaagatgatgatgatgatgaagatgatgatgaygatgatgatgattttgatgataaggaaaccaaagaaaaagcaccagtgaagcaatctatatgagatactccagccaaaaatgcacaaaagtcaaatcagaatggaaaagactcaaagccatcgtcaacaccaagatcaaaaagacaagaatccttcaaaaaacaggaaaaaactcctaaaataccaaaaggacctagttctgtagaagacgttaaagcaaacatgcaagcaaggatagaaaaaggtggttctcttcccaaagtggaagccaagttcatcaattatgtgaagaactgcttccggatgactgctattcaagatctctgacagtggaggaagtctctttaagaaaatagtctaaacagtttgttaaaaattttccatcttatttcattttggtaacagttgatatctggctgtcctttttgtaatgcagagtgagaactttccctaccgtgtttgataaatgttgtccaggttccattgccaagaatgtgttgttgaaaatgtctgtttagtttttaaagatggaactccaccctttgcttggttttaagtaggtatggaatgttatgataggactaagtagtagcggtggtcagacatggaaatggtggggagacaaaaacatacatgtgaaataaaattcagtattttaataaagtaaaaaaagagagagagagagagatgtggtgcaatctcccagaagatataaccaaaagttgtaaagtggctgcccctaggtagaaatgccagcactgggaggtggggggagtagggagtggtgatgggggagagaagactatacctttcattttaaattattttgtgccatttcattttttaactatatgcaatggaataaaattatgtgcttttcctctctcctgtatttctcttcatatcatgactctcctcccaatgagacttccagacttcagttttgtgtgtgtggtttttttgttttgttttgtttttgagacagggtccaactctgtcacccaggttggagcccagtggtgtgatctcagctcatgcaacctctacctcccagactcaagcaatcctcccacctcagcctcctgaatagctggaattacaggtgtatgccaccacgtccggctaatttttttgtgtttttggtagagatggggttttgccaggttgcccaggctggtcttgaactcctgaggtcaggaaatccacctgcctctgtttcccaaagtgctgggattacaggcatgaaccactatgtccagccattgattttgagtttaaaagagacagcccagatataaatcaaaatatttataggaatccaaattcaagcacccatacatgttccaccctaatgaaacgggaaaagttccttatcccccttgcagggcatgcaacagggggagtggctcgcttcatcagtgccccactgctcaaacctctaggggaagcatacagatgggcagattgtggggctctgacccctcggcagcacctggggtgaatgcttacagctcccgaagccccagtgggcgtgtgttacagggtgctcttttagttttgccatccacaggcagcttgtgttaatcacctctattagaccttctgccttatcacaaggacagagggctttctgtatccctgggttcctgccttggtgtaccagaagtatcggatcacacatgggcttagagaatgagtgcaaggttttttactgaggagtagctctcagcgaggccagaagggggatggagtggaaaggtggttttccctgccgagccgggctgcccagtggccaggctctcctccgactgccccggccaaactccaccatggctccactgctcgatggcctgccggcatctgttggcacctgtcagtgtgctcttccaccaacgtgctcctctcggcgtccagccgcttgtgtgcctgccccctacgatcttgaggtgtttttttgttttgttttgttttgttttgttttgtttttgagatggagtctcgctctgtcattcaggctggagtgcattggcatgatctcagctcactgcaacctccacctcccgggttcaagcatcctcctgcctcagcctcttgaatagctgggattacaggcacgtgccaccacccccggctaattttttgtctttttagtagagacagagtttcaccgtggtagccaggatggtctcgatctcctgacctcatgatccacccgcctcggcctcccaaagtgctgggatttcagacttgagccaccgcgcgcggctgggtctcgaggtttttatgggcacaggatgggggcgtggtgggccagagtggtcttggaaaatgcaacatttaggcctgaaggcaggagtgcctgtcctcacctaggtccatgggcacaggcccaggggtggagccctagccagggaccatgcccttctctacccagcacttccctgcccccatcccatatcactaactgaattacaattctgtggtcagagaggagaagaaagttagaaagaagtgctattgcacaaaatgctgatgtgggcttcctaaaaacagcctcaggccccgttcctgaacaaattcatgggtactaaatctcctaaataagctcagggatctcagagttgaaacgtatgtgtcccgcttcttgtttgaaagcgaagctcaagataggaaggtggcaggctcaagatactgttacacattctagaatttggagggagtctcacagattcccatcctgcccccagtggggtcagccaaaagccttttcctcatgtagctgagactggtggggatgggaagttgctaggcagtaagaacgtagtaaaggcagcctgccagttccccagtggaccttcagaaaatgttagttgcggccaggtgtagtggctcacacctgtaatcccagcactttgggaggccaaggtgggcaaatcgcttgaggtcaggagttcgagaccagcgtagccaagatgttgaaatcccatccctactaaaaatacaaaaattagctgggcgtggtggtgcatgcctgtaatcccagatacttgggtggctgaagcaggagaatcatgtctgagcctcgggagatggagattatagtcagccaagatcgcaccactatactccagcctgggcaacagagcgagactccgtctcaaagaagaaagaaagaaaggaaagaaagggaaggaagggaaggaaaggaaggaaatgttagttgcttctttctttttttcttctcttcctccctcccacccccatttcttcttcgtcaatctctctaatatgcctccttcatttctgacccagaaatgcccagtccctgcccagtccctccttttctggtcccacctcctctccccaactctggcattccctaacccaaccctcctcctcctagaacatccagagccactgtagttagaatcacttccttggggctctagtcaacctccctagtcacacaaatgggttactcctcccttcaaaaatccctctaaaatgatagtaaacaatcttaaaaagaatactacccacaaagacaggaagaatgggagagatgacaatggcaggtaaaaaaggtcactttggaagatgaataacaaatggcagattaaaggaagttgtaatctacttgagaggtgaatccatttgttctggagaacgcttgagagactcagggcttagacacacaggaatctcaaagatggggaggcaggagtggcaggtgttcccagttgtctctccaatagcctgtcacccttccttcttgccaagagaccttgattttatccagggccatgatgtaccctgctaaaataaaaactcagactctcttgccactaggggcagccccccaatccagttctggccaataaaagtccacttggaggacttctaggaaagctagagagctttcctgaattaaaggaacaaaggggagctggcaaaagccttcttccctttgcccttccccattccttctgccccaatagtgatcaaggtgcctaggagcaccataaatgtgaaagccacatgctgaagggaagagaaggagatgggacatctgtgtcaccttggagctgctgcaccagcctgggcagcaaccactagatgtcttgttgttgttgttgttgttgttgttgttattgttgttttcaaatcaacagttatctggttaaaccactgtggtcacgtttcgtcagggacagttgaatacaatccttaatccataaaatgattgttgatggaacatcgtctacagaggagttagccagattccttctcctatcccacagagccggacaaaaagatgcttcctctttcctcctcaaagaccagaagtttattttctagagaatttatctaagagactttggattgggatggggaatacgaagcccatcagagaagtagataaacgcatgaggctgagatgggaggatcaaatggaaaccaacattctacccgcttgggccaccagccaccttccccagcctcagccagatcactgaattccagatcaatcaggaaaaacagtagagatggggtttgagttagggctaggcatagggtagggttcaggttcctataaatagctgaaaccaaatgatggtgagctgtattatgatgacacaactaggctcacgaccagttgagacgtgctaaaataaccctcttccaagaggtgagtgtgggagacagaataacggccctcaaaggtgtcacatccgaatctccacctgtgaacactcctcacgtggcaaaagggactttgcagatgagaatagaaattgtaagaaagggagattatcctgggttatctgggtgggcccaatgtcatcccaagggacttcctttaagaaggaggcaggagagtcagagtcagaaaagaaaatcgtgatgatggtgacagagagagaagtgacgtagcagcagaaacagaggccagagggagagagagttaaagatgctaggctgttggctttggcaatggaggatgaggccatgagccaaggatacaggcagcttgtagaagcaagaaaagacagattctcttctggagcttcccgaaggaactcaaccctgcagacccagtttgaatttctgaccaccagaactgtaagataatgtgtgttgtttgaagccaataaatttgtggtaatctctaacaataggtcactagaaagggaatgactgatccttagtggggtgccagggagaaggctttgcaggaggggttcatttaaactgggccttaaggcaggaaacgaaggtaaaacaggagtaaagggaattcccaagagtggtaaaatatgttatcagttgtgggtaaacaagaagggaaaggactctcctatccacaggagatcaatcacagtttgcctggatctgtccctgtttatgcccattgtcccagtataatttttttttcttttgattcggagtttcactcttgttgcccaggctggagtgcaatggcgcgatttccactcaccgcaacctccgcctcccaggttcaaacgattctcgtgccttagcctccagagtagctgggattacaggcatgcgccaccacgcccagctaattttgtgtttttagtagggacagggtttctccgtgttggtcaggctggtctcgaactcccgacctcaggtgatccgtccgcctcggcctctcaaagtgctgggattacaaggcatgagccactgcgcacagcctagcgttgcttttcaatctgcaattacaaaatcgtggcatgccacttcacgcttctcgccaccaacccaaccacccagcccctagcctggtcaggagcaggaggttccccgcgtgccaccaggaagctcgggccggccaagagcgtagactcttgagaggagtgagacaggtgcgcgccagccggccttcggggctttatgggaactgggccgtgcggcggtcccgccctcgtgcgcaggcgcagaaccgttgtgaccagagcggtggcgggctgagcggtttcgagccggcgtcggggagcggcggtaccgggcggctgcggggctggctcgacccagcttgaggtctcggcgtccgcgtcctgcggtgccctgggtaagtcggcggccctcccggagcagccgcccgagacgcgggagggcgaatgaaataaacgaaaatagacattttcccgaaggcgaaatagacatcctccttcggcgccggggcttggaggcgggcggcggtgggcgcgggttaacgtccccggggaaactgagaccccagcaggtccgggccgggggcggagaggaacgcgggagggcgccgggcccctgggcttttcgtaccaagctcgaccgagccgcccctacccacccccagctgcgaacccagccgttcagaacagagactgggcattgtccccacagggtctcccgaggaccttgtacccgcgcggtttccttgggctggctttggacgacgctttcgccttcctgctgcctaggatccgccgacatgaatcccatcgtagtggtccacggcggcggagccggtcccatctccaaggatcggaaggagcgagtgcaccagggcatggtcagagccgccaccgtgggctacggcatcctccgggagggcgggagcgccgtggatgccgtagagggagctgtcgtcgccctgg

SEQ ID NO: 98131 - DNA, 93686 bp, Homo sapiens
  misc_feature (1)...(93686): n = A,T,C or G
tatggaacaaactatccaggtttttgatatgtaaaagttttctgagaatagaaaagaccctgggattgttaagcaaagcaaaaaagtgcttggatgcatattcttagtatgccttgaagtgatggacctaagtcctaagtttctttgcttttcatctttatcacattttaacttgaattgccaattgaattggtacaataataatgtcagggaaaagaggaaggtgtgtgttatttcgttttcacactgctataaagatactacccgagactgggtaatttataagcaaagggggtttaattgactcacagttccatatagttggggaggcctcaggaaacttacaatcatggtggaaggggaaaaatggaccttctttacaaggcagcagggagagacaaacaaaggaggaagttccaaacacttacaaaaacataagatcttgtgagaactcactcactcatgagaacagcatgggggaaaccacccccatgatccaatcacctccctccctggacacgtggggattacaggtccctccgtcaacatgtggggattataaatagagatcagatttgggcagggacatagggccaaaccatatcagtgtgtgcatgtgtacatgcatgtacatgtttcccatggttttgaagaacagatttatgacaatgaatatcagtatcacattcttagtgctccaaattactatctacctgataaaagttaggaaagtagaaactagaaaatattaaaagattatgttattttagttgggtgttttaagaaaaatatggcaacttctaggtaactgaacagactttgacatgaaatatgttgctgttagattagggacccacaagatgatttcagtaagtactgtgcttcgggtagtaaagagatgcatgaacactaaggccttctgccaataaaataagagaggctacggtttttgtttttgtttttcaatacttttcaatctttcctatgagcatctcttcttgtcttctccagattgtgtccattaaatcagcagataagaattttaggtgtggtaatttctcagaggtatttgcttattgggagttgggggaaaccttgaagatagtaagatttcccttagtaaatattaggagaatggagaagtgaagggggagagaaagctctgaatattattccccaactgtcacctcagtgcctcccaaatcagaagtttcttttcttcaatcttggactgcaatgattcccgactattcttcaggctaaaagactccctctttggagtgaatgaataaatatacacttggcaaactgtttgaaaaaggctactgacccttgatctaagaaatcttgagcaacaggagacctgaatttaaatgtcaatttgtatctgactcactatttgaagagaatgaattactcatttgattgaatcacttaactctatggtctgaggtgtggtactgaagaggaatgaatggctagcttcacacatattgtgtactgagtatgcaactgataataaatgtgtttctgctttgatgagaatgatttaccaagttcctaattgtgcacaggatttataaacattcagaatatataggataaatattaaaataaattagggcttgttacgatgtcatggcacaggctgtctattattataaaaagggaggaggcctgctatgtattaatcgtcaggttaccaaagctctgggtaaatttggtaagaatgttaagagtagcttctcagcaagtactgtgtttgattgaaaagaggccattccatctacttggacagaaatgtggttatattagcctgttttatgtgataaaaggtttttgaaaagttttaaatctctagcattggactcacaatgtcctaatattgtgttcttttctgtaatcagtcatgaataaagaaatctatcttctagcactggatgccaatagatttgaatgtgagttcagacctatgagtattatagacaaagactagattgagagctgggtacagtgattcacacctaaaatcccagctacttgtgaggctgaggcgggaggactgcttgtggctaggagttagagatagatagcctgggcaatacagttaggctgcatctctatttaaaaaaaaaaaagactagatagagtattattttaaaaaataatgttatgctgtagtagttctattttactctttttagcttgatataaaagagcaaaagggactgggcaaggtggctcacacctgtaatcccagaactttgagatgccaaggcaggtggatcacttgaggtcaggagtttgagaccagcctggccaacatggtgaaccttgtctctactgaaaatacaaaaattagctgggcgtggtggcacacacctgtagtcccagctacttgggaggctgaagcacaagaattgcctgaacccaggaggcagaggttgcagtgagctgaaattgtgccactgcactccagcctgggtgacagagtaagtctctgtctcaaaaaaaaaaaaaaaaaaagcaaaaaggcagaaaaaaatttaatgtttatcaagttcagtgttgtataatgggcactcaatcatgtatgtcatcattaaaggtcacaggaagcctataacaggtaatgcttccattttggtcaaggagcaaactgaagttcagacaccaagatggcagagttagaatgcatactcaggtccgttagcttgtgatctttccatgaaatcacttagccaaaaagacaaacccaaaaacaaaatctggtaggattaatgtaagtaaggaagcttctctttaatttcttttggtttagatgtgatcttatatctgtaggggggaaaaggtgaacaatatctattgcaaaaagaaagatgtttgtaattctacaagtttgttgactaggacaagtggaaatagatgaaaatggaaaatgtgtattaaacagtatataaatagaaggtaataatttttctgagtcctattgatttttgaaggtaattttaatattagtatcaaagtcttctaatctctaaaatatactactattcttctatttagctagagatattgtaaagctattgaagactcttataagattcttaggaaagctgctataaaacacagactttattatttctgacctcatgtgttcctactttgttcttaccccaattactgcatccctcatattgcatcctaatcattactctgagctctctaccagcagttgggtttcctcaaggcagggaccaggtctctttcactgtggtgtccatcataaccagaacagtgtctgaaatataataagtactcagtaaatgtttatggaataaatcagcaaacactaacaaaaggattcatctttctgatccgtttctctatttccaaaatgagaagatagtagtaatattttcctagattgcttatcaggaatgtatgataactgttcatacactctttattggagatatgtgccacagacataaatggctattaccatgattagtaagggggtaattattacaatttttattctggttgaaatctaaccaattaaaaaatctaaccaatacacgatcacactggtctttaaattaaaaaaaaaaaagaaaaatatctaaccaataaattttcggaaagaaatgtaggctatttgaggtaataggtagtaggagtgtctatccttgggcgctcatggtagaaagaaaagcagaaccccaccgcggaaatgagaataatccctcactaggtggctctctttgccgtgagtgggcggcgcgtcggggcggggcgggtgattgggggcattgtactgccgcaagcgctgcgtgtcacgccgcaccataccaggcgctggcagcatgaggggcatagtccactttctatttcgttaatgacaatctgtccttggaatttatttcaaagcaggttgtactttcgtttccgctaaacttatacctgatgtttcaactgaacattggtatagtcttattggtgcaggtctcagagaaggatcttgaaagtgcctcttcacctggcgtagaaaaagacagcaggaatcaggtagccaaaccagaccaaaccaaatcaaaatagcccattaaaatccttattttaactatcctatgagggctgcattcttggaaggttttatatagttacatatcctaaagtactttgggatagctccttaagtgactccacaatacgaaccgaaaatataacttgtaaaacgtcaatttcttcaagtcatggatgatgaattttccagctatttctcatacacttcatattattattgacttcgttctttatttcagctttttggcccgaaacctgacacaaaacacacataataaatatccaaaaagatttgttctaagaatgaaacttcttttcctagactcctttcaccagacagatgtatctagggttcgttcttcttgatcctcttttatccgatgttttcctctctaactcaacgacacagaatgacgacttttaaaacactgcagacccgtgagaagagaaaggttgcagagcagggaggaacttggaggtctgcctttaataatcaagcaggatccccactgcggggtgcctatcagagtgatggcgctagtcagccttccggcttgtccccggcttaaatgatagaaaaccacgtgttagccttctaggatgtgttcccaccctcaccctggcctcctcgcggcaggctcgcgacagctaggtcaggagggagtacgcgggtggggtggatttgggggaggggtcgactcgccagaagtcggctatccccgtcggcagggaaggcatcgcggctgtcgtgtgccgctctcctccctcagggaccccgtccaggcgggatcccgcctcccagagcccaaggcagttgtggggaaaccccttgcccttcctcgccgcttggcgctgtcgcctcgccctcccgactccagcccgccgcccgccagcctccaggccatgcatcctcttcgcaggcccagccctctccacgcccggctctgagaggaaactacggaggtggttcccgctcgcaggcgggtggaaaagcccatggtgaatgcctcggggtgtccccccagttgctgtgggaagtgggaagggaggaggaagtggacttcaccaccggggagaactatatcgattcctaacttgggggaggcctttagatggaagggaagccaacggggaaccctgggtggtttcctgggaatccattggccaaggggagggtgaccctgtccgcacacatcggttactatgacaatataaccacagcctccagttgccatggcagctgcctatccaatccgattgtcttctcttcctctccgggccccaccttatcccctccaagagtctcccagcgtgcatggggaggggctgcagcgaagaggagagggggtccttcgagtcactctctacgcgcgagggaagacaggcgttgagggactgctgggaggaactgtaggaggaaggggcggcgtttccggtggggaagagtggaggcgtgcaaaaaggaagagggaaatcggcaggagtgataagaagggggaagactttgagtgtaactcccgttcttttggcctgggtgttcccggtggtgggattgggattgcccccttgcgcgggaggagaagggtggattggcaggaagccgccaagcgccaccagccggtctctcagaagccgcacaggcgccacacagctcgttgatcccaaaagggagcgctacagagaggcggaaatcactgagggacaggcgctgctgaaatctcgcgagagggaccccctccctcgcccggtcgccgacttcctctgcttctcctctttcccccgcccctcctccctccccctcccccccgggtcggagtgtccctgcgccccacgggccagagcagcagcgagagcagctttccccactccctccccctcgcctcattcacccccacccccctgccgagcgaggaggagccggaggagaggaagatggcggcggccgccagcacccgcggtgccgcggggccgctccgaggagcctgagagacccacggaggcttcgcgggaagacgcggcggcggcggcggaggatgagcctgcagagcgcgcagtacctccggtgagtgccgaggccgggctggtacgtagggggagcgggccgcaggttggggcatggagcarcagacaccgaggtaagtccggggtggcgggggagttgctgcgtcctctcctcgccgggcaggtcggcggagactgcaaggggatctgcgggagggggcggaacgggtatgggtgcctagcccctaccgccygggctgagctctgrcgaagccggctcgtcccggtgcgaggagggaggttggggaagcgtgagaatgtgcgcgcgcgcccttggtctcgggtttgctagcgaggggtggagagaaacgtcyggggaggcggcggcgaccccgagtggaggtgggtgtggaggagtctgatccccgtggcaggggactcgtggtgtggcgtgggattggttggagcgatgcatgagtagaggacggggaggaagtctgcacacctggggtgttggggcgggggaaccgcggagggcagacagggggagagggagaccgcaggaaactggagcttgttcttcattctcgggttgggagtattgaggaataatgtcatctgtagttagttggcggtgtggggaggcgtgaaggggaatagatggggaagtgaggaaagagggaggcactgtggacaaggttgggtttttcagaagaaactgggttagaatcagtgtagtcggaagataccattctgagagtcgtgtgtattcattaagagtggtgtaaggaacttgtatgtcagaggtagagtgacacatgggaatagtgtgtgtgtgtgcgagatgtgtgtctggggtggggggcgcggcgattgatgcacatttcaggatgaagatgtagataggttgaacttagtacctgatggcgagaacatattgaatggaaggacaccagcttttgtgtcagctgaaaggttccatggaagctgagtaagagcttggaggcagaggtaaagtgggtcaaaaatcttgatagagaaaagtaaggttgttagatcctgaaattaactggggagtgactactgcttagaaaaggggaagactttaaaattggtcctttttgtctttcaggagcagaactaagaaagggaggccttatggaaagatgttttttaaaaaattgtttcataccttgcggaggagggagttggatgaggtggaagtctgaaatgagtggaaaagtcactttagctgtttagtgacatgaaagtattgacgtgtgtggatccctatatgtatattgcaagaggtgtgtagttacctgatacatagggtggccattataatttttaaagtagtaaagttttattaagcataatagggagagaagagaatgatgagatatttgaacaatgcttgaatgcttgattttaacacaacatatatgcccagtgaccacaggacagttggaatgatgtctgtaatttgaggtcctttttttcatcttagatatccctttgttgtttaatatttcaaataaatatagctatgacaaagatctgttgtaggtgctatagagagatggaaaccatcagggtgctgattagtcttaaggaatttgcagttgagtatctgttaggcaagtaaattaaacagcacagagtgtaagtaccatgaaagataccaaacgttgccgggcacgggggctcacgcctgtaatcccagcactttgggaggcctaggcgggaggatcacctgaggtcaggagttcaagaccagcctggccagcatggtgaaaccacgtctctactaaaaatacaaaaaattagctgggcatggtggtgggcgcctgtaatgccggctactcgggaggctgaggcaggagaatcgcttgaacccgggaggcagaggttgcagtgagccgagatggcgtcattgcactccagcctgggcaacaagagtgaaacttcgtctcaataaataagtaaatacataaataaaaataaaagatacgaagtgttttgagtccaaaggcaggagatcacctgagcaatgggaggaaatcaggaaagactttgtttatttgctcattcatgtactcatgattcattagttgttttgttgatcacctgtatgggaggcattgtaccaacatctgagaatagaaaaagaacaactccaccctccttttacagagcttacactttgttagacttcaagaaaatggcacttaggatattgttcatccttaatgttcattttgacagatgtggattgagaagcggggaattccaaatggaaggaaactgagcagagttatgtaggtagggaagctggggggaagggaggtattcagtccagttagacaacaaggtagtgtgatatagctgagaaaacttaagagttgtagagattatcaagtttgaccctttccttttacacatgaggaatgtaagcccaaagaaggtaaaattgttgaggctcatatagctggtatgtggaaactaactgaaatgtaggtcttctaacttcaagtcagctgtagtacactgcatgtcagtattcatctgttctttccacaaatataagttgagaacataatatattctagtgttgagggtacactggtgaataaaagggtgaacatgggaggatatattatagtagaagggcacagtcagtaaacatagcagttaaatatatatcaggtggtcacaagcactaggaagaggaataaagtaagacagggatgtactgttttatctggacaaagtggtcggggaaatcctatttgataaggtgaccatatttaagaggatcctgaatatcatgttccataatttatagttaaaatgggtagacaatggagaatctgagatgatttgctagaattaatatgttcacagctatgtgttaggaaaatgactctgtgtaatgtagtggtggataacagagaaaagtaaggttgttagagcctgacattaattggggagtgactactgcttagaaaaggggaagacttcaaaattggtcctttttgtaaggttcttttccttacaaaagattccctttgggactttggtcctgaataaggtactggcagtggatctagaaagttatgaaaaacaaattggcagagtggtggtacttttaatggggaagatcagtggactttgagaggcttcttgttaatgtgccttatattttatagcttgacatggtagggaagacttccttagatgtggaatcaatgatagtttgagatgaacttagttctttgaagaagggagaaaaaaaatgaatacaatgatatttttcagctaaaattgagcaggcaaaatgggggaggcataggtcctggggtcccttaaagattcctggagccagtcttgtctcaatcttaggcatttgtcctaagtaaattaaaacaagtgttagaagtctgagacctaggtggtggttgtgggaatcataaaggcttgtgccagtctgaatttccctcctcctcttttagataatcattccatttaaagtctgcagtggggacactagagaatgtctttagggaagcattatgttcacgttctttgaaaatagaactgttggtttttatagacacttcagggaggatgccgagtattgctgaatggatgtggttggggggtgtagcaattgttttcgtgaccttgacttgaagaattttcttgcctacctttgtcagtggtggaagatcatgactgggcaatttttaatctctatagctacagatcctgcctcatgtagatgaaaattagttttgtcttggctgaattttaatttgttagagtaaatgagctgggatgtctggcattgaaatggtggggtggtgggaaaccaaggagcaagatggctgtttcagaagggtcagaaatgaagataggaggcaagaagtcccagtaagaccaataaagagagaattcaacatcaagggaactgaattagtctcaagttataaaaatagagcagagatgaaaggaagaaaacctatcttctatgtgggaaagatgatgatattctgggcaggaaaggataatgaaattttttgtttgttgaaaggtaagtatctttttaatacactgacaagacttctaagagaatcagttaagttgaaaatactttgttatgttttataaaaataaaaatatgatcttaaatatgagggttctaggccgaataacattgggaatttattactcaaattgaaggagaattcagagtattttctcttttgatttatgacagaatgaaagattttaaaagactttgacacctctgttgagtaaaagaaagggtgtattgaatacaattcatttgatgggggtaggagaaggttaggatagrccgcaggtgaggtataatattatgctttaaaataatggcattttgaaaaaaagaaaagtggaaattaacatatcaaagttggaaaagcaggagtgggggaagtattaaagtaccagacagagaagacatcaaagttgttttggaagatgagaaagtagaataatcatagctatagggaataccagtcaaacaggtcaaatcctgttataaaaggtggcacaggtgccaccgaatgacttctgctgccattgtgggagccactgttcatactctatgctcccttcaactttcctccttttcttccttcactattctcttttgtctctaatttcttcctatgctgtgagtgtttcagtgagatccacttgaagtggattcctactgttagactcctttacaggaaaggtccagaaagtatctgttttgttttgtgtgtgtgtgtgtgtgtgtgtatgtgtgcatatgtgtatatatacatatatacakgtgtgcatatgtgtatatatgcatatatacaygtgtgtgcatatgtgtatatatgcatatatacatgtgtgtgcatatgtgtatatatgcatatatacgtgtgtgcatatgtgtatatatgcatatrtacgtgtgtgcatatgtgtatatatgcatatatacgtgtgtgcatatgtgtatatatgcatatatacgtgtgtgcatatgtgtatatatgcatatatacgtgtgtgcatatgtgtatatatgcatatatacgtgtgtgcatgtgtatatatgcatatatacatgtgtgtgcatatgtgtgcatatatacatgtgtatatgtgtgtawgtatacatatatgtatatgtgtctatgcacatatgtgtgtatatatacatatattttttgtatgatacatgtatagtgaagacgctgcatctcagtggctcacttgtcagaagttttgttactaatataacagccacagggttgttttctaagccagcagaaaaatggttgtcatttaaataggaagtaaaatatccaatatggtataaaataaaaatgtatcactataaatcttgaaacagagagatagtggagataaggctggataaagtagcaagctaagccttatcctagcctggggagaggaacagagaagatagtgggagcattgggaggaatatataaataggatggtctccaggttctagaagagtctagtaatgctagatcagatagtcactgtatcctgaagcttctagaagtcttagagcacatgctgattttagtccatgtggtccacgaagtcttcttcacctgccccatccccttcctttccaccaggtacatgctttacagaatgtaaagtagcttttgtcccggaatatcagccaaaggtggtgacattttttgaatgaatgactgtctctttaggcttataagtctttgttataacagtgttaatagcttattacctgcttggatattgtctgactaaattattttggcagttaatttctgcttcccttgtggtttcatttggattcaaaatgtatacttcctgtcctatcttaggtttcatttctttgctttctaacagctgtggtcttctgccttcatggtagaagaagcaattgctgagttttatgttgttgtttttaatggatgtgttacagtaagatctggacccactagtattgcaagtttcatgaggcagttttgaggtggagagtggttcacactttaaaagggctggtgtgttttatacttgagaaaaattgtttcctgcctccggctagcctttcaaatttttgtattagtgtcatgaatgagtgcctgaaagtttagatgggttagtttaattgatcttgtgtagagaataaattataaagcatacgtcttgtagatagtggattattcatctgtttgtaggtatattggcagatggccattatatattgccattaaagttttgcagtcaagccatattttagtttagttgctgtattgttatgaatagacttatcagctgtctgggaaattgtaactaagcatttacaaggaaatataagagtggaattttggcaggtatgtcacatggtaagtgacagcttgtaaccagctctttttttgttagtgtgtaaatggagctgcttaggaacattgtttttactctcccttagacccagtttttagtcagtggaaagaggaggtgattctactaattgtctaagaaaattttaggaatctcaagtagactatgtggcagctttgggtttttttcttgtctgtttcatttacaacaggatttctcaaccttggcacttattgacgacttggtccagatagttctttgttgtggtgggttgtcttgagcattgtaagacgttcagcagcatccctggcctctatccattaaatgccagtatcttcccttgcaatcgtgacaataaaaaatgtccacacattgccagatgtcccctggattgtaaattcacccccagttgagaaccactgatttagaaaatatatgtagtaaagatatatatgcactgcatgggttcattttcttgttttctcctctaagccacagattggattttcttttcagttttcttttaggtagtaataggctagttaccataggcagacattatccataaacatttgtacatattttaatttcttaaatctgtgttcttttactggcaattattgaatacttattgtatagagcacaattaccggggttatgcctttggcaaattaaaagaaagacatttaagtagctataatagtaggtcaaaggtattatgtaagtataggcaagaagtttattccaacagaggtggagatggggtggagagggtgtctttgaggaggtgagatttggtttgtacattgaaagatggatgggattttaataagtggatattgggcaaattgccatttcaggcgggaagaacaactcatggctcctttattccaaataagttttttaaaaattgattcactcacttaatacattgcattaattagtatgctgaccacatctaagtttttcttagataaggtaggtttatggacagagaagtggtgatgtggaagtggtagttcaaagatttggtggctgctgtaggcctcaaaaagggaaaaggaatttggtcaggcaggatcctacagaatcccttcctttaactgtactctttaatgtttaccatccttcaggatcttttttcacttgtgtcgctctcttcttttaaattattccctttacygatcttactttctgtgaaccaatctcaattttcctttaaaaggccttcctgatctgatttttcttttcaagttctgtccttctttacctttgttttatggccaagcgtttcaagtttgccctaacctatgtttttcctttagttaccatctacttttccttaatcccttgctatcagtccatttttttctgagtacattattgaaattaccatttccaaaggtgccaaagacctcacggtggccaaattcatttactgattgttttcctttccctcaaactcacacttttgttttccttcctctgtgtgtccccctctcttgtatctgtccttctatccattccaccaataaacattcagtttgggccatgctatatcccaggtccctggggataaaaagagactgtgccctcaagtagtttcactgggcatacaagtaagtactcaattaccaaatagttcatactggcagtggtatatacacagaggctttacagggtgttctgagctctgttgcgtttagcatcaagatttcatgattctrattacattgcccattcttttgaaaaattcttcctactgttaccttacctgcatttcttcctgcaagcatcaagaaggaagcattgatctggggctttaagcaccatctgctactttctgtgtgggctaacaacttaacatttctgtgtcttgatttctttatttgtaaaacggaacattgatctcctaaaattgctgtcagtgttaacaaaggtttacatgtgtttaacaaattctggttctttttcaggttctttaccacctgtccccctgccaattaatctttgcgttgcttctatattaatagtcttgaaaaagtatttgtatatggctttcacttccttaaactcatttatctggtattgttggccttccataaaatgacctgcacctacctctgcctcatgatatcttcttactccctgatagaaaccaactgccttagccagagtaatctcattgttttctaatcatggcatatgcattcctgcttaaatctctcttcccatgtcatttcccatgtgggaagtgccacactgtactagcttagcttaaacttcaccttcttttgtgaagacttccttgtgtactctggtgatttctgcattctttaaactttgtagcatttcctgtatcttagtcatttggtacttgtaatttcttaattttgtaatgatctctttttttatatgtgacttatctctgcagctagactaagtatsgttgagaccatgtttcagcatcttttaaatgtacagtgtacataattggtgttaaataaaattgtcatgcttttgttttgtttttgcaaaacatttaggactatttaccgtatgccagtgctaggctctgagaatataaaaatgaaccgatacttactctttaggatagtggctcctgagggagacagatgtggcacaaatatttcaatataatgtagtaaatacagtgtgaaatgttttcaaggaattccatgagtgtactaagggaagtggaacttttcctgcataggaggtttagggaaagcttctggagttgaacaccagagttcagttttacttatttttttatttttctcagagacaggatttcgctctgttgcccaggctggttttgaactcctggccttaagtgatcctcttgcctcaagtgatcctcttgcctcagcctcccaagttgcttagatttatagccatgagccaccattccctgtgggctgaattttaaaaggatgagcaggattagccaggtaaaaaagaagagtatagcaggcaaagaacaaaatgagtaaatgcctcagtgcagtgtgtttgaagaactctaaaagaatcctgatactaggaatgactgagtttggttgatgtaaacattatgatcagattgagactaccagtcacattaggccatataaattagagattttgattagtccatatctcattctgcatttttttgtgtgggggtggggggtctaaggtttttttcagtgaacctggtcattaatcttaagggagcagtttatatttgagtagctggtgtgtgttatgcacattcctactggaatagggagacacaagagagaaagatttatataatgcctacagtacttcctcttgagatatgtaaagatttagatttcctccccctacttttgtaagtagcctcatcttaggtaaaaaaaaaaaatagctatttggaacattattaaatgattacgtgggaaatgatgacagtgttagtgagtacagtagtcctcccttaattatggttttagttaccttgtggtcaatggtaactaaaagtaggtggtcagaaaataggtgagtacagtacaatatattttgagagagtgagagaccatgttcacataacttattatagcttatgtcataattattccattttattattagctattgttagtctctcactgtgcctaatttataagttaaactatcataggtaaatctgtataggaaaaaagtggtatatatagtgtttgttaccacctgaagtttcaggcatccacagagtcatctcccatggataatggaggactaatgtacatgtaattctgaaaacagctttgggctaataggacttcatttatagaatcctcaccttgagataaggaggtagaatggaggtagagttgtgggaaggagaagttctacagcattagggggaaatatcagaaatctttagttactaaggttaagtgaagtgtctttggatttaactttttcaagtcataaagaagaaaaactttgcagaccctttgatgattagtgttttgttctcacagttcttgatggcattttcctactgttgtgtcttgtcttaaatgacaagcatgattctgaaagtctgttataactgctatattgcattaatattctcatctgtttcccaaaactctttgggttcttttctcagatcgcagaagttgagttctttttctttccttctccttcccaaagacatataatagtatttcagtgctgtgttagttgggatacagtataatggatgtgtctgttttactaatactgcctcttagaaaggttacgaattatttacttttgtatcaggtgatcacctaaccagattatctttgagatactgtacagtaatgagataattartagtgaggtaatcaaaggaaaatgcaactggaagatggtattcaaagagaaaaatgagttaaagactgcttacttgaaattttttttattactggkgaaaaaagtaaaaaagcatagtgttgagagaaccaccataggataaatttggacattaaagagtgtcttaggacatctgcagaattttgtgtgtgtgcatacatacaacttgtgtaatatattatgaggtgaaatttttgtacttttaacatctaattctatgaaatcatattcctcaatttctgtttaagtaaccaaaatgacagtattataccttgtctgaaataatcattagttttgttttttgatgaaaaaaggttagaccattttaagaaccacaactcaaataataaggcatactggccataaattctggtttatgaaaggaaaataatgtaacagattaattgctttctggttttctaatgtaatatattaatttggttgtttaaacgcatacacaggtctttttggctccctaagacagcggcacggcatagcaagttgaatgagccaaggagtttgaattaagactggcttaatttgtattttggttgtcctgagttcagatccctattatatactagcaatgtaaccttgaasctctctagttttttaccttggctacctgtaaaatgaccatggtagaattactaggagaattacatgagaagatagacacagtataatccctccatagccgtgggagattggttccaggacccccacaataccaaaatctgtaggtgctcctttatataaaatggcatagtacttgcacataacctgcatacattgtctactctaaatcatctctagatcacttacaatatgtaatacaatgtaaaagttgttacactatattgctttttaatttgtattttaaaaaattgttatttttttctgaaaaaaaawtttttttttttttttttggtctacaattggttgaatccatggatgaggaactcaccgatagagggccagctcataccacaataaccytcatgctttctgcttttttgttacctgtgctgtttctttatacctgaaataacaattagtctttccactatttttggcagctgatttgaagctacaagtgatggcagttctcaagaatgtgtcaccaggaacaattctctctccctttaaatgctaacagggaattgttagcatttcctttgtatgagggttacttgcttttgtgttggatttgggagaggtgtgcagtatatcctgatgtggccatataggtatatcctttaatattaatctttgtgaaacttaggagactcctgagttaatatcctttatctaaaaattttttggtatgtgattttattattttataaataatgtttttagtaatcattttgacctgttgtttgaaaggcttattatactcttagaccatctgccatatagcttctgggttagcttccattcgcatgtaatctggcatacactgacataccttttcttttttcagttctgacattgaggcttgtatagactagcaataaggaataacttcacagagaggctgtttgtttgttcttttgacatgattgttagtagtaatagccagcacttttatgttgtgccagrcagtattccaaatattgtgtgtttattaactctttgaatagtagatgtatactattattgctctgttacacagctaggcaaacaggcataggagacatacatgcagaaagtggcagagctgggttttgaacctagatatcaggctgattctatctgtatctgtatagttttataatcttatttgcttaggattgtatgattttatttttattttatttttgtttatataaaacataatgtaatatgtagaattataaacatatataatctgaacactcttctcatcagtgtcaaccttcctaatgcactttttctttgtagataataagcgggaagtgggccgggtagttttgccaaaaaacttacttaggggagataagtttttcttgtatatttgaaattaattcatttagattgctttatcttactgactagttgacctgctattcctcccttattatagctgttctttctgcaggttttgtctttagttagtatcactacttagatacagtttatttcctagaacactggggaatattgagaaccagctattatgggggaaaataactttgacctatcagggctaatagtacaagtagtgaatgacttgccagtttttgtggataacttcactgcagaagatttggattccattttcctcactgacttggttattacatagagatgtttaggtgccagcttctgacactgaggattataattttgcatgtatgaaatttaaatcttggataataacttgcttctaaaggaaaattcaatgtaacttttaaaaagtaacagattactaaagctatactttatatgtgacctgatatctttgaatttaatgtttacccttggaaatttattgttacctgaaattgagacagcaagactgtggttaactaggaaaagggacagctttcctttactcacttcccagtcttaatttctttctttcatatgactttacattgctcttgaaaatttccttcttccagaaagtctttctttggatcatcttagaattttctcaggtaaatgagtagatgtttctcttttgtgtgtgcaccatgttgttctcatgttgtcatttaagaggagggctttctcttaattattttgggacaaccttagaaccatactgacacccagtaaatgttggctaataatatatgagattgcacttactgcaaacattttgaattacgtgaatttctcagagtaattgacatattcagtcttcaaggaatggtagagtctgaataattagtactattcttcattgttacataaaaccaagcacacttgacttaagcaatgaaaagaagcaaaaactgtataaactgtgtcacaggccttttttttgtgtgtgacggattcttactttgttgcccaaactggagtgcagtggtgccatctcggctcactgcagcctccacctcctgggttcaagcgattctcctgcctcagcctgctgagtagctgggattacaggcgcccgccaccacgcctggccgatttttgtgtttttagtagagatggggtgtcaccatgttggtcaggctggtctcgaactcctgacctcgtgatccacctgcattggcctcccaaagtgctgtgattacaggcgtgagccaccacacctggccttttctttttttctgagacagggtctcactgtgtcacccaggctggactccagtcacgtattcacagcaacctctacctcccaggctcaaatgatcctcccacctcagcctcctgagtagctaggactacaggcgcacgccaccacacccagctaattttggaatttttttcttcgtagagatgggtctctccaggttgctcaggctggtcactgtctttttaaagaaatgctgataacactgtagatgtaagaattgaagaatacaggagtttattaggtttttagttgcaaggaacagaaaaaacactggctcacttaagcggtgaaagggctggagatgtaggaccagtagcggtattcgtttccttttcctgctctaacaaattactaccaccatggtggggttaaaacacacaacagttctggaggtcagaggtccaaaatgggtcctaccaggctaaagtcaaggtgccattccttctagagtgtctaggaggaaaatcctttttcttgccttttccagcttttcagactgcccacattccttagctcatggcccccttccatcttcaaagccagtagtcacattactctatattctacttcccccaccactctttctctgactctyctgcctctctttcacttagaaagatccttgtaatcacattggacacacccagataattcaatacactctccctttctcaaaatccttaactaatcacacctgaaaaatccctgttgtagataaaattcaaggttctgggattaggatgtggacatctctaaggagccattattctgctttccacaatagctatacagcctggaacagtgcctcaaatcacatcatagaactcagcctgtgaagacactttgcagaaccttgattgtgtcagttactttgcatccctgatcctaacaccactcatgctggccctattggaaattggatgtgcttgctgctgctatccagaatggattagccacagtccccactttctctcattagttcacacttaaatgtggggttgatgtgtttgttgatggagcctgaattatgtgtctgtacactagctgcaaatgaagctggtaaatatataatgggaagcaggttctgctttataaattgtggggatttctcaaaaataggaagagaaattcagatgctgggcttgaataccaaccagagagaacatataagtacagttgagagtcattggtataaggattccattcgtttgacaaactgtaccagagatacacagatggatgagatacatttctgtttctgttggtgctagccagagcaagagtggaaagccgtgttcatatgtcagtagcctaacrtaaatcagtactatttctctgagactctgataggaagccagctctgttatgtgaaggcttttcacttagtgtgtttttcatctgttcaccaaaaattgctattggctgtacttttgcctttcaaatggtgacatgagaatagttgatagaggaaggtgggtaggttttgaggtttttctctttcactccagaaggttrtcagttaaagtggtattgatgtataactgtgctgtccaatatggtacccactggccacatatggctatttaaatgcatttaaataaaatgaaatttaagatccagtttctcagatggtgacatgagaatagttgatagaggaaggtgggaaggttttgtggcttttctcttttcactccagtaggttatcagtaacagtggtattgatatataactgtgctgtccagtgtggtagccactggccacatgtggccatttaaatagaatgaaatttaagatctagtttctcagttacactaagcatgtgtcaagtgctcatgtggctagtgactgccatattggatagctcagttttatacccatggtgtagcatctttactgtacaagagtcaatccaggaaaagtaaaatgtttataaggcttttttttttttttttttttttgagacggtctcactctgttgcccaggctggagtgcagtggcagtctcagctcactgcaacctccacctcccaggttcaagtgactctcctgcctcagcctcctgagtagctgggattacaggcacccaccaccatgtccagctaatttttgtgtttttagtagagacgaggttttgctgtgttggccaggcaggtctcgaacttctgaccttaggtgatccacccgccttggcctcccaaagtgctgggattacaggcttgagccaccacgcctggccaaggctttttttctttttaaccctaattatttttctttttgatatagttcatgagtgttcacaatatctttcacgtgtgttagatgttttcaccgacagaatcctgcacaataggcttaattaaccctcacttttcatacagaaaattgaagcttaaaaaaaaaagttcaatcaacagagttagacagggcttgaattttatttaattctactcaatccaatataaaatacctaaggtgctaagtactgtgttaaatagtaagatactaaaaagctagctgctctgcccaggtctggtcctcattctcgggttcttgtcagatctttctgcttgggctgggcaagggaggacaagtggaataactttgtgaagggcaagtgtggtttctttgaaattggttacagagtgctctggctgttgtacatctaactcctaggtcctacagcttgggctgggacctcacctccctaaggatggttagatgtgaagaatgagtgggagagagattgattcatcgatgatattgatgttgaccatagagaaatagtagcgcttttaatggaaatgaggaataaaagggaatatttaatgaatatctatggtgagatgccagatagacaattggaataggaccatggctgggttagaattattgcctttgtattgtcttcaataatggtgagacttgaatctacaagctgggaagtatgaattaaagaagtataagggcattagggccagcttcttagggaacaagtaccagatagtaataaagatcaacttctattctcaatggttttgttactctacctatttaggtggaaggagaaagaagaarcaagaagtgacctatcgaaaacgtgagagggactaggaaagactgagcagaaaagttttaatgaaggggttgctctaatgcaatagtttgcaaaatgtggtccccagatgagcatcatcagcatcacctgggaacttactagaaacacaaatttttgagccccatctcagaccagctgaatcagaacctcttgggatatggcccagcaatctgggtgatccagggctagtttttgaaaaaacactggtaaagtatggtattgagtactgagagtttgggaaatacaaggactgagaaaaagctcttagattggtcagggaaggtcattggtaacacttgagcaaatttgctacaatgataaaagaccctaactgcaagtttagagatgacttaggtaatcagaaagtaaagccagtagctatatatattgtcttttcataaagttcaaagacagggagaaagatggatgcttgatggcaaaagcaggatggacggaaacttaggttggaaggactggagtacattttatgttttgggcttcaacagacaatataaaagggcatttattttgtagaaattgttttattcttacctgtggacattttctatgcagaaagcattttaagtataaaatattttaaaattggcttataggagactgatattttaataactattataaatgtatatctgcattgaataaaataaaaacrttaagattaaaaaatttggtaacattacattgccaccgctactgttaatactttctagtctttttatcaatatagaatatgcattttatgcatatacagataatgcattttaaacatatactgttttaatcaaattctctatgtaataaaatatatttattttaaatgtatagttaagaattttgacaaacatatgcccctataaccatcaccctgatcaagaacatttcaaatccccccaaagtgcttttatttatatatttaatttgagatggagtctcactctgtcgcccaggttggagtgcagtggcacaatcttggtgcactgcaacctctgcctcccaggttgaagcaattctcctgcctcagcctcctaagtagctgggattacaggcatgcgccaccatgcctggctgatttttatatttttagtagagctggggtttcgccatgttggccaggctattctcaaactcctgacctcagcctctcagagtgctgggattacaggcgtgagctgccatgcctggcctcaaagtgcttttagaccccttgcagtcaatcttaactctgcttaaccctctgtgcctcaggcaatcattactctgatttttttcaatgttaagtttgttcgcatgtccggtaacttctgaagtgggatgatgtaatgcattattttgtgcctgtattctgttggcataaaacatgccaagcaattaatgcacattgttgtacacattcatagttccttcctttgtttactgctgaataatattcttttgtgtgaatatataatttgtttatccattcagcttttgatgaacctttaggttgtttctaattttttgctattatgaataaagctagaacattctgtctaagtctttttgtgtacatgtgttttcatttctcttggtttgcatgtatgtattttgggatataaatgtgtgcatgtgcatgtatagaatgttacatacatgcacatatatatacactcgggtacatacatatgtggctatatacatatatatatatctcctagtctgtggcttgtcttttcggtttttaatgtatcttttgaagagcataagttttaaataaatactgatgaatctagtttattaggttttttcttttattgaatcttagctaagaattctttatctatcatggattggtgtcttgatctatttgtgctgctataataaaatacctaagactaggtaatttataagcaacagaaatttatttctcacagatccagaggctgggaagtccagtattaaggtgccggcaggttcggtgctggcaagagcccagtctctgcttccaagatggcaccttgttgctgccttctctacaggggacaaatgctgtgtccacatatggcagaagggatggaagggcaaaaaaggccgtacctaattctctccagccctttcgtatggcactgatctcatccatgaaggcagagtcctcatagtctgatcacctcctaaaggcatcacctcttaatactgttgtgttggggattaagatttaacatgaattttggaggaggaggcacaagccgtcataccataccaggcagtaaaaatttactccttagttttcttctagaaatagattaagtctgtgatccattttgggttaatttttctgtgatgtatactattgtttgaggttaatttttttctagttttaaaattttcatccagttgttccagcatcacttgttgagaaaattgtttttcccattaaattactttgatacctttgtcaaaaatatattggctatacatgtaaaaacacacatacacgtatacataaatgtagaaataggtgagcctgtttctgacctctgttctgtcctatttctctgcatgtctttcctttgactactatactgtcttgatgaccacaactctctagtaagttttgaaatcaggtaatctaagttctctattttttgggaattgttttagctattctaggtttttgcatttccagataaattttaaaatagcctgccagtttctaacgaaaacaatctgcttgggttctgattgcaattgtgttataactrtagttcagtttggggagaattatataaatccttctgaagaatcagcttttgtctttcacttattttctgtgtctttgttttctgctcttcactatttccttccttctactttatttggatttaatatgctgttcttttttttatagcttcttagatgcttaggtagatgcttagatcaaggcttttagacctattttaacataagcatataaagctataaatacctctctaagcactgcttttattgcatccgacacgttatatatgtttccgttttcatttggcttaaaatattttccagtttctcctgtgatttattctttgacctgtgattatttattatttattttattttatttgtttttagagacacgatctcgctctgttgcctaggtattgtgcagtggtacaatcataattcactgcgacttcaaactcttaggctcaagtgatcctcccacctcagcctcctgagtagctggaactacaggaatgcactgccactgttcctggctaatttttacaaactttttttataaagatagggtcttattgtattgcccaggttggtctcaaactcttggcctcaagcgatcccctggcctcagcctcccaaagtgttgagattacaggtgtgagccactacacccggcaacctatgattatttagaaatgtttgattcatttccaaatatttgaggaattagagaactttattctttaacttagacaactaattctagttgtttatatatatwtttttaaatttgtacttctatgactttaattcttttaaatttctgagatttgttttgtggttcagcatatgttctatcttggtgaatgtgccatgtgcacttacaaagaaggtgtattcttttgttgggtaaaatgttctctaaatgccagtgggatctgttgggttataaccttagtgttggtctaacctcactggtttgttttgtttttgttttttattgagacggagtcttgctctgtcacccaggctggagtgcagtggcgcaatctcggctgattgcaacctctgccgcccatgttcaagtgattcttgtgccttaacctcccaagtacctgggactataggcacacgccaccacacctggctaatttttgtattttgagtagagacggggtttcgctgttggccaggctgttctcgaatgcctgacctcaggtgatctgcccgccctggcctcccagagtgctaggattacaggcgtgagtcatagcacccggccactttactggttttctgcctactttttgttagttattgagagagttttggaatctccaaataattatagatttatctatttctctattccctgtttctgtttttgtattttcttttttgyttgtttgaaacagggtcttgctctgttgcccaggctgcagtgcagtgacaccatcatggctcactgcagtctcaatcacctgggctcaagcaatcctcccacctcagcctcctgagcagctgggactacaggcatacgccaccatgcctgcctaatgtcttctattgttttatgaactgtcttactcttttttaaattgctctagtatttatattatgcacctttatattatataattttatgtataatataaaatgttacaacaatatagtactttcattttcctttccttttgtttgtactactattgtcaaacagcttctatatttgttttaagtttcaaaatttaggggacttttttggtttttgttttttttttcttaaaacaataaattgacttttaaataagttttaaaacaaagagaaaaaagttattttatatttactcatatatttactatttctggcactcgtcatctctttgtttagttcaaggcttccatctggtatcattttcttccagcccaaagagtttcctttttaatattccttatggtattgatctcttggcatcaaatttcctcagctcttatgtttctaaaaaaaaaaacgtatttttttcacctttggttttaaagaatatttttgctggrtataaaattatagattggcattttttccctagtattttaaagatgttattctattatcttctggcttgtcttttttctgataagaacttagctagcccttgttctttttttttttttttttttttttttttgagatggtgtctcgctctgttgcccaggctggagtgcagtggtgcaatctcggctcaccacaaccttgggtgtctcgctctgttgcccaggctggagtgcagtggtgcaatctcggctcaccacaaccttgcctcccgggttcaagcgattctcctgcctcagcctcccgagcagctgggactacagacacacgccaccatgcccagctaattttggtgtttttagtagagacagggtttcactatgttggccaggctggtctccaactcctgacctcatgatccatccacctcggcctctcaaagtgctgggattacaggcgtgagccaccgtgcccagcctcttattttaatccttcttaggtaatatatrtatatttttttctctccttttatcattgtttttcarcgatttgattaaaatgcctttgtgtggttttcttttgwgtttaaatgcttgtagttgagcttcttagatttataggcttataattttcatcaaatttggatcctgcaattgccattgaagtctgtatgttcatttctcatgtataattcatgtgagaaaatacggtaaacctgtgttatctggtaattctcattaataaaaaatttctaaaattaggatttttgttttacattatgttgaggaggaagagagagtgaggaaaacaactagagagaactcctgggaaagaacttacgctagaagctaaaaccaggaggatttcttgaagagttctttatcagattcaagggaagtaggatgtgggtgtgtcttatgctgttcaaaaaggcaaactgggccaagcgaggtggctcacgcccctaatcccagcactttgggaggccgagtcgggcggatcatgaggtcaggagttcgagactagcctggacaacatggggaaacccatctctactaaaaatacaaaaattagccgagtgtggtggtgcgtgcctgtaatcccacctactcgggaggctaagacaagagaatcgcttgaacccaggaggcagaggttgcaatgagcccagattgtgccactgtgctccagcctaggtgacgagcaagaccttttctcaatggaaaaaaaaaaaaggcaaactgaataaatcataagcaatgagatatttacactttagcttttaatatatgaactgttgaaaattgaggcctgtcatgcattgtaaaataatgagcaaaaaaagtttaggctccagaattctgatactgtgcctggatttgaattccagtcctagcacttaccatctttgtggcattgggcaagtttcctaaaatctctaggagtttctttaatcataaaattggaaaaatggttataatctcaggttgtcatgaaaactaaacccaggatggcttatgttcttcacttgtcatttagtagatccccaataattattagttatctttccttctttatatattaactttttattctttcattcagggactttttttccttttaaatatatgcaatagttaaacaagtccctatggccctcatgagactgtatttacccattatgtttctctattggatcttttctatgttgttgtttatcccatcctattaaaaaacatgttatgtattccatcttaaaaacgcttttgacctttacatctctctgtagctactgcctctttcttttcccagactattgtctaaattcaattttaacctcagttcctatcctcttataacaagatcctcagtgacttccacattactaaatccagtgattagttctcaggcctcattttactttatttttcaggagcatttattgattctgccctcttttcttgaagctttttctttatttggcttctgggacacttcgtttgacaaatttacctcctacttctctggccacttgttctcaatctgtttactatttgtttccttctcagtctagccaggagtgtccagtgttttggcttccctgggttacattggaaaaagaagaattgtcttgggccacacataaaatatgctaacactaatgatagctgatgagcttttaaaaattgcaaaaaaaatcttagaatgttttaagaaagtttgtgaatttgtgttgggccgcagttaaagccgtcctgggctgcatgtggtctgtgggccatggattggacaggcttagtctagcccttaaatattggagtttctcagacttgttactcttaacactcccttggtaatgtcatcccgtcttatgggctttaacgaatatctgtatgctgatgactcccaaatgatatctgtactcccactttcctctgacccctttaacaaaactctttaagaaactaccagttaattacattcatgtcatacctttgcttaaaatgtccaaaaattttgcttggtggtttctcatatctcagactatctagatcaagttaagtctgacctgcatagtccagaacaacttcgctcaaatgtctgggccctcaactggaatggctgtgatagctaagaaaactgggtctctcttcccaagtggtctgtcatcctcagcttcatagtgttttgatggtgttccaaaagggcaagcccaaatgtgccagtgcttacaaagtctcagtgtcacatttactgaagtccagttggccaaagtaagtcacatgaccaaacccaggattggtaggagttccaggggtgcaaatgccaagaggtgtgtgattcattgggggcagttaataatgtatcacaggttttatataatctgcatctggtttaatttgttaaattattttttattttatttatttatttattttgcgatggagtcttgttctgtggcccaggctggagtgcagtggcgcgatcttggctcactgcaacctctgcctccccggttcatgcgattctcctgcctcagcctctggagtagctgggattataggcgcccgccaccgtgcccggctaatttttgtctttttagtagagagggaggtttcaccatcttggccaggctggtctagaactcctgacctcatgatcccacctgcctcggcctcccaaagtgctgggattacaggcgtgagccactgcacctggccaaaattattttattattatacagcacccatttctttgctcaggaaaataatcaagaaaaagaactgtctagataattaaattgtcatctggaagtatgggctaaataatggctcttgtgagaatatcaagtttgacttttgagtatcttttgtttttcagtttcagagagcacctggaagtagagaatgtactatttgtaccacaataatttatagaatattttatttagttaaatcagacagtatcttgaatattgttgctagttaattaacttgtccatctttcatgttatctacctgttccaagttagaaagttgaactttatttctccctaatctaaaattatatggagctttgcattttataaagcactgtttcagctgagtgcagtggctcatacctgtaatcccagcactttgggaggccgaggcgggaagatcttgagcctaggagttcaagatcagcctgggcaacatgacaaaactctgtctctactgcagatacaaaaattagccatctgtggtggcacgtgcctctagttgcagctacttgggtggctaaagaagaagcctaggaggttgaggctgcagtaaggcatgattgtaccactgcactccagtctgggcaatagagtttaaaacaaaaaacaaaaaacactgtttctttttccaacctaatttttgttcaccgtcacctgtcaaaggatgtggttacactcttgttttctttttcctttaaagcagctttaggtttacagacaaattgcgagaaaggtatagagatttcccatataccccttgctcacacacatgaatagcctcccctgttatgaacattccccaccagagtggtacatttgttataactcgtgaacttacattgacacatcatattcacccaaagttcattttacattatagttcactcttggtgttgtacactctgtgggtttggaccagtgtgtaatgacatgtatccaccgttgtatagtacagagtattttcactgccctaaaaatcctctttgctccacctgttcattccccctctcttcccctccaactcctggcaaccactgatctttttactacctccatagttcttgccttttccggaatgtcatatggttggaatcctatggtatatagtcattttagattgtaacatgcatttaagtttccttcatgtcttttcatggtttgatagttcatttctttttagtgcgaaataataatctgttgtctggatgtgccatagattatttatcctttcccctactgaaggatatcttggttgcttcagtaggtgaatggataaattagttttcagtgattataaataaagccgatatgatattcatgtgcaggtttttgtgtagacatcagttttcagctcaattgaataaatacctagagkcatatggtaagattatgtttagctttgtgagtaactgctaaacttccaaagtgactgtactattttgcattcccaacagcagtgaatgagagttcccgatgctccacattctcattcgcatttggttttgtaattgttctggatttcgaccattctaatagtgtagtcgtagatcattattgttttaacttgcatttccctgagacgttttatgtggagcatcttttcacatgcttatttgccatctgtgtatcttctttggcaaggtgtctgttaaggttttggctcattttttaatcgagttgcttgttttcttaatgttcaagagttctttgtatatttcagataagtcatttatgaaatgcgtgttttatcttcgactttgtggcttgttgttctctggacagcctgttttctccatattaactccttgtactttgtcttgtaatgtccctttgtcagttttttcatattaccatttccaaataaatttggtgtgccgttacttacattaacactacttttaattctagtatctactcatatttttgctttcattttggtatccttcttgtttggaattctgttaaccttttatctgtatgtgcaagcatctgattactttgttatgtcttctaaggtggtcttatctgaccatttatatattgagatactaattttaatctgtttattatttcaagaaggtacaggggttgttgcaaaaaaaggactatttttaaaaaggcattgggttcattgctttggaaagcattgttttggcataccttgtttaatgtaaaaattgagatgaggggaaatagctttcctgttgtttatggcttaacctactttgcttgtttcattcatttgggttgtgagcttatgttctgtttgaagttatagattttatatttatattatgttctgtttgaagttttagaaatatttaatgttctgtatatattatatagattccactacgatgaaaacaaagtgtgaatttcagagagccaagtaaatgattatgtatttatctgattgactgtataaaatggtaggttttcttaagaaaaaggatgttattcctggttctcagatggaaaacctttcagattgtttttggtgaagacttttaaaactattgtcaggttttagaaaccttgagtttttaggatctttaccttttattgagaaactgtttagtccaaattaacctgaatttatttgagcaacttgtatgctgtgcactatgtgaggcactacatatgcgtaattgaataggacagtttctagtgaaggaaatgtgtacacaaataactttattgtagtcctgtgagtccaataatagatgtgggcattaagatgcactgggagtactcagccaaactaagacctgcttttaggagttactgagtttaaaatacaagaatgggttaaccaaacaaggagggaagtgggagggcattctaggatgagtgaaaaagcatgaataaggatactgaggggcaaaacaacaagaaattaaaagtaattcaggtttattggatcacaaagtgtaaagtgaaaagctgtggcactttatatgctatgctgaggaacttgagttttatcatattttctctcattcttttccactaaagtgcgactaaagtcacaggagattgaatacatgctttggaagtatggcagcaaagtgcgcatagacctgccacatatttgaaatttctcctaagacgtattttattgtgaagaattatgaaaaatgttctattctagaattgattagtgtgagttcttaagttcctaatttatagactgaggataataatagcatttaccttttaggattgctgggaggagtaataactataaaatgataatgacaataatggccaacattttttgagggcttacttaccaaggaacagtcctaagtgctttacttctgttacctcatttaatcctcaaaacacctcaatgaggtaggtattttactatctccatcttatttctaacaaaactggggcatagagaagtaattcacctaaggttacacagctagtaagtggcagagcttggtttgaacctaggcagtttgaatataagacattcttactatattatactcccattttatgatatcatgcatatagaatatttagctttgtatctggcacgtactaattataaatgtaagcaattatcaatagcaataataataacttactttgtccaaatctttgagttaaattgaagtccccaagaaattgtgctgtttttcttgtgacttgatttacacctgacataccactggggtgcagaaagtgtgactcccaaagccatgcttttaaccactgccgcctccttccttgttggtctgtctctacattagattttaaatccatggcagggaccatatccatttttttcatcatggtacacttagtccttaacactgtatctatgatataaaaatgaccaaatttgtacagtaaatgagaatcgaaaaacgtgacattttcaactgatcttagcattattcatactacctataattgtgttttaattgttttacatattttttacataattgttttgttttacatattttttcttcagtaaggagtccatctgcttctgtgttctacagggcattctcatcctggtcttaaaagagccctgcttggtaaccggtatctgtttgtcctgtagtgatcactcagttttcagacagtgaggaacattagaataacattttggtctataactagaatctgttagaaatatatgagacagaatttttaaatgtttgttctaagaaacattaaacaaaaaaagaaaaaggctttgacatttttcctttacctttcacatkaagtcatttcaaataaagataaaataattttcttcataggggttctctgttattgtgggttaactcatattttcctcctctcctctatctagaatgtcttaaaccattctaccttatgagaaattggatgttcttgcagatagtcattgtgggagaaaacgtttcatttaagtcccagatgaggaccgaaaacttgaaatcagaggagcatctgaaatcaagtaatattaggtaggatgaaaattacaagggatttctacatgtttttattccttttggagatgtgtattattcatactctgtgaatactaataaaattagaaacttcctgaaacatttgattttggccaagatcgggatggggcatgctaaagttttattatttatgtgacttcttgagaaccttggcttatgtttatactttgtcttgagcatttttatcttgtggtccaaggaagcttttgaaaattttactgaagtaaatttttaaaaattttgttttatatgaggtctctgaatatttatgataaacgtagggacacatgatttatacctcatcctttagaatgaaagtttctgtggtttttttacatacttagtaaatcatgtgagtgcaggtaacatcagcttgcagttctgtatgtcagcgtggatgcaatcaagcctcccaagtgcctgtaraaataggtgtatgatagtatgctagagaagccctcttgtacatgtgaattagtaactattgctacagcagcttataatgacagaaaatgcaaagatgcttgatctcaaagatgcagcttttaactgagagatgatagttgcctctgcgagagtgatacctctagcctggccatttcagaaggccttaaatatgtttatgagctctggggtttggaactagattgcaagggtggaacccaagctctgccatttcctagttatgtgaccttgggcaagttatttaaccactctgtgcatctattccctcatcatcaaaatgggcataatattgttacttacctgatagaattgttgtgagaatcaaagatttagtaatatatgaaagctaagacctggcaaataataagtgattaaactatattattgtttgactgctggttaattcttaacagatgagtttagtctgttatcagttagtgtggtatttctataatttataattgtcttgatatatcaggtccaattttaaaaatgtatttgttaaataacgtaatcagaactaatgtttggagaaaaataaaaaaaaataacatcctgactcaattattttgtaatttttatgtatctgcctctggttttattttctgtttatactaagaacatagtcttcatgacatctaaactgtttttcttttgtcacttgtggtggtagaggacatagggttttttactacaactttgaaatgtctttttcaacccaatgtgccccttcaaaagggatctcatgaagcagtgaggggagggagggacacctgactagccagtcagtaaccagattagcaaaagtaatttgatggtcattgaactattcatgtcacaatcagattacccctccttattcaaatgatcatttaggttcttttatataacttacttgtcttatttattcctcatagcaactttgaaaagtagtttctatcctcattttatggatgaggaaacagtcttcttaaaagctccaagatagcattactaatttgtaggaaagcccaaattcagacctgagtctttttgcttcatattattttccattacataaaactgcctcctgtatggttcatattttrtcactcaataattcaacaaattcaacaatttttagtgaacagctgccatgggccgaggcattattctagttgttatggccctcatcttttccaacactcccagtggctcatctttttagttgtattctaggcatatgtctattcttgcactgacttttattgtattgaaattatgtacatgcctttgtatctgtcaccttacctagagttccttaaaagtaggtatctaccagtgttatcattttgactatttagagtaaaaaaaaattgacttattttaatttgtacttactggtagtatttccttttttgaattatcagtttggtcttctagcaatttttctgttgatatcttgatttatttatttatttatttatttatttattttgagaccgagtctcgctcttgttgtccaggctgtagtacaatggtgtgatctcggctcactgcaacctccatctcccaggttcaagtgattctcctgcttcagcctcccgggtagctgggatgacaggcacccgtcaccatgcccggctaatttttatatttttagtagagacagtttcaccatgttggccaggctggtctcaaactcctgacctcccgtgatctgcctgcctcggcctcccaaagtactgggattacaggcgtgagccacagcacctggccaatatatttttgtattaatttttcaattttgtctagtccacatggctcttaacactttctctgcattcttttctttgtcattttgtaattatcccaaatatttaccattctcctcagcttatccccctcttactttcagacacagattggatctaccttatctctgaaattgaggaaatacagctgtaaattctcttgacgtctccctacccccagtatttcctagttctaacacatttctatttaaccttaccaacctccaattttattctgactctttttcaaggccagtcctcttcctgtcttaataataccattcttatttccttctatctcttccagaacagtgctgtcagttttattttctcctattttttattttttatattttatatttctccttcttcaacctattcatttcttccaccttctttcctttattctaaacactctcaagtgtctcccattgggagaagaaaaaaaaaaaagaagaaacttctgtttagccgtggcctccatctctgtctctttacacagtccagcatcctaagagttgacgtaaacttctccctcttatttgttcctcaacctcctgcatcctgatataatcttttctctggcaaggctatcattgacccttatttcaccaaatctgacacacttttcagtccttatttatctcatagtacttttctgctgtctgtgatattgatgactactcttcctttttgttctcttattttctatactccactcttcccttgctgtcatactattcaccaatttcttcttggtgtccttcatggagtgtctttcatctactctttaaaaatgaaaacagagaactagctccacccttctgagtttgtgggcagttacatttactctcatggttttaactgccatcaatgtactgatcacgtcagtgctgtatccctagtctcaagtctcccctgtgcttgatacttatctctgaatgcctgcttacgcattcattaattcaacaaattgaacgcatttttagtgaacagctgctacggtcaaggcattattgtagctgttatgggtgtagccctsaacactatcttttttgcattctttaccttctcatatacccagctggccaaactaacaatctgggagtgacagactctttcctctgctttatcttcctttcttttggcttaacttaccaggtatttcttgaatctgggtttttccgttcatctgtattaccacttccttacttcagtcttatatctgtagtaatctttctaaaatgtaaatctaacaatgctatgctcttgctttaaattctgcactggttttctattgaaggacagaatctgaactccaaggcatgtcatgcaagtcatgcaaggcctctcacaatttgttctgtctggattcttcagcttcattatctgtggctttctgccttgcatttgatgctcactcactagcttagctttgctttttattgttctgttatttcttctgcttggaagaataactccttctcatcctttgaaattctcagaccagtgttggtccttaataaaactaggtacacatttttaaagaatataaattatggagcgaatgttgtggtatagagtattgtagtgttgggagatttgaaaatccttcatgagccctaaagtgctgtaaagagaaagcaaattagtatttttattaacgtgtgcaagaaaagctcctttaggagcagcatcttctctagattttcttttccaaatgacattcaacagtagagcaatatgatttatttttctctgattaatattgcgagacttgatgtgtgtgtgggtgtatacgcatgtgcacattaagtgcatgcttactttatgtctggccaattattcagcataaataattatgattagattattgtgtttatggttatgattgagaaatgctgttattatcccaagtattccttagaactctatgaaacaagtgaacaaattaacttgtggcttttggttaaatttcttaaaaaaaaaaaaaacacgaaaaaactcccagcgtgttctcccaaaataaaagagagtgattcacttttccttagcagctgtgagtttagaagatgttgagttatattcctgaattctgctcaaaggggattgggagttcaggcagaaggaatctcccattttatgtgccctgatttggaaatatcttacatttttaaaccatgaatcttagactatatattcttttttttttttttttttttggagacggagtctcactctgtcacctaggctggagtgcagtggtgtgatcttggctcgctgcaacctacgccccccaggttcaagtgattctcctgcctcagcctccagagtagctgggactacgggtacatgccaccacgccaggctaatttttgtatttttagtagagacgaggcttcgctatgttggctaggctggtcttgaactcatgacctcaggtggtctgcccacctcagcctcccaaagtgttgggattacaggcgtgagccagtgcccagctgttaggctatatattcttaaaagagattatcctgtatttgttacctagcattgttacataagtgctatatgtataatcaagatatttgttaaagaagataacccaaattttagtattttcctctagtaacattatttgaaaaattatcataaaatgcttaagtattgaaagccccagttctatgggttgttactatcaaacatttcaatttttttttcttatactcttgtgtaagagaggaactattatataatatcataaaataatggttaggagttatactctggagccatattgattatgctacttctgctacttactatgaccttaactaacgatactacttaacctctgtctccttgggtttcttgcactataaagtgggaacaataacagtacttagtgtgaagtaaataatttatgtaaagctcttagaacaatggcaatagtaaacgctacatatagtgttagctgtacctataggcactataatatctatatgtattctaatgtacctagtacctatactacctcttctgtagtacctgtagtatagtatatagtactgagtgtttagaatgcattaaatgtatttatagatgttgattattccacgartatttattgtttcagtttattagctttcaacatagttggctgtcactgaatgttccatattttattcagccttttaatgactttttctttttttattgcttaatagaattgcttaatttttcctattatttaataactaagacaatatatttcgatagctatgtttaatagtgttattttgttattgaaatcatggtgattttattcttggttcattcattattttcattaattccttcagcttaaagaattaaaaggaattcatgttgccataccctctaccaagagaaaacattttaaarttcttgcctctctgtatgagcattggctgtaaacttcaatgttaattcattgatggtttttataacaaaaccatagaacaattgaggtatagtatttttttcttcttcttctttggagacaaagtctcactccattgcccaggttggaatgcagtggcacaaacacggttcactgcagcttcagaactcctaggctcaagcagtcctcccacctcaggctcttgagtagctgggactacaagtgcacaccaccacgccagctaattttttattttttgtagagatgaagtcttcctctggtgtccaggctggtcttgaactcctggctccagtgatcctcctgcctcagcctcccaaagtactgtgattacaggtgtgagccaccatgcctggcctatttttttctttataaagtaaaataatgatatagccaattttgtgctaatctattaaaacatttatataaggttacgtatccattgatttgatttctcatatattgtacactgttttttaaaaagaaagctaatagttgcttaggggtgggaagatagagattccttttcttgtgaggcagtaactcttagcttaaccctcccacctgtctaaatggatattttggggatacagaaaaaaaagttagtggataatagtatataagccaaactttgttttaaagagtttgccactagattttatcaaaaacatagcatggcctgcaagtactgtttctaattatatgagactgtattttttaagatagtccactttgtgacaagatcaagatattaactaataaaaacagacttttactctgcagacactattgttgatgattccttataaccataatttggtttgggaacttaaagaagttttacttttgttcttttcgtcagatattccttagagcaggagatggcaaactttttctgttaaaggatcagatagtaaatattttagggttggtgggccatgtggttgttgtctcaactctgccttggtagctgaaaacagccacagacaacatggaaatgaatgtgtgtggctgtgttccaataaaactgtcttcacaaaaatagatccaggatgaaagggaatttcatccacaagccgaccacggcattcgagtataaaatttatttcttgtggtccttttgataaaaatttcagatataatctatttcctttatgaacagatcttttaatttaggctaactgacttaaatgtgaatgttcctagataagccaacattagctttttatgtcatagtaattttgttattctactttgaaagaaatagaaatgacttggactttgtggagtcatttaagaacaaaatttgtacctaattgtacctgactgctttgtgactggaagaattattttacatctcggagcttcagtttttccatttataaaacaggaataagtatagctatcccgtagggttgttatattttccatttagctgtctttatcaattcaatttagcaaggttacttttaaaaagaaagctaataattgtcattattagaaagctaataaaagtaattaacttgtgcttctttcagaacctaggaaagaactgcccagaaatgagcgcctctacccttgttatactgaggaatcaaagctggaatttcaaaatattttaacttttatgtcagtttttgtgacatttttatatttctattagtgcttgactttttagttttacggtttttcttggacagattatagcatggtaaaaataacagagtaaaattttagatctgtgtttatcaatggaagcctgctccagagtctgcaagaactatagttcatcacctgacagcttataagaaaagcagattgyttgtaaattacattactattatataccccatataatctttgactggaagttggtaacatcattaggtggatgttagcatactgaaatgttacttgttcatctttacaaaacaaatcatgtttggaatgagaaaacaacctttagatgcagtatatatcctgaacatacttgagtataaatttttagctaacatagggaagcatagtaaagtatatcctttgtaacttcgcaactcaaggacaaaatgaaaggtcattcattgaatctagtaaaggtacataattaaccctagctttctcactataaggtttataaattagtactctccaataggatttttcaggggaggagcgacatttgtgacattggtaggatagggtacatggtatgctttattaaattgtataaacttaggttttaaaggcataagccaacagctttgcaaatatgtatttttttttaatggcaaaagttaacacctgaagtgaagagtgaagtcaggctatatggataatggaatttgatatgatgttacattttacgactaagtgtggctatttgtttagtattcttcatttatgttgctagttcttatagggcttatggttacctccttagcactacattgagattctgttgtttgaaagcttaatttttaaaaagatgtaaatatcttttaaaggctaagagaatgaaaggatttgctttacattttaatgaaacaaatttattaggttggtgcaaaagtaatcatggtttttgctatgttaaaaaatggcaaaaaccatgattactttttcatcctaatacaattgacattaaatacttaataaattatataaaacaatatttacagtaaaaatttcaaaaccttaatattctctagctttcatgctaaaagtgcaggcgcctgtagtcccagctacttgggaggctgaggcaggagaatggtgtgaacctgggaggcggagcttgcagtgagccgagatcgtgctgctgcactccagcctgggcaacagagcgagactccgtcttaagaaaaaaaaaaatggaaatctcagcctggcattgtggcatgcgcctgtaatcccagctactttgcaggctgaggcaggaggatctcttgagcccaggagttgaagaccatcctgggcaacatagcaaggcccagtctctctctctcaaaaaaaaaaaaaatctctcttaagtttatatacctaccttcttaaatagagtatgagtctgatttatacttttcctctcattaaaaatattgagtgtctgttgtgtgcaaggtgctgtgctagtagacaaggagttgtgatgagcattcttaaaatctgtaatatgtaatatgaagaaaaactagaagtgctgtgagagcataaaataggattatccttaatctagatggagttcaggtggggctttctgaagcagtaatgttctgactgagataaaagatgagtggtaattaagcagacgaagggggaagaggtgttgctagcagagtcttttataaagacccctagtgtgaaagaagcagggtatactggagaaactagaagtccagtccagaagtccagaaatgagcccggagatcaaggagtgaagagtagtggaagtagagttcagagactgtcgaatgttgtaggacagtttagattttgttctttaccctcagagtagtgggaagtcattaaagtgttttaaagggacaattgatagatcagatttgcatttttaaaagattcctctgacagctgttgggagaacagaatgaaatggggcaagaatgaagtggaggaaacaaagccaagggatggttcttgaatgagagtggctgaagaagaaataaagagaaatcaacagattcaagatatagttagtagataacattttttggagttgatagatgttaggggtttgggagaaagttgtcatggaggacttccaggtttcttccttccacaattggaaagctatgatgcatttgctaagatgaaacaaccttacaaagagaactagagataggggatgggaatgggtcctgagttcagttttggacctcttgaacacaggcaattcttgatgaatttgagaggggaaaaaagaggcagcagctagaggggaacgtggggcagaaggtttttaaaatgtgtgagatacttggacatgttaaaatgctgaagagaaggaaagatccaaatgaagtgagggaagtctcaaaattggtgcaagggaaggrgtaaatcaaaggaacagtccttaagaagggttagcaagaacatacctaagtggaattattgttcttaaatattaaataagaggtgcaatacctctagtgttttaacaagagaaagtaagaagcaagctgtataaatgtagtacatatttagtaagtgggaattgttttccctgaggtatggaactgtcatttggaggtgaggaagggacataggaatcagtagcttgagaagaggggaaatttgaaatagttatggtgactagtgaattgagaaacatagtaggtttttttggcagcattgagagaatttttaaaaagttaatatcatttaatattatcttaagtaaatcacatgtgaaggaaaacagcaagaaagtggactctacttagcagaagaggtcacttaacttttaagtggtccttaaacttttaagtattggcattaatttgccaagaccttgtgctaccctgatgttaaagtagggatgctgtttgcagtgccacaaatatagctgctgtatatccttatcgtagtatatgatttcacctaacttttagtgttatttatatgttagttaggcctcgtttgtttctaactgatactccttttttttttttttttttttctatctaggcaggcagaagtcctgaaggctgacatgacaggtattggctggcttatttctttttcacaacatattttatatattaaattaatggaaggatatcctctttcttatattatgcacagcactaaatcccatcttagttgccaaaagggatgatcatttactatctgctttaaatatttattgtttatgtagtttgaattcttgcttaaataactgttgggaattgcatgtaatactaatatatggtatactgaattgaatgttacctaatttagtttatataatcacttaatttttatgaaactttttattaatgatttaagacatacagaaaaaataacataccccatataaaccaaaatatcttacagtgttaggctaatatctttctgggaaatttttttttctattaataattaaccaaactttagtaggtaaaccttcagaaaaaatatttatagaaaaattctattggaagtccttgaaattgagtgagctaccttgctgcctttcttttctcccatatctttgttacttttttttttttttttttttgagatggagtctcactctgtcacctaggctagaatgcagtggcgtgatctcggctcactgtaacctccgcctccctggttcaagcgattctcctgcctcagcctcctgagtaggtgtgattataggcacacgccattacatctgactaatttttgtatttttggtagagatggggattcaccatgttggtcaggctggtctcgaactcctgacttcatgatcctcctgcctcagcctcccaaagtgctgggattataggcgtgagccactgcgcctggccatctttgttgctttaaataatggctgaggtcttttggaagaataactgccaggcttagccattgaaaggagtaaatgaggcatggtgcggtggctcacgcctgtaatcccagcacttttggaagcccaggtgagtggatcacctgaggccaagagttcgagaccagtctggccaacatagtgaaaccccgtctgtattaaaaatacaaaaattagctgggcgtggtggcatgcacctgcaatcccagctactctggaggctgaggcaggagaatcactttaactggggaggtggaggttgcagtgagcagagatcaaacccctgcactccagcctgggcgacagaaaaagactccgtctcaaaaaaaaaaaaaaaaaaaaagagtaaatgatttaaatacgaaattaggaaatatgttgtaatcaccgtatactggtcagtatgccctccgtaacagcatatgccatcctaaaatgtaataagaaggataggtactagtgaatcttattctaatttctcaataatttagttctgcagtgaaattcacaaaaaaaaaaaaaaaagaattaaacagcatacctgccaagatttgcaaagaggaaaaggactattaaaatatctttttgtcagctctagagtcacttaggctaatgtcctaagagttcatggataatctcgtgtcatcttgttcaaggaaaagtgtgttggggggtgaatagcttgtatatttactcagtaaaaggtactactcagttctttccattattaacagatttgtcatcatctatattgtgtatatcagtgtctgctctgagttactgtattatgctcttgaattggcattgaaaacataatctattgtgtgatgaaaacagaacatggagcaatatcaggctatctgtaccatttaccttttcttagacattgaacaaccttagtaaatagtcttagggtttgacctttataggggacctttggctgcccagaaactttaactaagataatgtctgctcatttgaatgatggtcttgatagatgagaattagtaatcttttacacttctttttcttgccataagtgaattaaagcagggttgactaaatctattagttagtgattaacaatttaactagggatgaggagctgatagtaaactctattcttaactagcctgtaaactcttaggagcattaactcaaatccaggagattctctttgcaaaataggattgtggtggctatagatgctaatagcaaacctaaagaagagtgatgattattccattgtgtagtagcaaaacgaagtagcccagctagttatgggaaatatataattgaaaagcccattattaagttcacctactgagggagtttactgtcagttattgcaatcataatcccagtgattgcaaaggttaatgtgccttgcatgactctggcagacagcatggccccaattttgtattatgtgtagtcatagcctgactttctgattacattctacacccagtctctcatctgacctctttagcaatttaatcctagtcttctaagtctttgtttacattaaatgactaatgtggattgctcacaaaagtatcttaggaaacagtctaccgctcattaaaataatactgtcatggcttattcggtcaatatattgagagaggagtaactgcagaataccaaagcaactgctagataatcagctgatgtgagaattctgtaaggacatttgtgggagtccttacagagactcccttacagagacaaaaaagaaagaaaaagttgctttggaaaaagagatacagtatgagagtaaacagaccaacttgacagtctgttatttcaaatgggttggcttactgtaaggcatatagtttcctgttatatgaaaaggcagaaatacaaacaaaaagcaaagggcaaaccattcttttttttttttttttttagcccttttcatttcatgatattatttcaaaactaaaaacagaagcattgtaaaccagacttagtcattagtcaaaagttgaaagtcatttgaaatatagtagtataaaacttctgcagcattctatggaatatatttagagcaggttttgccttggggatagagcaggaaggagtcactggtgtggtataatggttttaactgctggggtttatctatctaccgttatgtttttgtttttgttactcagattctaagctgggtccagctgaaktctggacatccaggcaggctctgcaggacctgtaccagaaaatgctrgttaccgatttggaatacgctttagacaagaaagtagaacaggatctgtaagtattacctatcatttgagaagtccctgtaagatcaagaatttcaccgagactttaaaacagtttggttcgttatttatttttcaacctgttgcagaataaactttttcaatggaaagtaattctagtatttgtgatatttggccattggtattatttcaaatacagtctttggaggaggtaagaagagaaatgtttagagttgaattctattaaggtcattacggcagctcttttagggcctgtcaaaaaaaacaaatatatmtatttcaaatactaagagtgtttggattgtctgtggtcagtcttataattaagccgcgatttaaaaaaaaaatacaagaataggctttagaaaaatctttctttgttaaacgtgattctataatttccctgtcaggaaaatgtatttgcattgtaaggaaagttccttcttttaattaaataagttggtagtatttcctcccctacccccaataaaatgaaaaattttgtgtatttagacttttccgcttcttctttctataaggggcaaaatggcagataaccagattcccaagtgagtaattgtcttttgtggaaggctttgccttacaaattggaacagggacattagcctgatagaaatttaaaaatcaattaagagtactttgtctactaatgtccgttaccctaagttttggtgaagattagttttttctatcatttacatctgccttagatactttatatttttaggaagtcgagtaatacagctaaattacgaccatcaaaatccttatcctgtgatgttagagtcaaggataagatgtcatcagaaatgctgagggaagtgattgtcctcctaagtcattaaaaagcctagtgctctagagcctcagaagctgatgttgatatagaattaggtacttccatgctttccaggtaagttgtaaacctcttatctgtgtttgcttcctttaatcaggccagtaatatcttccctttgttctagttttttattccccactgtggtttccaggtgagagagtgactgtattcatcataactggacttaaactgattccatatataactagattaaagaaaagcattttataacaggattttggtatgccatatttcagcattatattgtttcttattgtaaatagccaaatttgaaatgtggcttatgtttcaatcacaagagaaataaacaaaactattaaatagcagtgaaactgaatgctctgggaaataacttttggggaagtaagagatatggcttactatttacaaaatccctgcccccatatacatgtcacttgttagggtatagtccatcacatttggcactatatgtagaaatttgttaataccttatttttactttgatcttgccaccattgttctgaatttctaccgggattcctaaataaactctagtagttctaaaagattaatagctgaagccacaatctgattattcgaacatttggtaagtgtttactaaggtcagttggattctactgcatgtctagtcttgttcaaagggaagcataaagttatttaaataaatgaataactttaatgcaggtttactgtctcgtgtggtataattataacagacagttctttcttgttctcagggggaccagtgtctgcccagtgagtcactgctataccaaatagaattacattttgttttcagctggaatcacgcctttaagaatcagatcacaacactrcaaggccaggcaaagaatcgagcaaatccgaatcggagtgaagttcaggcaaacctttctctgttcctagaggcagctagtggcttctatactcaggtgagttctgcattgtataccagttttcttactattagtggtaaatattctgctctttgtacacgtcttaatgcatgtaaacaattcttgtaaccactatgtgggccatccagggattgatcacctataatcttttcttttttggcgacagagtctgactttgtcaccccaggctggagtgtagtggtgccgtcatggcttcctgcagcctcagcctccctgactgaagtgatcctctcacctcagccttccccagtagctgggactaaggtgcatgccaacacgcctgactaatttttgtattttttgtagagatggagtctcgctatgttgcccatgctagtcttgaattcctgggctcaagtgatccgcccacctcagcctaccaaagtgctgggattgcatacctgagccactgtgcccagcctataatctcaatgcaaatgtccataagacctttaaaaaaaaaaacgctgtgcttttaaaagggttgatgtttagcttaaaggttggaagtttaactgtatgaatataaaagggataattgagcacaaagccttagtgaaacagtggaagtagtcagttacaagtggtattagaggaaatgtgaatttatggatatagctatagtcattaaaataatagctatgttgcgccagataagaaatagtcaaaatttgtaatatcaagtgagttttcatagtattatttatacaatggaatttatctggattttgagatgttattaaactaagaagtagagtagcttttcctctgtttgaataataagctattattcattgkccccagagattttctttttccttagtcacgtcctgatagaacttctaaatcaggcaaggtaagagaataaataaatcttatttttgaccatgggattttctttaagcagaatctgttagaaaattaccatgtcatccatttgtaatagcatttgtaattaacaaaatttttgtatataaattagtatcttataatgaatgttaagacagggttttgagaatcttgcactgaaagaaatctttggccagttcttactatatagtactgcctgactattgctgcctatattttggcttcattctgattttatcatttctttgaatgaagagaaaagaatctctgctgggtgcagtggctcaggcctgtaatcacaacactttgggaagccaaggtgggaggatcacttgagcccaggaattcaagcaggttgtggtgctacctgcctgtaatcccagctactctggaggctgaggcaggaggatcacttgagcccaggagtttgaggctgcagtgaaccgtgattgtgccactgtactccagccagagcaacagagcaagacctgtctcaaaaaaaagaatccctgtgttggaacaattcagataactgtcatttctgagattatttatgttttacttagactaaaacattcatcacagttcatttttgaaagaactcaagtatggttcttagtctcaaaatttattttaaaatttatgccaacttttagcagcaaccaaaaagttgatactttttggggaatgcttctcgagagagggattggtccttaaagcagatgttaaagattaattcattttacaagtagctgtcaaaaggctactatttgtaaggcacgatactagatgctgaggatatggaggtaaattagacagaatctttaccttcaaagaaatatctagactaaatgaaaagatggatacattagtaagtatatttgttttcttttctgattgtaaaaataatgcataccaatttcaagaaatttgtgaattatacaaagtcccaaaaagttcattaatcctcccattctggataaattgccactttaatatatactcttcttgtgtttctatacttttttgcatatttaagaccacactatatatccatttttgtatctgttttataaacataatgtaagcttttccttgttaacagtttagcatttttgtgtataaagcattttctctaatactgtattatttcctgaggaccagttgttcaaattgaaatcattagaaagtttaaagtgaaagtttaaatactgttgacaccattttgtcgttttcccaaaagttcatcatttataacatttttcactagtttcttctgttgtcctttcattttatttagagttgtttgaagtacagaagttaccaggatttttttttttttgcaataccttttcctttgtccatagatcartgcatatttaataatgagggaaataatcacatttaaggaaacaaatagatattataattcaaatcttaacatttrgaaacaacaccaatgttctacaagagaataatagttaaattatggcataactgtagaatggaaacacaaaatgattacaggttgatatttatcaagattttataagatgaaaagattgttttgttgttgttaagtgaaaatcatataaaattatatatatataatttgattctacatgttaattgagtagtctcagttcagtgggatattaatgaaaatggtaacttttttttcaatcactgctttcaactatgctctgttggattcccagattcccatcatttcttggacagattctataacattctggttgctttccatttttgaagcataattcagttttaaaaccttagttttgtttctgattcaaatctcatttccttcccccatgaatagaagctagaactgggaacatgactaaagtagggggagtaggaaggaggtggtgcagctggctctgttggggggagggggaaggcatctaccttctgcagtacatttttataatagccattatacagattggtttgtcatcttgaaaaatgattcttaatcttttttcgttacatgacatacatgtgatatattcccaagggtttaactagaaattggtaaaccaaaacagatctgtaaggaagtaaagaaagaatcatcatttttattgagggagtatggtatttgtaaaaacattttataagcaagggaataataaaatcatgtaaatgtctcaaaaattgttttttaaagggaaaatatggatactctctgaaatttttttaaaactttttataataagcattgattctccccgactgcattccacaggcagtgattgagcaattatgataattgtagaataagcatcaataaacgtctttattttcacattatgatatcagttaacaatattaatagaatttttcacttgcttttttttttttttttttaagacagagtcttgctctgttgcccaggctggaggctggagtgcagtggcacaatctctgccactggagtgcagtggcgctcactgcaacctccgcctcctgggttcaagcgattcttctgcctcagcctcctgaatagctgggattacaggtgcgcaccatcacatccagctaatttttgtatttttagtagagatggactttcgccatgttggccaggctggtctcaaacttctgacctcaggtgatccacccacctctgcctcccctaagtgctgggattacaggcgtgagccactgcacctggcctcacttgcatttttatattgtctttaatcaataattgaaacggataatggtgttactaacaatagtgttccacaaatctttcttgattacatgcagtgcatatttagcaccagattgagaaagtagacaaattccagattgttatatggccttataagctaagatgagttttgaattttaattttaagtgtagttgcaggccaggcatggtggctcattcctgtaatcctgacactttgggaagctgagatgggaggatcacttgagaccagcctgggtaacgtggtgagaccctattctacaaagaatctaaaaatcaaccaggcacggtggcgcacacctgtagtaccagctactctaggaagctgaggcaggaggatcacttgagcccrggaggttgaggttgcagtgagccatatttgcgccacctgcctgggtgacagagtgagaccttgtctcaaaaaaaaaaaaaaaaagaaggagttgcaagtcactggagttggaaagtaagcaaaggaagaacatgatcagatttgcatttttaaacgataaccctggataaagggatcagctatggaagctagctatggaagttaactctattaattcctgttggccatacttggattagatggattggattgaatttctggaatcagagtaaaggaggagtcaaagcaaatacaattatcagtgtgagcagctagtcgagtggttgtaccatttactgagatgggaaacactagggggaaagtagctttttccctattaaagtagatgcctgtttgacatctaagtagagatttgaaataagcaattgaataaacaaggttggagcccagtggaaacatcataaaatcataaaaattttatgattatagtaaagaaccctgacttagtcagatggtaacagatttagcacaggaggagccaccattgcaatcaagaaaatgagagagagaaggtgccttggaagccaagagaaaaacatctgaataaggaagggagtcatcagccctgttgagtgctgctgagaattaaagtaagatttaaagtgaccaattaggtttgacaacatgaaagtcattggtgaacttaatgaataccatatttcttcatttctgaaactttttttttcatattttaacatatctgaaatagagataagtttataacagatgacaagtgaccatataacttgtggttttttctcaatattatataagatgatggttcatcttataatttatggtgtctttgtattgatgaaatgtaacttcagcagtgttggggatagaaacctgattagagtggattgagaagagactagtacttggttatccacagtaacattttctgtgaagatagttttttagttttttgttttttttttttaaagacaggcgctcactctatcattttggctgagtacggtgcttaatcatagctcactgaagcctcagactccttggctcaagtgatccttccccacctcagcctcccaaatacctaggactacaggctcataccagctacctttttttattttttgtagaatggagtctcactatgttacccaggctggtttagttttaacttcttagctaccattttgttaaccagttaaagcatggggcttaaagcagaaccaaattcctggtcaaagtaaagacataccattctgctgtaggttgtttttaaacatcaaagaacagaacggtagcctttattctaagaaaataggaaccaaaaagaaagtataatcactgagtttctgtattagtttaaaaggtaatattctataccttcataatcaatctttcattcttggcatggaataaagagctgaggagacaagagatagtgtaaaaattgataaataggaacccagaaactgttctagtactgctctagggctaattgtgactatttggacaagtcactacctctgtggtgcttagctttctgattgtaaaaaagagagttgacaaatgcttataggttcattttccagttttatagttccatgattataatttgggaagaactagaggcattaatattcagctacagccttaggaatatctcccagtcaatacttctgtataatgaagtaactaagttcttatcagactgaggaaactactacaaagtaatgtacatcagggtcaacctatatgaaggtaggacattgttttgttcaatttatgaaacatccttttctcttctttagttccatcttgttactgcctctaaaccaactagagctctctttctcagaatctttgagccagtaggagcttttctgtctgatatcaccacttaaactcttgggctcaggcagaaattttattacaagacattctacatgatgttccaaccataattttatttattttttgtgatctttcttttttgtttttgctagatgtgcagccttgcctagttttccagtctgttttttcattacctattgaagtcagttctttaaccctctcatgtttcttagttatccacttttgttttttgtttttttcataatatatatgtaggtatatatatatttacatatatatattttttttgttcctgccctgtgccttgtgctttttctatttcttaacccatcccgttcaggacattaacttatttaccctgtttttttatgtattcattttattttattttatttattcattttttaagacggggtctctctctgtcacccaggctggagtgcagtgtatatcatagctcactgcggcctggaactctggggcttaagtgagcctcccgcctcacccttccaaagtacggggactatagcactgcatgccaccacacgtggctaattttttgtttcactttattttcatttttatattcattcatttgtttattttgtagagacagattcttgctttgctgtccaggctggtcttgaactcctgacctcaagtgatccttccgccttgacctcccaaagtgttgggattacaggcatgagctaccatgcctggccttgtttacccaattttatgttagtgaatttcttgcccattacaaatgtacaagtaaagatggagtaaataatttccatgcccagtgagaaagggtgcgcagaatttatatttagttatggaggtgatttttatcttaggaaaaaggtggcatgattcagatccttctgagttgagcccttagggtgtcttattttgtattttgaattctgtacatgctagaaagagtggtgatagaatcaaaatatttctaattctataaccttagtccagtcgcttgattatttctgccttcacatcctcatctgaaaaaaattgagctttatatctatgtatactgtgttgctactagtttatcacaaggataaagtgagacaaatttatcagataacctagggaaataagttacgttataaatgtagaatattctgttggttatattgtgtgtcatgttgtctgtccttctctcctttcccttttccctctccctccctctctcccctctacttctctttttgtacctgacttgcccatttagctacaagctcatgaaggaaacatattttcttacttgtctttgtatctttcttgtttactgggtgtctgatatactagcacatacttggatgaatataataatatttgaatgacgatatttgtragtaaatatttgaataactgtgaagtaaatattcttcacagtgtgaagaactgtgtgcggggcaagaaataagcccttggcaagcaaagtgagaggagaaaagcctttctatgaaggagactgaaaaggagtgattggagagatgacagagaactagaacagctcagtaatcaaccataagatcagatgttttaagtgcagcaaagaggtccaataagatgatgtctgaaaaatatccattgtatttggctattaggtaaccaattgtctgatagtagtttcagtagagtggtaatggatggttgggtgagrggagggagaggggttgtgtggaagccagatgataatggattaaggagtaaatagaaattgagaaagcagatatgaaaagtgtggactcctttgaaggcatttggttgagaagaaggagagacattaaaaggttgctataaagtcaagaggagagtgttttagctctgttttgttttttgttcttgtttttttctgtgggagacgtggtgtgtaggccataggaaagaagcatgaaaagttgacagtagatgaaagaatggagaggtgggagacagacaggaaccagaaaagaatgtagcaataggcacacataggcagaagagttagctctgactaggaagaagagcccctcatactttaagaacagagaagagaggaggtaggaatgggtgatacagtaaaggtgtacactacggtgagattcgttgtatatgcaaagacatgtgaattggcatacagcttaagaaaataaattgcaagaaatacctaaagtctgacaaataccttggcttacatttaagtcaaatttgtaaccaatatttaataatttttgggtttctgagagtagtagctttctttgcttgcttaatgtgtctgaaaatcgtgtctgaaaatcctatccagttaaataatctttttttaaaatgctgctgtatgcacatcctagattgctgtaatacttgagaattcaaaaggtatgatttataatgaatgatactagttatcctgtgaaagattaacgtataatatatatatatatatatwttttttttttggagacagtcttgctctctcacccaggctggagtgcagtggcgtgatctcggctcactgcaacctccgcctcctgggttcaagcgattcttgtgcctcagcctcccttgtagctgagactacaggtgctcaccaccactcccggctgattttttttttgtatttttagtagagacggggtttcatcatgttggccaggctggtctcaaactcctgagctcaagtgatccgcccgccttggcctcctaaagtgctgggattataggcgtgagcccctgtgccaggcccgaaagattaccatataattttcatgcagtttttgttcagatttcagcagtatgtggtactaggtacacatcttacartttataaactttacttttagagcacttgtgacttactactaaatttygtttgtttttcttttagttattacaagaactgtgtacagtatttaatgtagatttaccatgccgtgtgaagtcttcccaattgggaattatcagcaataaacagacgcataccagcgccatagtgaagccacagtctagctcctgttcctatatctgccagcactgcctcgtccaccttggagacattggtgagcctttgctgtgaaggaattgataatatgttcctccttttctttggaatagtcatagaaagaaactgttttcctttaagcggagcatacacacacaatttagattgtcataagaagaaactataaaatgtattctaaggaacttaaaatttctcaatatttttgggattggcagagcatcgtgaagaaagtaactttcatattaagatttaaattttattccaactttatgtaatttatataggcaaataataaacagcaaaaacataatcaaagcttaatttttcaaagtggtgccataatttctaaattaaatgtactcttctggaataaatgaggtttataaattactcctgaagcgaaattgccttctttctttcttaccaatggactaaaagttgatttttaattttgcttcctttttaaagtttaatttgtatttctattatttgcattttatctgggaatattatataacttatttattcttgttcattcctttaaggtgacctagaaaggttgtaaaacaaattaactataggattatgttttgcttgtcctcaaataacaaagaatggagaacattactgcttttaagtttgaaattttagatttcttaatattgtaagtcagcggttccatgaggaggtcacatcagagtaagcagtgagtttggcagggagattcattgatactgtgtttaggttgttttgctttaaatataatctttgcacacacatatttaatattgcrataggaatgagacatttttcaaaatcactttataaaatattgaaaaatacataattttcagatcatattgtatagtgtattttgttttgttttgtttttaagtgccatataactcaccccttcttgtgggccggctccaggtcaccagcatagtccatagtgggagctggtgatgcatgacactggaggacctgaaaatggggtctaggtaagctttaaaattggttacatgctgaatgtcccaaataaggaaggctgatggacacttcacacataatcctatagttaatttgttttaaagtattttgtctttaattttaaattaactttaatgtctttattatctttagaacttaaaactatagctgttttggaaatactaccctactgtttgttttttgggttttttaaaactaattttcttcttcttagctcgatacagaaaccagaccagccaggcagagtcctactataggcatgcagctcagcttgtcccctccaatggtgagtggacctgtcaacctgagattgaccgtgacactttgttctttataacaatgtggcagataactcagggctcacctttgaagttttatgaaagcaataaatgagttttgttattgtcatgtttttccatttaactgtacattccatgtaaactaaaatgaattttttttacaagtaagatgacttttattatttattttattttattatttattattgtcagtaaagcaatatagatagaatctcttaatgtaatctgatattgtttctacaactctggcttccttaattgcttatagaataattatttctttagataccaccattcccctccccccagaaaaacaatctattacctaaaagataatcttttaatggccccaaactaggcattagcagtagttcttgagttacagaaattacagcagatatttaattatttaaatcattcttactaagacgttgaaattcctttagattctagaaagagtctaaagcagggatgatagtctgaccacactacttgtttcatatttgtttatggctgctttcacactacagtggcagagttgagtggttgtgatagagaccctttggcctacaaaactgaaattatttataatctagcccttgctgaagccgctctctaccctaatattgactgtttaacctgtatatgatagtgtgtactgtcgctgaagtgtgctgttggaccttacgctggtttgcaatgaggcagtcatatttaccttataaaaatactccccattgtttgagtatttaaacactgatcatttgtattcttatagcaagactttgtcactcttggggttactccagaatcttaactttctcctgtaggtcagccttataatcagttggctatcttagcttcttccaaaggagaccatctgaccacaattttytactactgcagaagcattgctgtgaagttccctttcccagctgcctccactaatctgcaaaaagcactttctaaagcactggaaaggtagggttgtttggttttttttttctctttccaagaggactttgtaacctggagccttaattcctcataatttggtttacagaaaataacggcctatgcttctcttatttctaaacatatagatttttcataatttgtgtatagtcactgaatttcatccaatcaatatctgattcagtcccagtaaaagagtacacaggctgttaatactgactcatcttgagtgtgttgcagttgaaaaatcagtcaaatacagctcttttgtgtatcaagtatttagcaagccagtgcctccttaaacagttgtagccaatttgctgcttatgattcatggaatttttttctttcatttcagccgagatgaggtgaaaaccaagtggggtgtttctgacttcatcaaggcctttattaaattccacggtcatgtgtacctgagtaagagcttggaaaagttgagccctcttcgagagaaattggaagaacagtttaaggttagatttcagaaatagagaatttttgtcttgtctaaatcaggaagcataacatttggaggaaactgactcccagtttttgtagttacttaactgtgtgaactattggtaaaaattatattcgaagtatgtgaaatctttgcatttatcatcccttcaatttaaactgaggtacagtctgtataaacaaatataatatagcagtgttttcacttgagtagttgccatttgacaaaaattatcaaagtggaaaaaaataaataactcctcagttttgaaactactactacttttgatggtttgtgtattcttagatatgattatgttacctgctttatagatattggcattctccaaaccaagttcattatttttattgtgcttgcattcatcaggattgtggtagtttgaatgaaaggaatgagagtttcatttaacagggatatattttactaatttgaagagataacattaaccttcattctatttatatatgtgaaaatgatcttttattagtatgttaagatattagcagtttaaatgtataatgcataaaataaggagaaagtcaaaagtattaactttttttcagttcatgtattcaaataaatatttgactactcatcggtcattgttttaggcactgtgttaaacagtaaatgacaatttcaaagaacattttatatttcttggttatttctaggtatctatatacttgggtaattgtgtataactgcttcatagtatttctgtaagttctttataagtcaggcattttaagagattgtagaacttggacagttaaggtgtcacttagccaaaaatagtcaatgcgaaatagtttttacaggtaatcgctttttggttgatactttctatgtgcaagatattagaatagataattataaatagcaatagtttgttttgttttaaaatatacttagcctgtgacatatgatgtataaggttgggtgtgtgaaaggaacagctaactttgtcatgtcctaggctgttcagcctggaaaagaacaaacaagtctaaatagttttcatagtaagtattcagacatgtgaaggattatttgaaaagaacatacctgtatctttcctgaagtcaaaactaaaatcttaaattttaagttgaaatctatagggggctgaccgtgggatgttgtggattctccattttggagagcttaacagtcagattgacagccatctttcttggattatttaagtgcagtcctactaaataggggattggactagaaaacttcttgagattgcttccagctctggttctgtgaaatactctctaaattggtggtggtgggtggtccctaccttaatgagatcttcactaactaagttattctagtctaaaaacctagtaagttttgcatttggttcaacctcaaacactaacactctcttcacatatatatttctgtatgtgaagttctggtaagtgtgggtgggcagtttctaaaatatactttgaagtatcattccagcactctaaagttaaacataaaacatagtatgaggcagatctatttgaaagcttacccagtgttgaactagaacattgctggagtgaaattttaacatagtggagtaaaatttccaaagtatttctaaagcatatgtagataattagtatcatcaacatgtatacttcagtgtttctaacaacctttagctactaagcagaaatgtttaccaagttgaggtccactaagggatttaaggcctgggatctgggaattgagatgtaatacattttctgtaagttaaatgtgggctgtttgttaatggtatttatttcagtatatttctcaactgtagttgaaagtttgagtagcaaaaatcttatcagttctaatctgactttattccttggaagactctctacaatataatctaaattttaggaaattacaactgaataacttcaaccttatttctgaatggataggttgttcattcactaagtgtttattaagtacccgctatgtaccatgcacttttctaggcttttagagatataggggaaaacatgacaaagtctggaccttcatgaacttatattatcatttgttagtactagggtgtattcatattcattaatacttctgtgcatacgctagaaaattctttaatgggctgtgaccctcttcagtaggatattgccttctaaaattaatgccagcggatttatagatacaggaaatacattaccatattgtgcttgtaagaaactgctttttgagaaatacaactacatattctcattttatgccagtattatttgaataaacgccagctgatttagaaggttagttgtagaaactgaaggagaaattttgtgggaaaattctagagaagagacaggatttcaggaaattttgaggaaagattaatgcttgatgtctttggaaaagggctaatcattctagacatatacaatgaaatagattgcaagaagactgacagtgtgatagaaagagttcatgtagaatggaattatattctctaatgataatgtaaaagacttccctcttagaatcgtagagcttactatggctatttcaggttctttatgtaaataaaaacaaaaatctcagagtagtctgggcagagacagctgtaagtttctgacatggtaggatctcctgtcaytgctggtagaactgtaagtaaggattatctgttttccgccataatgctagtgataatgaatccctgctctctgcaaaaatttcccctgggcatagaggaagactggctatggctaaagtgtaggatgaaactaggaacttctgttagaaaagtatttttgcctgcaggtaatctaaaataattgcagatattaaagtagaagggtaattccattgagacaccaactgagagcatctgggtgattttttatagtgctggttaacagatcactgtgaacacagttattagaaggtaaatgaaatttgatgatyacgcatgtacttctctaagaggggaaaataccagttgataatttgtagaagtacctataatacatcctaatgttgttttagtatgccatttaccctgtgttccagaatatgtmcttgctatgccttgtttataaaataagttttaatgtatcaagcctctgaaagagtaaattttatgacaaatctgggaagtcatgctttatgtactgggagttcaaaaaattattttttgagtctgttgctttctagtcatttgtcccaacttaatattttaatatgtatacatcttgtataaaacaatttctaaaggattaagttgtataaatttatggatgaacactcaaagacttttgtcaggtcatatttaaaaatatatagtttcctaggagaaaaaagtttgttgataaacaattcaaacaactctgtggtgtctagattaattcctttcaagacaaaaagtcagtttgggaaataattagacccagtcaaaatactgggattgagggcagaaccatttactcatctgtaattctattacacatggtggttctaaatgcagactaccagtttaatttcttgtgtcaaagatggttcctgttcttgataatatatgcagtacgtctgtcttcttttacagaggctgctattccaaaaagctttcaactctcagcagttagttcatgtcactgtcattaacctgtttcaacttcatcaccttcgtgactttagcaatgaaaccgagcagcacacttatagccaagatgagcagctatgttggacacagttgctggccctctttagtgagtattgaattacttaacatgtgccatcttttttgaaaaacatcatcttaggcatttcatcgatgtagcaaagcacagtgacataaaaaagcatagtgtatttcttacactgaatcaggagttcataataactttcaaccccaagttctatccttttatctgctgataccccctcatcaagttgtaactataacatttttaatatgggaaagaaagcgtctttttagaaagaagctgtaagatactcaagtgttaaacagaatatagtagaaggcacataatattttaatttgaactggcacagtttcatatttcttatgctttttgaatacatttttttttcaagtgtcttttcttggcatcctgtgcaagtgtcctctacagaatgagtctcaggaggagtcctacaatgcctatcctcttccagcagtcaaggtctccatggactggctaagactcagacccagggtctttcaggagkcagtggtggatgaaagacagtagtaagtatttttagaatttcatgttaacttgtgtgctttgtttgtttgatatccataaatatgtaaaaactgccttctaaaatacaacatttgaacaatagaatactgtattttctgccgactctcgggaattgaactgaagacctctttgtacgcttttcatttgtttatttgaattcttcatgtgaggcttagtcttaaggatttgtgactccttgtacactcccttgttcccagttgctgtcctggggaaaaggcatttttcacatttcaaagtgaacttgaagtaaaaccagtttgtttcttatctattacagtattccttaattttttgtttgagttgaagggaagagatttttattccatttttttctgtacatgaactgtttgatgttgccttacagtaacactcaatttgaataatatttgtttatttgaagcataaagattgaaagttattttgattctcaccattttctctgtcatctctactcacagtaattctgacagctcttaggaaccattgattttacaatgacaaatgaaaactttcagtgtacctttgattatagaaataaatacttccaaggtggcttggcaccaaataggaagttcctcccctgcatattttgatggtatatttaaggagaatctctttgaaagttttgctttgtggcccagcatgtatattgaccarggtcacaacttagaaaatgccttttttaagccacatttaagaccctgtgggccaagcactgtggctcatgcctgtaatcccagcacttggggaggctgaggcaggcggatcacttgaggtcaggagtttgagaccagcctggccaacatggtgaaaccccatctcttttactaaaaatacaaaagatattagccaggcattgtggcatatgcctgtaatcccaccacttcgggaggctgagacaggaaaatcgcttgaacccaggaagcagaggttgcggtgagctgagatcgcgccattgtactccagcctgtctcaaaaaaaaaaaaagaaagaccttatggtctgtctgcttcataattgtcttttctctcatgtagttataagctctttccatgatatattgacattatcatgaatagagtttaggaacatagcacagcatactatatacatctccttttaatgttagcattggttttagtaatacggattttcagacattgcttccttgcataaaatttttatttcttaactcaggctatacagtttttctactcttgtgtactctagaactcaaatttatgtttaattcaatatattatatcagtaatgttacaaaagaagaactgcatgttttaccatttgcttatagagtttttatatttatgggtaggaattgttattttcattgtgttttgttttttcttattgttgttcttgtacagtgatccttttggcccattctgtgtgttcccatttcttctcatggcaaaagatgttgaaccagaaggaacagctttattggcaaacattttttccctccatttttttctgtcatttactctttccacttcctcctatcagatttaccaaaatctttagaattatgcccttgtaggtgtttgattctgtgttaaattatgttagtactcattttaaagactagcatgggatatcactttaaaactgaagatttttccttgtgtgtctaatacactaaagttataatgttcatttatatcttttaagtaatggaaaaacaatgactgtttcttttgtgaactcagaattttatgtatattcaaataatcttcagtttcttatatctgggccttctcaatttctagaatttactttcccttgtacttttttgagaacatactctcttaagctaatgaatacatggaatagtgattttcctttgtagaaaatagttayagggtaaagcagtatatcattaggtaatccactcatgcgctttttctacagtgttttctcgagagcttatgtgtgttgcatgaagacattgtacagtatagtattctcttttagtttactgacctttttttccaactatctcttgtaatctgttacatctccaaaggtttgtagcagacgtttattcttcaatatttgtttatatatttttaatatgtgtatatatttgttgatatttttaaagtagcatattcccatatttcagagtgtacaactgtcccaaatagttaacttacaattttccgtagtgtgattatttacgtccagtttctctatcctgggcacttcacctcatgcttttctttttctttctttcttttttaataaaaattggttgatacatattcagaggtaagcttcatattaaggagaatgtgattagacagatgagtctactgtaggaaaatcaaagtaattgtttccaggccaaaaccaattattttaagctaattactttaaccaaataattttaagcaacatggctacttccacccatcacatctattcctcaccccagcaaatgaacactcaaactacttggatttgtctcacttcaaaaatcttgccctgtcatatataatacatcagatttataaattgctcttatgtttgaaagataacagagattttgatacaaatgtttatatgtaaagtgatatttataaatctgtatccataatggaaactttaacatacctcactcaggaaccaaggacacagttaacaaatacatatatagtacgtacttctgaatagtggaaagaatatgttctaatatttcatgtgtaagctttcacaaaaattgtgtattaagaaacagagtttagagttaaggcttttgtaaaaatgtggactttttgtaccataaaaaaagaggcattatcactttgaacagggaatgtgatttgtgtggtataaccataccctgtcacagattaaagaactaacagcggcttccacaactcataatgtatgtgaaagctctataaaaacatagtatgttatttctttgctcagaattttctcagcctatttcagttttccatgtttaaaactgacaaattattttcaccatttgttgaattaggagcatgggaaatgatctacagtggtagtaggtctctgtcatggaaatttgtcccttttgttrtatctttatcattatctagtgtatctttgaaagtacatttttaaaaattatacagcctttgaaatgctgaaataagggaaaaatacataaagtccaggacctatagataccattttcatggcttattagtgttctggtttctcttacataaaaataaagtctgaactctttctttaatttacagcatttggccctggttgatttctcttctgaatagtttccatccccatgaagaggacctctcaagtattagtggtaagggctaccctaaccttgtgttgttgatgtggttctccatcattaatggtggcttaatgccagagaaaaagaggtttttggtgatgaatgattgattttaaattcagtatctcagaagtgactgtgaactctacataagtgggtgggtggaagtagataatgttctcccagttcttctggcagcttattctcatttagcatcattcaaataggagttcagagagtgtaataccttcagattctttcattccttcctcctcattcttactattttaaaaaaagcaattaacatgaacattgctctgtcaaagtaatacttactcatcgtagaaaatttggtacaaagaaaaagaacacaaatctcccatacagagataccttttactagtcacgatagtatatcttcttcgggcctttttcttacgtgtgtacacacacacaggaaatgattcatatcaaataaagttttgtgcctgattttgaaatttrgtattatattgttagcattttcttttgtcattaagcattttgaaaacatgacttttactggcttcataatattccatcctatggaagtgctataatctatttacgcactttctgttgctttaaaattttccccattataaataaataatgctgcactgaacaacctctggcttggcttctttctgactttttttttcctcttaaatccatgctcctcaggcattaatttgcacataaatcacctgaatctttttaaaatacagtttatgattcagtaggtttgaattagtgcccaagattctgcatttcttacaagctctcagatgatgtcaatgttattcaatactttcagtaaaaagagacaggtaatctaaacattgggcttactggatccaagactatgaatttttaagactgctgattttttaaaaagccattctcctcagcattgagtattaggtgagtgttaggggaatgtctgtgtcccaaagataacatgcagagttttgacaggtgagttattttcatcaggatcatgataaagaagagcagagamcaataagcattataatttctttctgtatgttaatttttaaaaaaatttagtgaacagtattccaccaaacaacattttaattaaaatgtttgcaaattttgattttgaccctttagcgacaccacttccagaggagtttgaattacaaggatttttggcattgagaccttctttcaggtaggtgatagctgaagtacctttatcattgccagtgattgcagtattaaaattagcagagaattgggcttggatgtagaggaacctttgatctgtcccagctgtgtgttatttttgtaacgtcaactaatactgaaagttgttgtgaattggatttgtgtatgtcacgccttcaattcctgtgtaataaaaattaaaatgtaacctttccatctgtgcccttgatcccatcccttctcacctccctaagaaccttgctccatctgttatcctctctgcattgtatttccagtgtcttgtctttctttcctttcttttttaaacaactaattatctttagcctagtaacatttaagtgtgccccattcttttaaaaaggtaaaatgaatttacatccctctattttcctacgttgccttatcttttcatcatcaaacttcttaaaaagagtagtatgcactttgggaggcggaggcaggtgaatcatgaggtcaggagatcgagaccatcctggctaacccggtgaaaccccgtctctactaaaaatacaaaaaaaaaaattagccgggcatggtggcgggtgcctatagtcccagctacccaggaagctgaggcaggagaatcgcttgaacccaggaggcagaggctgcagtgagctgagagatcacgccactgcactccagcctgggtgacagagtgagactccgtctcaaaaaaaaaagagtagcgtgggccaacctgactgactccacttcaactcctgatcattttcagcctactgtggtttaaactatcagtgccttctagataccaaaatccagtgactatagtctttatcctattgaattttcttcagcattgagtccgtcgatttccttccttcatgaaacctttttccttagctctgtgatgcaatttttcccacccttagcactcagtctttttcactatttcttttaaactacatgcctctgaatgttgttgttttccaggattcttttcttgccctttccttctcactttgtacattcaccctgttaatcaaatccatccctatgtctcttgaatggtatgtcccaaattttcagctttgacttctcttgaagtttggatgcatattctaacaatctgacctcccttacgcattttaaactttaacgtgaccaaaaactgagcttatattttccgatttggtcagccaaaaagcaatcttctttctctattttctgtctgtgcctgtggcattacccatctatatgaccaagctagaaatctgaaaaacccttgtttctatttgtctttctcaccaagcctttataattatgtgtctgaaatgcttcttaggttcaagtccttccgtttatttccctatacatagttcaggcttttctcaccagtttacctgaagtataaaaaccttcctacgtatagttcttctcctcctatagtctgtttctacactgcctatagtttttaagtatggaaatagtgatgttgcatgactaatatttttatttacccattcccagttgctccactgtctcttttagcttgatgctcaagttccagcactatccagctcctagttgttcagccttattttcttccatttcccccagtatttataaactctatacactatgtgctatacttgaatagctcmctatttttattcctccacacctttgttcatgttgtgcctagaacatttccttctcctctactgcccttccatcaccagcctggtaagcacttagccatacctgtcaaggtccagctcaggtatcactctatgaaacctttcagagcttctcagaaggaactcatcctccttttactatattcacttaattctttacatagttcttattatgcttatcagattgaatcataattatttattcccaaaggtagggactcttatttatctttgtgtcctcagcatctagccttctgcctggcaattcttaaatcttcttaaaaaaaaaaaaagtttaataaggagaaatctgaaaaatctttattttttcaggttggtttacccttctgatatcaatgagttattctatatgctttacgatatttatacatttttctgatttagaatggtccaccacaaagtggatagattaatattatttattaaaataggcacctcagagactcttagcattgccatggtcatttcaagcaaattacttggcatgcaagataaatgtttataaaactttattcttaaaatgataaaagaatctttcctaataaaaagttgtggtttrtttgagctccctgactagaaagtgaaatgtgagtaaaaatattacattaatgtaatgaatttgtatattttcttttctgctttgtttcatagtttgtaaaaatctctggtagtataaattctaataaatgcagttgattacatcaagtagctaacctatgtgggaagtaatctgaagccattacagttaatcaggtgaacttggttgcctggaaaatatctttagcaatttaatattctcataacttgcttgtgtcaattttaggaacttggatttttccaaaggtcaccagggtattacaggggacaaagaaggccagcaacgacgaatacgacagcaacgcttgatctctataggcaaatggattgctgataatcagccaaggtaagtctggaacttctggtctacccctttttaaccacctttttagataaacacatgcgcgcacacgcgcgcgcacacacacacatctcatatgttacgtattttaggctttggtataaatattgtcaatcatgaactcttaaatcgacatgttggtagcacaacatctaattataaccctagtgagtaagtatactctttatttagaatctctgttctccctattgtgtattacagaggtctttcttgtttatcgtgagtttctgctctaatttataaatatctctgtaaatctaactgaactgtactttcacagtcatggtaatttgtattggcctgggcatggtagtcagtttcaggcaggacagaccaagatcgtgctagtagccagttaagtacaaagcagatgtggtcgttagtgtagggaaaagaacgcaggttttgtaattccattggtttgagttccgtttcgagttccgcagcttctcaagtgggtgtccttgggatctccccagtagattataacctttccaaagtcactaactacttcctcatttttgtattcaggtttctgtcatacagtaggtmgttaaatgcttccatgtttgaatgaacttaccacctccaagcttcaattttcacatctatagaataggaattatatatagctaccttataggacatatcaagggccctagaccagtgtcttgcacttgaagcatgctcagaaaatgtaaattctagcaaacgttgaaagagccagagggataggttgtgacgatgttaagtgtgataatgagaacctcagtttctacataactactttttgtgttacctgaatccacattgttatatcctgctgttttcatggttattagtgctaggaatatattgacttggatccacacacaattcagttgttattttttaagttaatgttttttatatatggatttatttttgcttttttaggctgattcagtgtgaaaatgaggtagggaaattgttgtttatcacagaaatcccagaattaatactggaagaccccagtgaagccaaagagaacctcattctgcaagaaacatctgtgatagagtcgctggctgcagatgggagcccagggctaaaatcagtgctatctacaagccgaaatttaagcaacaactgtgacacaggagagaagccagtggttaccttcaaagaaaacattaagacacgagaagtgaacagagaccaaggaagaagttttcctcccaaagaggtgagaagggactatagcaaaggaataactgtaactaagaatgatggaaagaaggacaacaacaagaggaaaactgaaaccaagaaatgcaccttagaaaagttacaggaaacaggaaagcagaatgtggcagtgcaggtaagctgtatttgaactataaagcaggtagaggaaggctcacacaaaaggcaagatttttcattttgttctaaagccatgagaattggccgtcctggaagtttaaatgcattatttaattgcatagtaaggttatataaagagctgtgatagatggttactttttcaattcttgggaattgtgagtgaaaaaaaaatctcagcctgatttgacactttcgtcagtcttcaccaatttaagcagtttgaaaggattagttgcagagttgtcagtttcacacaggattatattttatttagaagatataactaccatttgtcaatgctatagtggagatttggggtcttctgtagatccagtagaaccaagagtatattaaggcttatgcagtttttttttttagattcactataatatatatatgtgtgtgtgtgtgtgtgtgtgtgtgtgtattttttttcttggaaaaatatgagacttttttattgacaattatacttgtcccggctattggtattaatatcactttaatcttatcctggatcctgggaatttataaaggaagaacccaggtttcttgctgggaaaagataagcactgctcagttatttgtgactttctttttattaatatattttcccaaatagaaaagatggtttcatgtaaacagaaaagggcctttattctgtgatggttttattaatactattaatgtttgaataaatacttaagcagccatgtgagttgttaacacattttagcaaatgtatgtgtttgcatgagaaactttacattgttgaaggctgcttacaaataaatagtacctttgaagtatttctctaatttttttgagaaagagaaataagaaaataatagttccattttaacattatagcaaggagagaaacagaaagacaaggtagaaattaagacataggggagagagagagatgctagggaaaggcaagaaaaaaaaaaatgaactagaaagccaaaggatccgagttttagagataatgagtccagcattttctgtttacctttcctccattctctgtaactgctcacaataaggtccagactgaaaatacaatctccttttttggtttctcatccatctcaaatcacctataaatgattaaagaaagaaagagtraacatatcaccacactctgtacctcgtccygggttttctataaatgctactcatgttccctcattttgctcaactttgagcagtgcatatgacatctactctctggctccatctataggatctcagggcctgttccttactgctgaaagtatccttatttattctgaagggtggtaaagttgcagggtggaaggtggatgcctgactgcacatatggctacccagatgaaatcaaactgagggccaaaataactcacctatgggttaatagtcattattagttcataattcatgtatgtcgtttaatgaattagagtatagagaaccctgggccccagaacaagcaacttaaagtcatagacaagtttttttcaacttgttagcatcaggcatctcatttgtaaaacaaatgggctctaaggtcctttacatttttggawttttgtgatcatgggaaagcaaaataattagtaaaactaagatagtaaaattatcttttattggctattaaataatttgctttgattttccatttttaacttaggtgaatttaaatatcttcagcatgtactttttgatctaatgaggttttaaatactttcttaggagtagggtcttctttctagcacatttgagtttcaatttattatagatagttttgcttctattggttacaggtaaaatcccagacagaactaagaaagactccagtgtytgaagccagaaaaacacctgtaactcaaaccccaactcaagcaagtaactcccagttcatccccattcatcaccctggagccttccctcctcttcccagcaggccaggtaaatatgttttrtaatttcttctacttaatcttttctgtgcaagaatttctattcagtcactgagaaatgtgttttctgttggagtaatgttactaagccataaaaagttctattttccctaatacttataaaattatttttgaactgtttgtgtgtagtgtacatacaagtgcatgtttgttattatgaaggaaatcctatcactaaatacagaagctactcacagaacactgattacttcagtggatagaggaaaaatatcaagtctatttttagttcttcaaatcaagttaaagattgacaacatgactaatctcttttgtgatgtgttagaagactccctctacctacctgttaaaaaaaaaatgactttttttgcaattttttgctgtttccttaaaactaaagctgtgttcttctgttttgaagggtttccgcccccaacatatgttatccccccgcmtgtggcattttctrtgggctcaggttacaccttcccagctggtgtttctgtcccaggaacctttcttcagcctacagctcactctccagcaggaaaccaggtgcaagctgggaaacagtcccacattccttacagccagcaacggccctctggaccagggccaatgaaccagggacctcaacaatcacagccaccytcccagcaaccccttacatctttaccagctcagccaacagcacagtctacaagccagctgcaggttcaagctctaactcagcaacaacaatcccctacaaaagctgtgccggctttggggaaaagcccgcctcaccactctggattccagcaggtaagttacagttgtgtgtactatccagctgaatgaaataaggggaaatgctgaaagattcaatgttagaaatgctcattaaamtttgacatacttcttgcttagatttatagtgattatgggaaaacaaaagtattgtctctactgtttatgaaagttcaaatgttttccttactcttgtaaaggataaaatactagatcttaagtaccattcttggctgctactaagtgtccattttattgaaaatggattttctgcaaataattctcctataggaacataaactactagggaaatagaatcacagtcttgatgaggtgctaagacagatgtgacaccaatcttaaatgttgtcgttggaagcacagcacttgaagcagaaaggggaaacaaacactcttatgcaaatatattcattcattcattaaacctcttaaatagttgaattaaaagaaaatatgagtgtggtgcccataatctgtttccaaaaagctctgagtattgaatagcccaaaaggtaaaggaaactgctgccttgcctagagttttgttggttggaaaacaccccaagttcattctgtgattctttagcattcattataagtaatattgcattttatcctcacctttatgacaggcgtctcttttttagtatcaacaggcagatgcctccaaacagctgtggaatccccctcaggttcaaggcccattagggaaaattatgcctgtgaaacagccctactaccttcagacccaagaccccataaaactgtttgagccgtcattgcaacctcctgtaatgcagcagcagcctctagaaaaaaaaatgaagccttttcccatggagccatataaccataatccctcagaagtcaaggtcccagaattctactgggattcttcctacagcatggctgataacagatctgtaatggcacagcaagcaaacatagaccgcaggggcaaacggtcaccaggantcttccgtccagagcaggatcctgtacccagaatgccgtttgaggtgtgtgttctttcctatcaccaggcaatttggagataggtctgaggttgactgtcttttgaatatctcaaatagatcttataaaaaggccactcttattcgttagtactatagaatgccactgagtattggtgtagctcttggtttcctcctcagagttgcacagtatgttttagtttggaagctgaagaattccgtaactgattttgaactctgatggtctggcaaagaaaccatgtacagaaatctctaaaacagcatgttagagaattctgagacaaagcactcctctcagttgggctgartcatctaagtttaaaaataggtttactgatatttaaataaattgctctctgagaggaacaaggttagccagttatcttggacagtggaggtccctttctttgccctttttattcatgagaaacaggtgaatgttagtaactttttaaaagatctgtttctctgttagcacaagatatgctaatcattttgctccatagcattgttttactcactagccacattaaccttttgtgttctgctctgtcagtatttttgcttttctattgtcttgaactttctccattattgtccttgtgtcgctttgcctttgcatttcagagcsttttttctctttgcctaataccatctatctcactatccccttgactttagttgtcttcttccacctaattatgctactattcctttatgcttttgttatcccttattgcttctcactgtgatgctttctgtcactaggacyccaagagctcccctctgcttcctccggacctgttaaagagtctggctgccttggaggaagaggaagagctgattttttctaaccctcctgatctttacccggctctgctggggcctctcgcctctcttcctggacgaagcctttttgtatgtatttgacataattctgcttcttggtctaacccccagctgcttctctragatactgtagtacacagattaggtgatttcttctcttcctgsggctgtccttttcagaacygtaaaacrtattttctaattgcctaaaccaaccttaagttggtagtaggatatagcaaaacatttctgcctttatagttctcccaaatcatggagacataccttggttttatgtgttatccagaaagcattctgcagagctggtcacacacacgatgtgatggtgacaaattaactcactttgcaggtgacacttccatctggacccagaaattttaagtatcatttaatcttgcttaggaacagtgagatttatttctcatatgtagccaaaatatgaaaggaaatatgttcttgattttttttttgactgacattactgaacagtatatggctcttttttgtttggttaactaaatgcagaaagagccctgatctaaattcaaagttggattcataaacagaatgagtaaaaatgaagaggattctatttataaacattgtcagagtgtcataaatgagtaaatatgaaaataactagaawcacwtaaaataaaatctgagaactcagcctgcatttcaaagaacatcattctatatgcttgtcagtgttcatattatattttactgtgggtggggagtataaaagatggaaagaaagatgtatgctatgaggctttttcccctctctttattacaccttaataaaacataaaaagatagtaaattttactttcttgctgtttctttctcataaacacagggcaagaacacattcgtaaaattaaagtacattaattttagtgtcaagagaaataaaaccttaacagctttcatgacattgctgccatccctggcacttgaagttcccttaagaatttgcctgggtagtagcagtaggggccccataccaagttattaaataatagcaataaaagatccccctggagacttaaatggtagcagtgccatggctgagcgcacagggattgtggaagctcagctgctatactgttgcctctctatgtttgcctttcttgtggcttttatgctagagtggctttaaggactgagggtagtgcttctctgtcyacttgtttcctaatcccttagttcctgttcctgttcccttagtgtccctttcattggaaatggagctgatggtagaacaagtgggagtattttcagggtttttttttcatgtttaaaagacaacaatgaataaaaaaaacttcgactataacccttccaatatttaacattaatgatacaacgtatgtcaaagtgcttctcttgtcgtaggtatttagtaatgttttattagccagctattcagtgacagcattagagattcagctttgtttctcctaataactttgctagggccaataaatgtaagcttgacttttagcaactgttttactatatactgcaaatagagctgcttaaaaagcatattaacaaagccatttgtcaaatggatttgaaaggctttttaaaagtcaccaatgttaatgttttaaaaattgyggggtggagagaaacagtgttggaacagttcagcrttttgttttgagattaagtgcaactattgacaaggggattcctgaggtccatgcctcataaacactcagagtgctgtttaccagggtctctggtccctgccagaatataatctctgactaggtttgatctaaaaggaggattctatgcacctgtggcaactggcacttaggcggtgtcttggtgttaacagatttgaattcacatcttctgagcctcaaattgtactcagtgggcgaatacaggcatgcttttgctttggttccatagtatggtaagattaatattaagaaaatagaaggtataacttaattacctttttttctgggactgtgaagaaatccttattggagaagccctcagagctcatgtcacattcatcctctttcctgtccctcaccggattctctctcaatcaggtaggtgaacaatgaagaatcctgctgtgtgcttttagtgtagactgatcattgtctttctcayactgtttcagtatgtctgttttttctttattttccatgtattagtgtattccagatatttgattttatcccccttgtctctgattggggcatactagtgacttgtacatcatgaattaaaaccctttaacttctcattaatattgaaacccttagggctctctttttgagccaaataaattattcacattttcaacctggatagtttacacagagcaaatttaagggtgagagaaagcaaagaggaaaattaatttgactggaaaattgaaacaaaaagaaataaaagccttcaaaatttctcttcctaagaaaagcttaaggtgtaccaagcatccatgaacaagacattggattttctcaaatctctttccttggggtgagtttataacttcactgtcatgtctttcaggaaagatacccaaataatagtatgttcaatgaggtatatgggaaaaacctgacatccagctccaaagcagaactcagtccctcaatggccccccaggaaacatctctgtattccctttttgaagggactccgtggtctccatcacttcctgccagttcaggtattaactactctttaaattatagaccttacatttcctgtacactcagattgattaagggatagtgagattctgtaattacaaatatatcatttgttgggttatttttattttttgtttgtttgtttttgtaacttctgaaaggaaatagaaaaaaaaaaagaagaagccggtttatgtaataaatgctactgacaaaactttttacatcctcagtagccagcagagatgtaagggagaaaatagaggttctatcttatggttctcagctgctttttagttttatttgtaggtgttcattctttgcagaaaaattgcacttttttttttgagacagtgtcttgtggtgttgcccactctagactcaaactcctgggctcaagcagtccttccatctcagcctcccaagtagctgggactacaggtgcacaccactgtgcccagctctgcactttttaaaattgagatttttaacttagagtctgacttaatagtaattcttaaggttagcaaattctttctgatacataagaccaataaacatgtatctgaaatagccgtgtgagaatagggcattcattcagttgacaaaaattgcctactattttattttgcttttttaaggcgaagaatatgccttagatatgtgtggcagggcaaattagtgcatctagcagatctctttggagcctttagtttccctttccttcaaagccctgtggttattgttagtagaattttagtgatcagatctacaggaacctgtagttctttgtatgtttgtgaaacaatgatttactatatcctgtgttgctattatttaatagatcattcaacaccagccagccagtctcctcattcctctaacccaagcagcctacccagctctcctccaacacacaaccataattctgttccattctccaattttggacccattgggactccagataacagggatagaaggactgcagatcggtggaaaactgwtaagccaggtgagatctacatttcattgccaggcaaaattgaaagaatttactctatccttccctggggtctggcaattggcagtgatagaacatcttcttgaatttttcttatctcttttcatcccttagccatgggtgggtttggcattgattatctctcagcaacgtcatcctctgagagcagttggcatcaggccagcactccgagtggcacctggacaggccatggcccttccatggaggattcctctgctgtcctcatggaaagcctaaaggtgagtagatttcaggaacaagaaccacaagattattacagcaaaggtgtctctgctttcattcacataaatagctagacttctcaggccctcggagttgactgatacatagcacatatataacaaagtcctagaaacatggtctgccttacaagattcttgagtgataatttttaatttctgaattcactagtggtaaagcagtatcttcaggaggacaaaaacaaaggttttagtttcattctaaggttaagaaaattctgattcattttggaatgtttgatttaagccttttctgacaaaataagagtatctaattttagaaatgttttatttgcctgaaaactttatagtaaatgccctgtgtggtaccacatacagctgagtttcagtaaaaagacttgacataaaatgtgatttcacttcttctggtttaaaatagtcttaatggaaactaactagctttaagagtcttataatgactttttctaatagctggatttttatggggagtggggttgggttttggggccatatatatgcctttatatttggctgggattgaaaaatccctttcagacaacttggcatttgacctctgctgacaagatctggactgtttttcagtctatctggtccagttccatgatgcatcctggaccttctgctctggagcagctgttaatgcagcagaagcagaaacagcaacggggacaaggcaccatgaaccctccacactgaggccaaagtggcaacctgggaatgaaggctccataaaccatggcatgttgggtttgcaggactggcccacacagtcccctgcaggtggcagccctcttttctgtttctcgctgtcaagagggtgtaagtattccaccagcccgctgagtgtgcacgaaatgttcgcagtgcaacaaaaagaaaaatccatcaggaactctccgtccccccggggccytccggagggagagagagaggaactgctgtttatctcactcagttacttggtatcaccgcctctcaccttctccatcgtgcatgtccccagccacatgggaagtgaaagctgagaagggaaggcagatgggagaagccaatgggaacttctcagtccttttttcctctttggggaataaaataggaatccattaatgattgctttgctgactgagaatgtagttgaaattattcttaaacatcttttattattattactctcagtagtaaaatatcacactgaattcttccatacacaggtgtgcttctagtcagtgtgtagcaaggaaagccccgttcactgctcctgtgagaggttggtggtgacaggatggggaaccgacctcttcagccagtggaaatgttccataagggagagttcaaggcctgtcagaaggctctggtaggccttcctctggccaggagactccagcagggaatgcccttcactctgtaggtgctcgagccccaatcgaggatacagtgtgggtggtggtgctgggctggactagcaggtagactgctgtaggatttcaaattacgtttttgattcctgtacattttacagtcgcacagcaagcagtctcacagaaggcaggctagtccattcacagcctgacacgttctaataggtagaagctttcagtgtggttattttttytttggttggtttttgtgcccccattctacttcccaccctcctgccccatctcyatcccttcttttacccaatgctgtatgctagtaattgtttttattcctaatgtgtgcaacatcacatctccccaagaagcaacagcatggggtccagcagttggggcccaaaagacagtctgaagaggaaggaagcagcagtatctgcgtagcccacagagggcccaggcccctgcccagctgcagtctcccagcctccactttcagagtgaaattcaaggcagcacggacatgtgcccatcaggcacagaagaaaacacgacgtcgtccattttggaagagacgaaagaaaggaaaataaactctttgtatgatatttattaggaggaaagaggactgaaaatgttcttgtgtagaaacagaaggacagcatttctgttagtcatttcctggaaaagtaatattttaaggggaaattatggaaacaatctaattgttcaattgctgtgctagtggtagggtttattttctgggaggtctctcctttgtgtgtctgtatgtttgtgtacacacacgtgcccatctgctgtcccagaggggaggggttgtgtgtgcgagtgtatggagttagtgtggaacttaagagctggaagacagctgtagagcaaagcacatccaggagccccagttgtcactgcagtctgggcaaccccagcaatgaaaaggggtgagataacgctcattgctcttcagagagagtggttggagccccccccccccsccccgtatgcttacattattgctcttttagtttgacatggtgtttgggttttgtttttttgaaaggtctgaaaaggtgaagccccctacccaatggcaatatgaaaccttttgtgcttctcttcagccccttccctgtgtccacctttctctcctcttcccaagcctttttcctactacctttacccagtttgtgtgtttgagctctgcattcaggcagctgcaacattccagtgtttgaactgtcactgattcttgcgccctagacaagctaaccaggtttaccatctcactcccagtaatacccagctcctatctaaagccccattctgcatgagaatttggtgtttggaatgttttctgactcttggggcgggattcctcgccttatcatcctcactgtggagtaatgagggggaggagaatctttatcagaaactggttttgtgtagtaaactttcttttgtggttttttgttttgttttctgggttttgttttttgtttttgtctgtgcaagacctgcagctgctgaaaatcagctttgcctttaattaaaccatgttctctccaaccagatctgtgtatcgattctttcttttctatcctaaaagatataaaagaagtattgaagaaaatccaacttaaaaggcaagaatttcaactactcacaggtcatccagggaaaggcataaatggtcagaacttgaatatttttcagggttaattttgcttttagtagcattccaaaccaatgatgaattacggaaattataattaattgtaatggaaaggcatgagtagtaagaaatcgattatcaaaattcttttatttaataaaagaatgccttatgttaaggaattaagagcccatcatttttatttttattcctattgtagctgttactgaggcagttcagagagtttatccttttggcctgtaaaaattcactgaatctgattagcagcaacattaattaattcttcttcttagctttggggtttcttttctttgagttgtgtccaaagtttccagtgattggtagcttgctgggtcttccaactgtgtgctggaagccagtggtatagctaaccttaatgcctgtgtgctcaccctgaccggctatcctttcacctgcatgttgattcagtctgcagttcacttccttattctgcttttcacaggcgcctgcacacttgaaaaattgttagcaaagctccacatacgctacaacaagaagtgggtagggagaggaactaaggccaggccttaaggtctaatagtttagttagttacagaatccttcacccaagttaatcctgaaaaattggacaattgggttagccaaatccatagcattctgttatgtatattagtatagcatagtatatgcagtcatttaccatataacaatgttttggtcaacaatggactgcatatacaatgatgctcccataagattataatacatttttgctgaccttctctatgtttgtttacactgatgatacttacttaccattgtggtatagttgcctgcagaattcaacatagtaacatgctgtacaggtttgtagcctaggagtagtaggctatacctggtaacctagctgtgtagtaggctataccatctagtcttgtgtaagtgcactctagatgagtttgcacaacacgtttctcagatcatgtctccattgtgaagcagtgcataactgtattacgaagtgtcagctaacaagatactacttacgaactagcttcatgaacaccgctgcttttcatcacttaaatgttggcgattgatatatattcagtattgagttcttaacacatgttcctctctgagaatgtacaaaggtatgtaattctattaattctctgtggaattgagtgttgtagtccatgagaacctaactcagtctaggttctgtttaagcaacaagacataatgaaaaaagaaaacaaacaagtttatttgtatatgccttatgagtaacctataaggttacttcaagccttaagagccaattacagtaatggttcagaaacaggaatatttgtacttactccttgggcctggacttgggtgtcttgtttttgtaagatgataggtttttttttattgtggtatgacacagaaaagtgcaccaaatgtacagcttgatgaatgtttacagtgtgaacacagctggctagctagcactcagagcaagaaacaggatcagtacctggaagactctctcgtgccctttccagacacttccatccacttttcctctcccctaactcctccattcacctgtccccatctcctcacccactgtgccccaggaaatcatcctgggtactcacatcattgtctagtaggttaaattttaacagggaataaatagttaacacttccaaactgtaatgtctcagtacagtatacagcagaagggtgctaaatcttacaaacaagtaatagggcttcattttcttcagctttgtagtttgtgaaacatcctagacttctctccgagtgctttccaaatctgtagttgcgcagtcttcaacaaaaactttggggaaaatgcccaccttccctttgcactccccttccagccattcttcattcactgataaaaggaaaagtacacatggatttctaaaaccactgtaggaagattaccctgtctggctattccacacagaatttgttatcggtcacccttccccacccctaattgtgatcaacagggaaaagacagtattgcaaagtggtttgagagtgaacacagggtttaaccatcttattgatctgtcttaaacatgataatgagcaaaatgaagaaggataaattatgtttttcaaaaagttaccagatagagaagaagggtcaaagaaattgaacaacgaatccttaaatagaatttctgtcctttccccacccccaaccttgacagggtctcactgtcacccaggctggagtgcagtggcacaatctgggcttactgcaacctctgcctcctgggctcaagtaatcctcccacctcagactcccaagtaactgcaactacaggctgtgccaccacgcttggttaatttttgtatttattagagacaggatctcgccatgttgctcaggctggtctcaaactcctgggctcaagtgatccacccaactcagcctcccaaagtgctgtggtgataggggtgagccaccgtgcctggcccaattttttaagagaggagagaattttacctgcgctttgttgggaatctttgttttgactacagaaaagggacatgccattggttaaatatattaaaaatgaaagttctttagtaaactttcttcttttcactgaactccattaaacaggtgagctggagctagtgatgggttagtacatgtttgttaaatataaatattttaatagctcctactcagagcctttaatagagtgcaggcattgtacttaaaaaatatattcagacttcataataacttgtaggtatccatattttactaaggaaaaggagacccagagagatgaatagtttgttcagagccattctgccagtaaaaatcagacaacttaggtataatctccaaagcccacctacctgaccacacagccagttcagaagtttgtctttgtacatctagatcagacattaaggcactggtgcctggatcctgcccccagaaattttgctttaatgtgtggtgtgactgggcagcagttttttcaaaagttcccttaggtaattctaactgcaaatcactgtcttgattcttcttacagggtaggtcgtggactggaagcatattagaaatgaaaaatcccagatccaaaccagagtcagaatccatttaggaagattcgcaggtgattcacatgcacattaaagtttgagaaacactttgtagatgagaccatctcataacttgaatgcaattgaactcccctctgtcctaccctgaccgctaaattctgttttctgttgaagtgctacaatatgggtatttcctcaacttagacttgtacagataggtcatagtaagacgcatactggcttctctccatatctacccaaaaggttgttttagtgtgttctttcattgtattcctgctccctctcccaaactccagacaattgagctggttggttgatttaggcacctttaaagtggcacttggaggtgttcaacccagttcttcccactgagttaccattctctcttgttggaacactctgcttctatattactactactcatatttttttttttgagacagaatctcactctgttgcccagactggggtgcaaaggtgcaatcttgactcactgcaagctccatgtccctagttcaagtgattctcctgcctcagcctcccaaggagctggaactacaagtgcacgccaccacgcctggctaatttttttatttttagtagagatggggtttcaccatgttggccaggctggtctcaaatcctgaccccaagtgatccactcaccttggcctcccaaagtgctggggttaccagcatgagccaccacgcccagcctatactactcatatttttaattaattgctacacacttgttgtatactctctctacccccattaactttttttttaattttaatttttttgtttttgtttttgttttttttttgagactgagtctcactctgtaacccaggctggagtgcagtggcacaatctcagctcactgcaacctcctcctcctgggttcaagagattgtcctgcctcagcctcctgaatagctgggattacaagcacctaccactatacccggctaatttttgtatttgtagcagagacagagtttcaccatgttggccaggctggtcttgaactcctgacctcaagcagtcagcccacattgacctcccaaggtgctgggattacaggcataatccactgcacccggcctatttttattttttttaagacagagtctcgctctgtcacccaggctggagggcagtggtgcaatctcggctcactgcaacctccactcccgggttcaagcgattctcttgcctcagcctccctagcagctgggactacagatgtgcatcaccacgcccagctaatttttacatttttagtagagatggggtttcaccatgttggccaggttggtcttcaactcctggcctcaagtgatccaccacctcagcctcccaaagtgctgggattacaggtgtgagccaccaggcccagcctaccctcattaactttaaaatttccccctctctttgtctgttggattttctgttataattgatggtagtttttcactgctttgcattggtagtgcacagactcagcgtatgagcagggcttttatgatgggacttttttgtgtcgaggtagagaattaggctggcaaaccacgagttggaatggtgcttcttaagagtgtaggcagtagaccagcatcacctggaaacttggtagaaatgcaagttggtgggccccaccccagacctgaatcagaatctctggagggtgggcccaggaattgatttaacaaactcttccagggattcttagaactctccacttttaagaggtgggtcttgctgtgttgcccaggcaacagccttgaactcctggcctcaagtgatcctcctacctcagcctccctagtggctaggattacaggcatgctgtttcaatttttagtctgttcattacaaacagaatcaagaaagtcaccagagacacaggatagttctgaatagctggtttttaaggcaaaatttacctacttttctctttgaaaagtacattaattcaaagaactatggtttgcagaaggtcatacagcttgatgcaaaggcaaagtgattccagcccaatttgttacctctgggaatgagaatccatggtttccaaagcatactcctctttaataatcaagatgtttatcgccggccaggtgcggtggctcatgcctgtaatctcagtactttaggaggccgaggcagttggatcacttgaggccaggagtttgagaccagcctggtcaacatggcaaaaccccatctctactaaatacacaaaaattagctaggcatggtggtgggcgcctgtaatcctagctactcaggaggctgaggcaggagaattgcttgaacccaggagggggaggttgcagtgagccgagattgtgccactgcactccagcctgggcaacagagggggactctgtctcaaaaacaaaaacaaaaacaaaacaactcagcttcttgttgctttcctggctactagagcaatagacagggaaagtctgagtgctcaactttgctccctccagctagatgctaggaagggggttgaaaacactggctaaagttttgtttgtagattattgatattttcttctctctgcccttgaccttgtttctgctaacatgtaaatttgtttctatagtcttggagtagcacttaccctttgataacaccaggattatatccccttcctgaaactccaggtcctctggttgggtagcctcataactgaagagtgcctccacttggctgcctt

SEQ ID NO: 98132 - DNA, 50894 bp, Homo sapiens
  misc_feature (1)...(50894): n = A,T,C or G
catacatggagatgtcagcttcattttcaatatcatcatcaaggcctgtgtctgccttagcccctttctctaagctgggggatacctgaagactatgttccttgatgaacgagtgcagggatgggaatcccagttgcataggtggggcatgcacaagctagagggaaaaaaaatatcttacttgactccataagtagtccctaggagctttcttagagttaccagttccaagtgcgcacacccatcacacctctagcttctcacctggctagcaatggctgagaacttggccacatgaagagtttcatcataggtagatgcacagggattcacattgacaatcatgcaggaacggcctcggcctgtgaagaaaccttggaacactcgagtcaacttgctgtcacggaagggaaccaggttctgctttgacctggcagagaatcagagataatagagctgtgagcagaacaccagccctttgggtatcctagcaccatccccagtggtgtccaggaagtctcttagcaaattgcagagcccaggaattatagtcaaaagctcaccggttctgctggttttgacgaagggcagcaatacagcggcccagggtgtgtagagaggtgttaatgtttcctgcttccttcaaccgttcaccactcttctgatctttgcagcgctctgagccagccagatcacagagtgacagcctagaatgatgcacaggatctgacataagggcctcacatgttatgagccttctggccctttgtataattctggagaggggacggcccactaagaatctctgtacccaaagaaggagaacacatagttcccctgaggacctcctccatgctttcccaactatcatttatggccaagaagcccaaatttctaaatggataaacttactcgctgatcttggggactatatctccttccccctgaaggtgtaggatcctgattgagaagatgctgtgactggaagttaagaaaaacaaaaagtcattgcacattttccatgaccaggcagaggactaatgtttcctggaacacagtgaagagtttattcttacaatctactcacctgcggctggagttctggttgaggtgggtgctggcaaagctctggttcttacgacccacttttaggagcttccaggcctcctcagcatcttgcacatgaatccagttgagatctggggccaaaggagaggggtgtaagatgggaacatccaactcttttgccagtctctccccagttgccctccagggttcatgccagctttccccatgttcctttacctttcacatagggattgccattttgatcctcgcatagccgcaaagtctgcctcttgcgctgttggctaggcggttctaataggtcataaagcagttcgttgtagatctcaaagaatgagatccagatggagaagcgaatgtttgccgggacaggtagtggggcagtgtctggctgtgcccatcgatgacttgtttctggagaagaagccaatgtatagggcatcaacctagagcagttcacctctcttttggcctgcaggggccttggaaggcagaccttagattgcaacctctggtctgtactcctggcagctattaggaacagggagtgagttcctactattttttggcagagcccagtcacggtacataccatccagctggctactgctggtacactgactgatagaagagagcccagcaatgccactgtcgaagctggtgctggtacctatccgactttcgatgtagacactcctcttcaaggaagtggacagctcctcctggaggggcacagggagaaggtaagcacaaaacttccccgagatttgtaccccctacccccactgccatggataccaatgctttacctcttggaggcctccatttagcagggacagcttcttcatttcctcctgtcggatctgcttgctgtctagccagattacctcattggagagcaagggcttcagatcaggtgttggatgaagttggccttggaggctattgaagatcagcgccagggaccgggggagaatccctccatccttgatggtacctggaggcatatgaaagatggacagctgaggcaagtgcccttctccccctaactcagagtctcaaaaggtaaaaacaacaccattaccagccaatcaggaatcccgtgaaggcttactactcaccttgaatcgtgtgggttttccctgagttagtgactccatatgtatagatgagccagttctgccctttgagtacatcctttaccatctccttcacagttaggttgaagaaggatgcctgtcccacttctggcccaaagatctagagagagacccagttttttagaggcctctccttcatctcccacttgcctcctgtgcagagccagcagatatattccttcctgagtggttggctctggagaccactcaagcagcttcttcctgcaatgctgctggctgttccctaaacactgaggactcaagcactctctgctagtccatctttccaccaaatcaacaaacacttaaggaatgctatgccctaggcctgatgctgcacacacaatggggcaatataatggcccacaagtatgggctttggagatacatggatctagactcaggtcctaactctactagtgactagctacatggcttcagcaatattacattcattgagccacactatccttgtgaggaaaataaggaaataatgataataacaatagaatttttcagaactgatatacatatgttacttgacacattgactaacacataactagggccctcaaaattgtaggtgtgcatatacaaggaactcacagtcaggaagagaagctttccctctaaagagggaataaagttgcccttacatgttggtcttttgttcacaaaccagtaccctccatacctgggaaaaggtgaacctgtgtgtggcttggccaattccccgttcattgctcttcagggcaaaagagtccttgggtgcttgtagaacaagggtctccacattctcaatacggacacaaccctgagaagggagaaaatacagttgtcacagaaggcattcctgggaatcttttgtactgcatcatttcaccttgaatcctcccttctcagacacttacctgatcttcctgtcgttccaactctgaaggtaacaagggcctaaccctcaagtatactttcaccttctccatactgtcctcagatggaacctgtggcagaatcccagcccagaaccacagattaatttcagcagttacctctgagcaaatgggcaaacagtagtttctaggaactatgataacactaccccatttcacctcaaatgtctctgtgcagctactctttggttccacaatcattccaacccacatggacatttttactactttgtcacccttccctgtctcgtcattatcctgcaaatgtggcttgccacaccgatgatctgagttcgaatttattgactggtatgaaaattagtatgtgatattaaagcaaagcagaggcaaacacttgaatttgagtcccaattccatgacttagtaactatgagaccttgaattatgagttcttgaaattcttggcctcagtttcctcatctgcagaatggggttaataatagcacctatgtcattcattcaacagatacttagaggctgggtgcaggggctcacgcctataatcccggcactttgggaggccaaagagggtggatcacctgaggtcaggagttccagaccagtctggccaacacagcaaaaccccatctctactaaaaatacaaaaattagctgggcttggtggtaggtgcctgtaattccagctactcaggaggctgaggcagggagaactgcttgaacccgggaggcggaggttgcagtgagcagagattgtgccactgcacaccagcctgggggacagagcgagactccatctcgaaaacaaaaaaacccaaaaaacaaaaaaaacccagatatttagagtgtctactatggcctaggaactgagaagctctgatagtccatagtgagagacatcatcaaggaccatgctctcatggaactttataagtctctaagagaaactctataagagcacaaaatctgacaatgtatgttaatgtttagcataggacctagtacagtgtttctcaaccagggtcatttccactccaagggccatttagcaatgcctgaagtgcctgaagacattttttgattgtcacaaatgggaaggcactactgacatctagtgggtaaatgccaagaatgctattaaacatcttgaaatgtacaggacagatccctacaagaactgtctagccccaaatgtcaataatgctgtaactgagaaaccctggcctagcaggaaacctacaacaaattgaagctatggtgatactattaaaacctgaacatacattccacttacataatgcctatatgaccttgtgcaaattatttagcacaactgggcctcaaggcaaagagagataactattattccctgaaagattaactaagagcatgcatttgagggtatttcattaatgcaatgcaaattatagttcttctggacacacaactcaattttttttttacttgtcatgcccttaatttttttttctttttttcttttcatagccattttgtcctaaatgcccttaattttgaattgatctcagacctttaggattgctagtctttgacctcatactaccctgtatggacaattattggcctgaggatatcactttccgccccagccactccccagttcctttacctgctgcttgtcctctagggaggtagagacgacagagcagtctgatagcaggttcttgcgtaccacagaccccaaatctgcagctgtggactcaaacatgggagaaactacgacatcgtcatcggacagcaagcccgctggcggagaaaggatcccttgcgacatgacggcaggggcagcctaggtctaaaaagagaccaaaaagtgggcagggagaagaacctttagggacagaaggggccgcgaattttaggtaataagtcccttgccccaggacaccgtgtcccgcttcctacttcttttcccctccaattatcggcaaaggggaagggaatgagagaagttcacttaatgaacaattgagagaagtttgaggcggcatttctgaacgcgaacagaagtccacagacatctggctccaaaagcagaaggctacgcctaaagtagggcacctcgcccgccggtgctgtggaggtggtgtcaggatccctcggctccttctctaacctcaccccaaggaccaccgtgagaacagagatgcagcattaagagaaaaacagatggctgcagctccgatttcttaaagcctattccgcgcgggcaagagctggtaacccgggctccagcacagccgcacactcacccgaagacgtgccacttgctcctcctgggatactggcttactcacacctagtcgccgaagctggactttcgcagccgcagagcacaactccgcccacgaggtgcagctttgttacagatacaatattttaaattacgcgctgcgttcgttcggccaatcagatagggaagcctgcagctaccaatccgcgtaaggaaagggggcgggcctgactggaattccagtcgttcgcttctgcttgacctctgagttctaatgtgggtccgggttaccaactgtcgtggattcgcacttattttgcctgggattcttccaacttaacctttttccttgaaccttagacatttcttacctaagagcctaaaggaaatcttgaggcttcagcagccaactcctgtccttccttagcaacaatcttaacaggagtgcacagggtaactggtttagggtgcttgctttgtcttaaggggaaaaacgacatttcccaggaggcaccgcgaaccaacgccggtacactatttcccagaattccagggtttcggcccttccagaccgtctctcctcagggttggagacttcggggccaagatggcgacgggaacgggcagtgagtatctgagcaggttttgcgtgaaaggcctttgtagatccgaggctaggcaccatatttttgttacacgcttagggagtgggagaagtgggttgcttgagagcccagggttttcagagacctgcgctctacagcatcgtgaagaccaacgtttgggggcccagaaatctggggtcttgtttctcagggagagagcggaggtgtgagagaagcagcttagtgaatcctagtgtgttaggaactctgcgggttaaccgtaaaagcactctagaaacttgggcgtgcagacgaaaagatgttatgagccagacggagtaaccggcacctcaaagagccattcatttttttgtctgacgtttgtgaggcagtggaagtggggtcttttaaccatgagcttttcttgccactcaggaaattgcatctcggggatttcagccatttttctttttttggactgaaaagctcttttacccccgacatttggagtagaggatctgagagaagtaaacaagtttatgctaagagggaggcggggtagtaggaggggctggccgctcgggttcctgggaaataagccctgaataagttyaaactggaataaagtccagtattcttaaaactgggcttttagggagaactgcctaatctgacattccctgtttcttaataaagcggagcttcaagccatggcgttttaagaaataaaatgttaataattcacatgcaacgaataggtaccccggtcactggtgatatttcacttggagaggtgaaaatcaagatttggttatagtagctcactttgtcctaacaagttgggatgttttgtattaggcttttagtcctctttttggggattttggagcttagcactacagtctcagtggttgtttccaaggcttttttttttttctccctttcccagaacacaagctgctaagcactggccccacagagccatggtccatccgagagaagctatgtttagcatcttctgtcatgagaagtggcgatcaaaattggtaaggtatctaggatgtcagcttttctgggtcttagaaattgttagatactctttcacatcggtagatttctatagttaatcatattaagctgtaagtagactttcttttctttttcttctttttttgagactgagtctccttctgttgcccaggctggagtgcagtggtgcggacacgcccagctaatttttgtattttttagtagagacagagtttcgccatgttggccaggctggtctcgaactcctgacctcaggtgatccccccacctcggcctgccagagtgctgggattacaggtgtgagccactgcgcctggccatgcctggctaattttgtatttttagtagagacggggtttcaccatgttggccacgatggtctcaatctcctgacctcatgatctgtccgcctcggcctcccaaagtgctgggattacaggcgtgagccactgccaggcctatttttttttttttttttttgagacaagattgcactctgtggcccaggctggagggcagtggtgtgatcttggctcactgcaacctccatatctcaggctcaaatgatcctccacctcagcctcttgagtagctgggactacaggtgcacaccaccatgcccagctaattttttttatttttttgtagagatgggggtttcatcatgtttcctaggctggtctcgaactcctgcgttcgagcgatccgcccaacctactgggattacaggtgtgagccaccaggccagctgtatttctttttttaaacagctttattgagatataattcacatactataaaattaacctacttaaaatgtacaatataatggtttttagtatattcacagttgtgcaaccatcaccacaatctaattttagaacattttattctaagaaaaaccccttactccttaactgtcagtccatgttgtcccctcctcaccacccccaagcaagcactcatctactttctattaattaattaattaatttgagacagagtctcactgtcacacaggctggagtgtagtagttagatcttggctcactgcaacctccgcctcccaggttcaagygattatcgtgccttagcctcccaagtagctgggattacagccatgcgccacgagtggcctggctaatttttgtatttttagtagagatgaggttttgtccaggctggtcttgaagtaatgcaccagtcctggcctccaaaagtgctgggattacaagtgtgagccaccatacccagccaactctcttgtctctgtagatttgcctattctggatatttcatacaaatggaatgatacgtgctcttctggacttttttttgttttttttaatcacttgacataacactttttaaggttcattcttatgtagcatgtatcaatacttaattccttttttagctgaataataatctgttgtatgaatataccaagttttrtttatccatcacttgatagacaattgggttgtttccactttttggccattatgaataatgctgatgatgtgcacattsgtgtacaaggttgtggacaatgtttttaattctcttgagttttttattcaaggagtgaaattgctgggttatgtagtaactttattatgtttgacttttttttttttttttttttttttttgcagacagggtctcactgtcacccaggctggagtgcagtagtgcgatcgtggttcactgcarcctctgcctcctgggctcaagtgatcctccggcctcagcctcctgagtagccgggactacaggcacatgccatcacccctggctaatttttgtattttttggtagggatggggttttgccatgttgcccaggctgaactttttttttttttttaatttaaatatttatgtttttgtagagacgaggtcccactatgttccccaggctggtctccaactcttggcctcaagtgatcctcccagtttagcatcctgagtagttgggaatacagacccttgccaccatgcttgactaattttttgtgttttttgtcacttgttgcccaggctggtcttgaactcctgggctcaagtgatcctcccaccttagcctcctaaagtgctaggattataggcgtgagccatcactcccagcctagaactatcatcattttacctttctcggtatcagcccctcaccccctttcttttgaatcatccattatgaatttaactctcttgccacatttataaacaattcagtactttgctgattgtcatgcttcctagcattttttttgtttgttttttaaatctaatttttgaagtaatatgtggccaccataaaaacaaaaacactatatagaaagcaatagcaacaaagaaatgggttaaaaacttaagtttaaggccgggcgcagtggctcacgcctgtaatcccagcactttgggaggccgaggtgggcggatcacaaggtcaggagattgagaccatcctggctaacacggtgaaaccccgtctctactaaaaatacaaaaatcaggtgtggcggcgtgcgcctgtagtcccagctactcaggaggctgaggcaggagaatggtgtgaacccaggaggcggggcttgcagtgatttgagatcgtgccactgcactccagcctgggcaacagagcaagacgccatctcaaaaaaaaaaaaaaaaaacttgagtttattttttgtcacacatacaggaagtctaggcagtccacagctctcatagcaacttcacagtgacattagaggctcaggatattctctttctgttccaccttcctcagtgcatagtttatcttctggttatcttatggttcacggtggctgcttgaccttcagctatcacatccttgttccatgcaacaagaaggaagggggttggtaagaaaggtcacatctcttcccttttaacaacttttttgtgatataattgatgtgcagtaaactgcaccttttttttttttttgagatggagtctctgttgcgcaggctggagtgcagtggtgcaatcttggctcactggaacctctgcttcccaggttcaagtgattctcccacctcagcctcccgtgtagctgggactacaggcctttgccaccatgcctggctaatttttgtattttttggtagagatagggttttaccatgttggccaggctggtcttgaactcctgacctcagatgatccacctgcctcggcctcccaaagtgccgggattacaggcatgagctacgacacccggccagtgcacacatttagagcataagacatggtatttttgaaatatatatacatttgtgaaactatccacaattaaggtaattattatagtatccattaacagatgaatgggtaaagaaaaaatatatatgtatacacacacacacacacacacacacacaatggaatactgttgagccataaaaaagaattaaatcctccatttgtgattccatggttgagcctggaggatagtatgtaaagtgaaataagccagacacataaagaaataccatatgatctcagttatatgtggaatctaggaaaaattatagacctcacagaactagagaatagaatggggctgggtgcaatggctcacatctataatcccagaactttgggaggccaaggcaggaggttgcttgagatcatgaattggagaccagtctgggcaatatgacaaaactataaaaaaacacaaaaatactagccaggtctggtggtgtgtgcctatagttccagctactcgggaggctgaggtgtgaggatggcttgagccagggaggcaacataagagaaactgttccctacaaaaaagaaaattagccaggcatgatggtgcatctgtgatttcagctacttgggtggggctgcagtgggaggttgcctaagcctcagaggtggaagcaacagcaagccatgattgtgccactgcactgaagtctgggtgacaaagtgagatactgtctaaacaaaaacaatgtgtgttttgtatgtgtgtgtgtgtgtgtgtatacacatcacatatatttgtatatgtatataaattgagctcatttttaaacaaaacaggtaaactggtttgaaatagaatctaatctgtatatttcctcacatttttattagataaatagtgttaagaatcttttttttttttgagatggagtctcactgtgtcacccaggttggaatgcagtggcacgatctcggctcactgcaacctccacctcctggatttaagtgattgtcctggctcagcctcccgagtagctgggattaaaggtgcacgccaccatgcctggctaatttttgtatttttagtagaggtggggtttcaccacattggccaggctggtctcaaactcctcatctcaagcagtctgccctcctcgacctcccgaagtgttgggattacaggcgtgagtcaccacgcccagccatagaaaaatagtataagaatacttgagtaaaagttttaaattttattattttatcagcagatactaagtcataagattcaaaattatatgcagtgtcttcctcccgttactatcccccgtctactagtgttagcagtttcttgtgtctctccagcaaaattttatgtgagcaaatattttctttttccccttcatccccctcattttctaacacaaatgattatatactatatatgctgttcttttttttttgaatggcggagggggtggtcttactctgtcacccaggctggagtgcagtggcgcgatttgggctcactgcagcctcttgacttcctgggctcaagggatcctcctacctcagctgcccaagtagctgggaccacaggccgcaggtacgcaccaccataccttgtcgatttttttttttttttttttttttttttttgtagggatgggatctcctcgggtggcttgaactcctgggcttgagctgtcctcccacctctgcctcccagagtgctgggattacaggcacggtccattgcacacctcgcattcattggctttttttttttttttttttttttttgagatggagtctcactctgtccccaggctggagtgcggtggtgagatctcggctcactgtgacctccgcctcctgtgttcaagagattctcctgcctcagcctcccgagtagctgggactacaggtgcatgccaccatgcccaactaatttttgtatttttagtagagacggggtttcaccatgttggccaggttggtattgatctcctgaccttgtgatccacccgtcttrgcctcccaaagtgctgggattacaggcgtgagccaccgcgcctggccattcgcatcttttttattccaaagtttgaactccaagccttgcactctcagcatacctctcctaytgttttctgcttggtgtgtaataaagctttcctcattttgtagggtatcagttagcagagcaatcaagccctttgcagaacctggccgccctccagactggttctctcaaaaagtaagttcccaagcaagggctcttttagagcagtctttgggttgtaaagtaggttctctaccaggccctgacttttagttacaaagcttttataccatgatgtgggaaaatagttgagaatacctttttctttttcctactgtttgctaatccatccatgtatgatcatattagacctttcttattggtgttgcataacagttaagagcccaagcttgggaattagatctgggttcattattactccatctaaaaactttgggccatgatcctctgttttttcatttgtaaaatagagataaaagagttgcttcaggattgttgtgaagctaattgaagtaatacatgtaaaacatttaacacagtgccttgcatgtagtaactacttggtagatattagctataaatattggcagttaggttgcctttccgcaaatgcacaaactccagtccataagactgtctttttctgtgtcttgttttgattattttgaactgatttgattataaagttacttgccctcctagtaaaccactcccgtcttacatatagttctcttctctaaatcttactctaatctcttgaaactttgaaaggtcatttctttccagccttgctcatcacattttcactttttttttttttttaatagcattgtgcttcccagtactcggagcttttagagaccactgagacaccaaagtgagtacaaagccaggtacttcagccatatttctttagtggagagtatttactgaggaattctggtttatacttagttatgatactggatgattaaaaaatagcagaagttatctatgattaagtggtaaaagcaagtaggagaggggataaatgttatgttatttgaatatgaatttttttttttcaattttccacagacggaaacgaggtgaaaagggagaagtggtggaaactgttgaagatgttattgttcggaaattgactgctgagcgagttgaagaactaaagaaagtgataaaggaaacccaggagagatataggtacttatcagagagaatgccaaaaaattgagaaagacataagggactgtcttctggtactggtcagaacttttaaaatagcagattaaaaaacccagtctacctacctctctttcttcctatagacggctaaagagagatgcagaactaattcaagctggacacatggacagcagactggatgagctttgcaatgacattgcaacgtgggttatattatattgttcttctgtgcttctttctttttaccctcttttcccctcaagtaatctggcttatttcctccaattgccgtccctttagacttgagacagattctggaaggggaaagctgcaaagtggtttggtggctgggaggggggagtgagtcctagaaggtaatataatgggacatttcagtatgaaaacataacttagttctaacttaagagtggctatagtttgcctgggtgaagaactgggagttaggcagtataccccaattcactgttttgctggttagaattcctgtttaggcctttcttccagaaagtgctggcctggcaaaaaaaattactttgtaagggttctgtgaactctggggaggagccagagytgtctagcatctaacccttaattccctgtttaggaaaaagaaattggaagaagaggaggctgaagtaaagaggaaggctacagatgctgcataccagggtaagctgaacctagtatgcctctttagcaattgattgcacagtactgcatgctaatgacagttggactgttttgtaacatagaatacattgatttaaatttacttgcagttttctcttctaccagaataaaaacatcccttaatgtcttaagaagaaactcctagaacatgcgttgtgctcagatctcactagaccttaaattaacttcaggacacaaaggcttgatgagatattgaacataatgttttagaagtcaagggcctgtgaaaagattgagaatagctcagtcattagatgaggagaaatttaagcatttacaactctaggaatacatgctgtgcgccagtgaggtctttccctgtttttgttttttgtttttcccccaggcggagttttgctcttgctgcacaggctggagtgcagtggcgcgatcttgggtcactgcaacctccgcctcgcgggttcaagtgattctcctgcctcagcctcccgagtagctggcattacaggcggctgccaccacacctagctaatttttgtatttttagtagagatggggtttcgcaggctggtctcaaactcctgacctcaggtgatccacctgccttggcctcccaaagtgctgggattacagccgtgagccactgcacctggccttcctgttcttaaaagcagaatattagtaagttgctaaagagaatattaaaggatgtttaaactactttcccactccaaggacctttgggataattaagtagtttgagattgttaaaggagtttcttagtgtgagaattgcccttaggaaaaattaggctaaaaagttatccatctctagaagtgttaaagctttctaatccaaacttattatgctgctttagtaatgcaacatacctatttgtcctttattgtataatagcagactartgtcaagtttcatttatttaatcttgaagatttggacattgttctcttttatgttctagctcgtcaagcagtaaaaacacccccccggaggttacccactgtgatggttcgctctcctatagattctgcctccccaggaggtgattatccacttggggacttgactccaaccactatggaagaggctacctctggggtgagtatatttcyatctgtgggaattgatcagtgaaggggcaataagccggcagagctgagcgatgaggaaaccacttttggcctagaggcaacttcctctcttgatctgaatgctaaagacttaatttaccatgttctgtgctctgagataagaacggacctaaaagcattgaggcttttgacctttttgagagataggtaaaaaactattttaagaaattgtttcatactagtcttatgaaattcctgctgaaataagggacaaaatccttgtaaatgtaatattggtagtgggtaaggagttcataaaaggcaggttgggtgggatggttgagtcactgtgggtttgagtggatgaaagagaagattgtggggaagaaaagtatggctaagagcaggagggatagagggtttctgggcaattccactcaggactaataaaataatagttagacacactaacccatacagattagtagggaaccttccatagtttgagaagtcagataaaggttctctgttgtctcttaggtaacccccgggactttgccgagtaccccagtcacctcgtttcctgggattcctgacacccttcctccaggctctgcacccttagaagcccccatgaccccagtaacagatgattcaccccagaaaaagatgcttggacagaaagcaactccacccccctcccctctgctgtcagagctcttgaagaagggcagcctcctgcctactagccccagactggtatggagacttctgtgggtgtttgagagctgtggtgatttagtacttggaagggagtgcctgggacctaaaatgtgacatggggaataaaagttcaaaagaggaaaagatctcctaattaaatgttaattttttaaaaatacagtaagttgatagtacccatgggtcctgaggtatctgaatcacaattattttggttctcttctccagagaactcttgtcaaataagttttgaacattatagtttagagtttcccttgggtcttaaattattctctgtggatattagctattagttttcatgaagtttgatcaactgctggagctttgttgggaaatggtagtgaaggaaagcttgagtgtagccttcacctctattcttccctggtaggtcaatgagagtgaaatggctgtggcttctggccacctgaacagtacaggtgtcctcctggaggtaggcggggtccttcccatgatacatggtggggagatacagcaaacacccaatactgttgcagcctcccctgctgcatcaggtaagttaccacttttcctttatcaacctcaaaggtgttgaacttgacattgactgacctcagtttcactgttactaagcagttgtcagtgctagatttaaagcccaactttttctaacttttttttggagctactttacctggtaaacaatgtagtctccatattataaagccatctatcttcaagatagtgatagccctgattgaccacagcatggatattgagagtaatattgaactgctttcttagggcttgcaaaatcaaggtgctagagatacctaagattatagaatagtggaataagatttggaaccagagaattgggcttgaatctcaggcctgccacacattggttttgtgaccttggataggtaacttagcttttgagcctcagtttccttttttattgtaacatatatacttcacaaggatgtgatgagaatttaatgaggtagaaagtataaagcagggaaataaaaaaagctccatagaataccatacaaaccttattggtatttgaatggtgttgaacttgggtggtttacaatatgctgaacttcagcagaagcgacagatttattcataccagtttttcgtttcttggtgattaattttcctctgaggaaaaattaccaccctttgttgttgttgttgttgttttttttgagacagagccttgctctgtcgcccaagctggagtgtggtggcacaatcttggctcactgcaatctccacctcctgcgttcaagcagttytcctgcctcagcctcctgaatagctgggattacagcacccaccaccacgcctagctaatttttttttttttttttttttttttttttttgtatttttagtagaggcagggtttcgctatgttgcccaggctggtctcaaactcttgacctcaagtgacccacctgcctcggcctcccaaagtgctagcattacaggcgtgagccactgcacctagccttaccacccattttttatatatgttgtgtgttctagtgctttggttcattcctaacttggaggaagatcttaagtaaggttagagtaaggatatagatgatgaacttattcaatgcaggagttgctctcatcctttgagaccataagaattttcttagttgagtcttcaagtagctattgcttcttatttatgtgctttcttcttacttcattttgtgtacctctttatatgttaggtgctcccactctttcccggcttttagaagctggtcctacacagttcaccacacctcttgcttccttcactactgttgccagtgagcctccagttaaacttgtgccaccccctgtagagtctgtgtcccaagctaccattgtcatgatgcctgcgctgccagcaccatcctctgctccggctgtctccactactgaaagtgtagctccaggtgcgtccctgagcagccactagwtctaaaatttcattttgagctttagttagagaaaaatgaccaagagcatcagctccgattcagatgcttcttctctgttctacatagacatgtgccatctttatccttagaaataaatatccttagaaatagatgtgagaagaggtgggtgggcatttatgtattgcaggaagaggctaagtatacagatatgagcaggcttgaaaatatgttctcacctttctagataaaactggggagaagaaaacataggcacatgttgatgactctttctgaccttaagtgtttggatatttgacatctgtctgtagcgcttatgtgatctcaaggtggtcgctttgtacccaataagcttctgagatgcttttctctttctgttactcagtgagtcaacccgacaactgtgttcccatggaggctgtgggggatccacatactgtgactgtttccatggacagcagtgaaatatccatgatcatcaattctatcaaagaagagtgttttcgatcaggggtagcagaggctcctgttggatcaaaggctcccagcatagatgggaaggaagaattagatctggctgagaagatggatattgctgtgtcttacacaggtgaagagctggattttgagactgttggagacatcattgccatcattgaggacaaggtaactattcagcraagccccagagaatctcatgggtcctacataggcttctcttttcarcctcactttggtgctgctgctgcttttttttttttttttttggagacagagtcttgctctktcatccaggctgaagtgcagtggcacgatcttggcttactgttacctctgcctcccagcctcaagtaattcttgtgcctcagcstcctgagtagctgggactacaggcacatgccaccacgcctcactaattttttgtatttttagtagagatgagttttaccatgttggccaggctggtctcaaactcctggcctcaagtgrtccacccacctcggcctcccaaagtgctgagattacaggcatgagccaccatactcggctgctttgcttcttacagtaagaattacttaaacaactctcctacttctgcccatctccatctttgtagccctttggtgctaacatactagtcatctcctcaggtctacccatgttactggtttgcacaggrcaggtgcctcttcattgtttgcctccactacatggaaaaaatggagcgaaaagctgcagattcaagccatcacatttggtgctaacaaaaattgaaggacttgggcttctttctgtgacctcaatagtcttgtgttttgtgggacaggtagatgatcatcctgaagtgctggatgtggcagcagtggaagcagcactgtcattttgtgaagaaaatgatgatcctcagtccctgcctggcccctgggagcatcctatccagcaggagcgggacaagccagtacctctccctgcaccagaaatgacggtcaagcaagagagactggactttgaggaaanggaaaacaagggaatacatgaactggtggacatcagggagcccagtgcagagatcaaggtggaacctgcagaaccagagccagtcatttcaggagccgaaatagtagctggagttgttccagccacaagtatggagccaccagaactcaggagtcaggacttagatgaggaactgggaagtactgcagctggagagattgttgaagcagatgttgccattgggaaaggcgatgagactccacttacaaatgtgaagacagaggtacttaagaaagatyggggctggggagatggaggtttataccttagataagaagtgacagcttaggctttttggttttccagttgcattcctgagttctgacatgtttgatgtgtccaaagccyataggctgtgattagtgttatatatacttattcctgttaaggtgaccattggagtcacattacatgagtaggacttagaatttcttctatggtctcattatcactgaagaataaagttgtgtgagctatagcgatttatcagtacttagggtgttttttcttttctggttttcaggcatcccctgaaagcatgttgtctccatcacatggctcaaatcccattgaagatcctttagaggcagagactcagcacaagtttgaaatgtcaggtaaataaagtcctctttcactgacttgaaatcatttgctttggcttctgaggggttgtgggttgtgggcaagtagaggaggtagaacaggtcagcatgtaaaggagagctgcaggggattatggtccataggaaggggaaggctaaggtggaaaaatcttcaggtagtctttctctcctctgcagactcattgaaagaagaatcagggactatttttggaagccagataaaggtatttcagacttttctttattcctcttgccatgtgattagatttccctatagcactactttttaatgaatttcagtaaagtcacatctttattctctgataagagactggtatggagttgcatggggaaaagctgcagtagacaggcataatgggagtactatagcaacaggtgcctcccatatgaaacagcatgtgaatatcacacagtccttaagaaggcttgatacacttagagtgatttgtagtgaataaggatacctgagccaaggagaacatacaggaatcaagtttattaattagactatccaaagagaatcatccagagttttctttttagaattattaaagcagcagtaacagaggcttaaagaatgtgatgtgagcttgctccatcaaatgagacacaaaataaaaattatttttgataactttgtacccagggtcagagttactctcgagcaaggggaaagaaggaacgcctcttagcttagtcttaagtaagtagcttttttttttctttctttttaaaagatcctgggtattattctttgtccaggttctaaattacttaacgcagtgtctgtaagtagatggtagtataagtgatagacagctgagtcaggaaacagcgtgaggtcatttctagaactaattctaacccaaaagacagatcatgtttaatgatgctttgctggatagctttgcttgcatttgttaactggagcatactgtatctaaggatgccccaggtgaggatgaggaggaagatggtgtcagtgaagcggccagcctagaggagcctaaggaagaggatcaaggagaaggctacttgtcagaaatggataatgaacctcctgtgagcgagagtgatgatggcttcagcatacacaatgctacactgcagtcacacacactggcagactccatccccagcagccctgcttcttcacagttgtgagtatctgagattctttctttgaggccaaggcagtgaaggtgaggagaggatcttttccttccttccttccttccgtctttcttcctgtcttttctcttttcttttcttttccctttcctttcctttcctttccttctcttttttcttgttctcactcacccatgctggagggcagtggtgcgatctcagctcactgcaacctccacttctcaggcccaagcaatccttccacctcagcctccttagtagctgggactaccagcctgtgccaccacaccctgctaattaaaaaaaatttttttagtagaaaccaagttttgctacattgcccaggctggtctcaaactcctgarctcaagcgttccacctgcctcggcctcccaaagtgctgagattacaggcgtgagacaccatgcctggcctttttctttatttttaaatttttattttaaaaaaatttttttaagggacaggatctatgtggtccagtctggtcttgaactcctgacctcaagcagtcttcttgccttgacctcccaaagcagtagaattagaggcatgagccaccatgcctggcctgatcttttctttagtgtttcccttttttgacctggaataaacagctgacaagaaataattagggctgggcatagtggctcacacctgtaatcccagcactttgggaggctaaggcaggaggatcgctggaacccaggagtttgagaccagcctgggcaacacagtgagaccctatctctacaaaaaaattaaaaaattagctgggcatggtggtatgcacctatagtcccagctacttgggaggctgaggtgagaggattgagtctgggaggttgagggtgcaatgaacatgatcatgccactgcactccagcctgggggacagagtgagaccctgtctcaaaaagaaaagagaattataatttttattttttaacttgtgcctagtggaattgctgtatctctgtttcagctctgtctgtagtgaggatcaggaagctattcaggcacagaaaatttggaagaaagccatcatgcttgtatggagagctgcagctaatcataggtgagtgggctttaccagtcagtaggttcattttctcctactcttcattgttggtgactggaaaaaagtctgagtaggcttctgtggaactgctggtattagttcttactacctttagttacttagagtaagttccctccctgcacttctggagaatgtcagtaattgcaccttattccttttggacaggtatgccaatgtcttcctgcagcctgttacagatgacatagcacctggctaccacagcattgtgcagaggtgagccatggtccacccagcatggtaacttgcctgaattataaattgtccagtcttagtgaagttttgctttcgatagaaagtttaaagcaagtaagtttatggttttgctataaggggcactgagtgctaaactgataattccagtggctagatcaccactgatagtctaaaagaataaatctccaccaggagcggtggctcacgcctgtaatctttgggggtgctgaggtgggtgaatcacttgagcccaggaattcaagactagcctgggcaacatggcgaaaccccctctctacagaaaatacaagacttagccaggtgtggtgtcgcgcatttgtagtcccaactacctgggaggctgaggtgggaaggattgcttgagcctggaagttcgaggctgcagtgaaccaaggattgcttgagcctggaagttcgaggctgcagtgaaccatgattgtgccactgcactacagcctgagtgacagatccaggccctgtctccaaaaaaaacctaaataaactccctttattacctttctcaatgcttattatatagattgtttcttgggttaagtgcatgttttgggataaggggttagcatttaagtcctggcagctgggagttaaggtatatatgagaaagtctatatgataatgtattcatagatctaggtgcgtcctctttccatccccactgctacttacccctgttctttttttttaggcctatggatttgtcaactattaagaaaaacatagaaaatggactgatccgaagcacagctgaatttcagcgtgacattatgctgatgtttcagaatgctgtaatgtacaatagctcagaccatgatgtctatcacatggcagtggagatgcagcgagatgtcttggaacagatccaggtactttgaggatcctttgtgtttcagcaaggatgaaattaaaatacttcaaggggaggattcatattgatgccaagaagggttgctgtggcttttacgtggatagctgtcagggacacaattgaaaacataatattttgttcttacttttattttctttggtgtggtgaaagagttgtgatacaatattctacctttcttgggcaattatttgcagtttcataaagtttttaaataaaattttttaaaaatggtgaatgtatattttttaattacattaagtacctggtacatagtaggtgatcagcaaataagagtttctcctttccttttccctgcttttatcctatgattgtgttaccaggtactttttggggtgttgaacttggaagaatattgcaaatctttgcacgatttgtcaaattacttaaattgctgaatgatctttggttcattctagttttattatttttctcattcctggaggatagagattttgatcctatgttatagcaaaaaaaagttagggctgcttgattctttagcatccctattgcaactagaattaaaacttaatatgctaaacttccaatcagtcaaaatatatttgarccagaagagtactatacaaagttctatttacagtgcttaaagtgtacttaatttgtccctactaaatcaggtctccatggcctaccctrtttcttctccctacagcaattcttggccacgcagttgattatgcaaacatccgagtctgggatcagtgctaaaagtcttcgagggagagattctacccgcaaacaggatgcttcagagaaggtgaggcgatcaggaaggaacctgtgtgccagtgttccagtagtagaagtctgaagcatccaaggacccttatgttactacttggtattgggcttctagattccaatgatatacagacacatagatcttagaatgatggtggtttgcacccatctaaacgttgaataagcctattgtaaccgaaaggcccagtcacatgggagaaatcrtgagtaggggaattattaattcctctgggagagtgctctcaaggcgggggaaatggcttagcctgcagcagttggggaccatcagtttctgtgctagaggcgtaatggacagattgcttttggatctctttcctcttgttcttgagttttaaaattttgtccttgtgtgtgtggtgcttgtgtctctgtcctgaggtttggggtgcttgtggctgagagtttctgtggaacctgatcagtgtttgtttgtcctctaacaggacagtgtcccaatgggctctcctgccttccttctctctctctttgtaagtattgaatggctgcaaggggtggtgttgccacaaagattctcagctcttaatgggggtgggtggcagagggaaatccaacatgcagactgtggcagtgtcttgaacttctgtttattcaggtcattgaataagaaactcttttcttctgcattcctgtctttctgcatgtgtgtgtgtgtgtgggctgggtagggactgtttttgagatcactgggctgaaatgtattctaggggtgaaggatctaggatgtacctgctcgtcatttcctgacttcaccttttaccaattcttttcttaacaaatttaaaattggtcagagcaggagctgctagctggctttttaacagtgtttctcataatggcagtactcagcaaatagtttttctcttgtctcctaaaattaagttgcaagactaatgtaacaaacagtaaaatttaagctaaagaactcagtataggctgggtgtggtggtttacgtctataattccaacactttgggaggctgaggtggaaggattgcttgagcccaggagtttgagaccagcctgggcaacgtagggagaccctgtctctacaaaatttaaaaacggcaacaacaacaaaaaaccctactagctgtgcagcggagtggtgcgcacctgtggtccctaactacaagctactcagaaggcaaggtaggagcatcactggggcccaggaggtcaaggctgcactgttcataccattgcactccagcctgggtgacagagcgagaccttgtctcaaaagaaaaaaaaaaacaatctcagtaataatgaccactgtggctgggtgtggtggctcacacctgtagtcccagcactttgggaggctgaggtgggcagatcacctgaggtcgggagttcgagaccagcctgaccaacatgtaaaaaccccgtctctactaaaaaaaaaaaaaaaaattagccgggtgtggtggcatacgcctgtaatcccagctactcgggaggctaaggcaggagaatcgcttgaacccaggaggcggaggttgccgtgagctgagattgcaccattgcactccagcctgggcaacaagagtgaaactctgtctcaaacaaaaaaaagaaaaaaaaaagtgaccactgcatcaatagtggctgctggaattacagataagcttaggagagctagcctaaagacttttattactttcctccataaattaactggctctgactctgtgttgttcattatgggacagtgaggtatgatgtaatggaagggcatcaggctagaaaactacatggtcttaaggtcattggataatctcttggggcattgttttccttggtgtgtgatraagctaatataatgaggtacttgtccagcctacctcacagggatgttgtgaggataaaatgagataatagatatgaaactggcttggaaaaaaaagaaaagcattatacacatgcaaggttaccacctttttattttcactgttgcctcatgggcaacttatgttcatggactctaaaaattttagagtccttgcatattagaaatgtaaaaatggcctggcccagcaaaggtttcagtaattcatcttgcctacaggctgtaccacagacagaacattataatctccgttctttcttattggcctacaacagtgactctggatcccccaagcaaagcatttggctggctattgcaaggctggttaatrggatcttttatctattgaagacagcaaaatattgcacaagaggaaggagctgggctgcagggagagagcagcagatggaaagaagccttctaattgtcctgatctcatggaaaaccactgtcaggaggtgctagggaactagtgccagggtcagtctgcaggaaaggcctttcttatagggaccaacagttggacaggtatgttagtcaagaacctcactacccattgcccattctgactctcctacctttcttttactctcctgctcctttgcacatgatttgggcctgggtgggatgactaatagttattctgtgggaccctaggtgaattccaaggacctctgtagtgggcatgagcaagatattccatcctacatttcctctyacaaactaccaggtgttctttagccactctgtgggaagacagaaatatgcccctcatccctctggatttttctgctgattctcttccctctcccccaagaaaccaaatccccaacttttctgttgcaccgtctcttgtctcctgaccaactcatgctccctttctttctctgcctgtcatctaggatggaggaaccaggggacgccgctgtgccattgaagcagatatgaagatgaaaaagtgaagcctcagagttaccctctttgagccgaacctaaaataaaagtaaacaagatagagcttgggcttgcgggcccagttccagaggtggaagttacagaagaggaggtacctgggccacacgacatgagctggaaaatctctcttagagagttggagtagcacaattgcctgttttagggcagaaaccatgggctatgttaatgtcctaatgtgtagctagcagatcgtagctagtttgtattgtcttgtcaattgtacagactttttaaaaaaaacaaccaccagtgaaatgtgtgtgtatacaataaactgaaaaaaaaaactagcctttggcttgttckgtgtgtgtgtgtgtgtgtgtgtgtgtgtgtgtgtgtgtgtgtgtatttgaaacttgtttcttctgcataactatttcatttgtaggaatgagattgttacaggggaaaagtcttatgaactgcttgctgtagtgtgagaaggtaagcaaccagaattgagtttatagttaatataccttaaggtgttgcattgcgcaggaaagacttccttactcagattttcttgaatgtttgggaaaagtaaggtttttagaattctgttcatggcattgcttaaagaagattagagcatggacataggtagcattgacccttacctcaggaacatttgtctcacttaatgctatctttgcagatggtatttctaggatagtgtgttaccatttttttcctgtttttatggttaaagactctgtataaagagttcttggcggccgggcgtggtggctcatgcctgtaatcccagcactttgggaagccaaggctggcagatcacgaggtcaggagttcgagaccagcctggccaatatggtgaaactctgtctctacaaaaaatacaaaaattagctgggcgtggtggcgcatgtctgtagtcccagctatttgagaggctgaggcagaagaagcacttgaacccgggaggcggaggttgcagtgagctgagatcgcgtcactgcactccagcctgggcaacagagcaagattccatctcaaaaaaaaaaaaatagcccaacactttgggaggctgaggtgggagggttgcttgagcctaggagtttgagaccagcctggacaacaaagtgagaccctttctcaaaaaaaaaaaaattagcccagcatggtggtgtgcacctgtagtcccagctactcgggaagctgtggctggaggatctcttgagccacggaattcaaagttggcaatgacctataattgcatcactgcactccagcctgggtgaaagagcaagaccctttctcaaataaatatagttcttaacattgctgtttgaaggctaagcccagttttaagaattactgaatttggccagacacggtggctcacacttgtaatcccagcactttgcgaggccaagacaggaagatcacttgagcccaggagatcaagaccagtctaggcaacatagcaagaccttgtctctacaaataataaattagccaggtgtggtggcacgcacctgtggtcccagctacattggaggctgaggtgggaggatcacaaccctggccggttgaggctgcagtgagctgagatcatgccactgcactccagcctgggcaacagagaaaaaacacccctaaatttaaaatctcagttcaattccaacttctgttaataacttttttttttttaagtgatgagtgactgctcctggccaactaaactttttttttttttttaaattcggagtttcactctcgttgcccaggctggagtgcaatggcgcaatctcggctcactgcaacctccgcctcccaggtgcaagcgattctcctgccttagcctcccgagtagctgggatcacaggcatgcaccaccaagcccggctaattttgtggtttcttyagtagaggtggggtttctccatgttggtcaggctggtctcaaactcctgacctcaggtgatccacccgcttcggcctcccaaagtgctaggattacagacataagccaccacgccctgccaacatttttaaaaatagtgaaatgaaatagtgccgggcaccgtggctcacacctgtaatcccagcactttgggaggccaaggtgggcggatcacttgaggtcagtagttcaagaccatcctggccaacatggtgaaacctcatctctactaaaaatacaaaaaattggccaggcatggtggtgggcgcctgtaatcccagttacgcgggaggctgaggcaggagaagtgcttgagcctgggaggcagaggttgcagtgatccgagatcaagccactgcactccaacctggcgacagagcaagactccatctcaaaaaaaaaaaaaaaaaagttatgaactttttattataaacatggctatgatgaaaaaatattagatgaatatcactttataactaaatatttagacaatatgtcacactggagcctggtctaatagtcaaagtcttcttgagaagggtttaagaggatacgattagaagtcacagatctttttgcctttaatagaactatattaggatgctaaggaagagaagatacagtctttgtgaggcaatggaaaggtattcaattagtccaggagttagaacatgaaattccttgttacatggacatgttgcaaacaagaaaggaaaataaaaaataacattgtagtcccaaagcagtctgcaaacaggcatgagatacaaacacaagctctaaaagctgggagaagtgtgtggaaaaggtccattaaaggacatacgttttgagttggtagagaaggtgataaatgagactagcaaaccgaatggaaggtgtaggcatctggtgggggtggtgggtggcaatacggagaaaaatgtaattagaacagggattatactaaggaataaggaggtgtacatgtgagtgaagggaacaaaataaggctaaatttgtggaggactttggcagattgagaaatttatatttgaggtgatagctgttataaagccttgagtagaataactatatttgttgagagcagataggattaaagatagaaaagctgactaggagactatggcatttattcaggaaaggatggacactgagaaaacttattgtgggagaaaactgggaagaggacttgcttactgaatataagagaaggaagggtcaaaacagaattgtgggttctgtagactaagaaaatggtgatggggtcgggtgtggtggctcacgcctgtaatcccagcactttgggaggcaaaggtgggtggatcccctgaggtcagaagttcaagaccagcctagtcaacatggtgaaaccccgtctctataaatatacaaaaattagccgggcatggtggtgggcacctgtaatctcagctactcaggaggctgaggcaggagaattgcttgaacccaggaagcagaggttgcagtgagccgagattgggccattgtgctccagcctgggcaacaagagtgaaagttcgttcaaaaaaaaaaaaaaaraaaagaaaagaaaagaaaatggtgatggggataaggaaattgggaagaagcagtgattttggagataaaggaaatgtgatttttattttagaaatgttacagcaggtggtagagcatctaaagggaattgacttttggatgcatggagaaatgacaccagaattcatataagaagtaaaggtagagagatttgggagccacctgaatagaggtcaaagttgaaacctcaaagtatatatacatttttttaaaatacattaataagaaagcagaggaccaagcatgaacatagaaggtagggatttattgaaagttgtaaaagggagaggacaaagaaagatataaaaaaamcaagatagtggtgtaatgagagcaagggaagatatattttaagcttaatgtttctcaacatcaatttggatatgaccagaaggatgccaaaggcaatcctaaagtgtgttttgaaggtttaatggttcataggttaaaaatgtttatacactgaggaaaatatcccctgccccctcaatttgtttgccttacggtttagttatggatgatttgggctagaggaaaataattgagctagctatgctccagttctttcccttcttttggtgtgaatatgaggaattccaagtaaaaataattattaggtaatattaatgtctctattatactgtattgtatggtgcaatatctctgttatactgacatggggctttctttattcccaaagacaaatataatttcatctcatgtctcccttcagcaagattttaattcttcctaatgatgaatacttgaatacaaataaatttctggccccttatttttctactgaactcgggagatggagatgcctcaggaatatttatttgaatgaatttaatgcatgttttcctgtgtatttacagatgggacacgagtgggtttggctggattctgaacaagatcatcccaatgactctgagttgagcaatgactgcaggtccctcttcagctcatgggactccagtctggatcttgatgtgggcaactggagggaaactgaggatccagaggctgaggaactagaggaaagcagcccggagagagaacctagtgaactgcttgttggggatggaggcagtgaggaatctcaggaagcggcaaggaaagccagccaccagaacctcctccactttctctctgaggtaacagtgagctcttatttccaaagctggaaaagcctcaactttctaagagaatgcttatccttacatgcttctaccactcttaatattgtttactaaaatataagctccacagtggcagggattaagttcattgctatgtcctcagcacttggtgctgatacagaatatgcaccaaatacatgctttttgggccgggtgcagtggctcacgcctgtaatcccagcactttgggaggctgaggccagtggatcacttgaggttgggagttcgagaccagcctggccaacatggtgaaaccccatctctactaaaaatacaaaaatggcygggcgcagtggctcatgcctgtaatcccagcactttaggaggccgaggcgggcggatcacttgaggtcaggagttcaagaccagcctggccaacatggtgaaaccccatctctactaaaaatacaaaaaattagccgggcgtggtggcgggcgcctgtaatcccagctgctcgggaggctgaggcaggagaatcacttgaacctgagaggcggaggttgcagtgagctgagatcacaccattgcactccagcctgggcgacagagcgaaactctgtctctaaataaataaattaattaaaattaaaattaaaattaaaaaattagccgggcttggtggcatgtgcctgtaatcccagctacctgggaggctgaggcaggagaatcgcttgaacccgggaggcggaagttgcagtgagctgagatcgtgccattggactccagcctaggtaacagagcgagactccgtctcaaaagtaaaaaaattaaaaataaaaaaatacatgctttttgactgaatttctaatacttcagtcattaggggcctgggtcataaggactgctttatgagtatccttgtaattcatgcttttggagttgtgggaagttatacttgcccaaattttccttgaagcttaaaatgctgtaactttaaggtagtatttttaagtgtcattaccttggttaagggctgaggaccagaaataaacagaattggacagagagttatatgtatgctgttattgaacacatttagaagaccctagatcaagatcagcaagcatccatttcaaatgttgccacttctctctacaagtgtctgtggtagacaaaattttcaacactttattctagacagccactcccaattgatcagagttgacagctgagatgaaaaagtagaacataaactcctggaagaggcaagaaccatatctttcttgttcactgtagtgtccccaccaaccagcccagtgcctgtgtatataagatattttggcagattttagatgattgtattaattaaaccattttgtcctctcagacttagtcactgtgacagtgttagcatgtggcattgttgatatgtggatgatgattttcagtggtgttcctgtgcatctaataataaactttgattgcaggtagcttatttaatggagcccttgtgcatcagcagcaacgaatcaagtgaaggctgctgccctccatctggtaccagacaagaaggaagggaaattaaagctagcgaaggagaaagggagctctgcagagagactgaagagctttcagctaaaggagaccccttagtagctgaaaagccactgggagaaaatggaaagccagaggtggcttcagctccctcagttatttgtacagttcagggactactcacagagagtgaagaggtaagaargtaacttaaatcagctgtcttgttggtcttctgcctagggaagcagaacagagtagttagagcacataggctaactccagaaagttaaactacctggatccaaatcctggatttagcaccagttttagctgtgttacctttagcatgttagtgaacattttagaacttcagttttctctgcagaaatgcaataatagcaccctattttgtgggattgctgtgaggtttaaatgagataattcatgtaaagcacttagcacagtgcctggcttatagtaagcaatcagtaaaatttagaataccgtcatcattattaatattatctggcaggtggggtgcaatggctcatgcctgtaatcccagtgctttgggaggcagaggcagtaggatctcttgagctcaggagttcaagaccagtctgggcaatacagggagacaccatctctacaaaaaacaaaaaacaaattagccaggtatggtggcatgttcctgtagttccagctacttaggrgtctcgggggagcccaggagtgcaaggctgcagtgagccatgatgatgctactgcactccagcctgggcaacagagtgagaccctgtctcaaaaaaaaaaaaaaaattatctggccagctagagtagttaactccagggccacaggtgatcatgatggtttttaaagaatccaatgagaattgggcaaataatgcttttccattttgctggaggtgagtggcacagagtcaaagtcctccagcaagattgttaccaagaactcattaacttaaatctagttaagtcagctttctttaatttcttttgtagctttatgtaattgacctcttctcaccttaagggcagccttcatttactctatgcaagtaaaattactatgcagaaagtaaatctccttctaaagtttcctgtttcctggcattcctagggggaggctcagcaagaatccaaaggggaggaccagggtgaagtatatgtgtcagagatggaagaccagcccccttcaggcgagtgtgatgatgcctttaacattaaggagactcccttggtggatacacttttcagccatgctacctcctcaaagctgtaagcgtagactttcatccaagtttgttaagattcrtacttctgtttatgcctatttgaatcatgaaatggattacttttataagttaaagaaaattagagttggaaaacacaaaaaatataattaattaagtataattttaacatcatataaatagaagtctatatgctctcctgttataaaacaaatatgtttaatcaatattaggactgtctttcaaggctaggtgtggtggctcacacctgtaattccagcactttgggaggccaaggcaggaggatcccttgatcccaggactttgagaccagcctgggcaacatagggagaccatgcctctacaaaataaaaattaaaaaaaaattagccaggtatggtgtcacttgtctatagtctcaggtactccggaagctgaggtgggaggatcacctgagcccaggaggtcaagctgcagtgagccatgattgtgccactgtactctagccaagtctgtatcactccagcctgggtgatggagctaatattatacaaactatgcctaatatacaaactatggtgctttttttttctttaatagagacagggtctagctccatcacccaggctggagtgcaatgggcacgatcatgactcactgcagcttgacttcctgaactcaagggatcctcccacctcaggcttccaagtagctgggaatacagccatgggccaccacacccagctgattttttattttttgtagacagggctggccttgctatattgcccaggcttgtcttgaactcctggtttcaagtgatcctcctacctcagcctcctaaagtgttgggattacaggcttgagccactgtgcctggcccaaactatacctcttttaaaaatattaaaatagattttatgaacttgaaatggaaaattattttgatggagacaaggaagaggataaaaaaatttttttttaaagaaaaaattaggccaggcgcagtggctcacacctgtaatctcagcactttgggaggcagaggcaggaggattgcttgagctcaggattttgagactagcctgggcaatatagtgaaacctcatctttacaaaaaataaacaaaatttattgggtgtgggggcatgcacctgtagtcctagctacacaggaggccaaggcaggaggactgcttgaacttgggaggtgaaggttacagtgagctatgatcatgtcactacacagcctgggtgacagagcaagaccctgtctcagaaaacaaaacaagaaataaaagagaagaaaaaaattattttgaagtttgtgatctttgtttctttttcacatctcttaggggattgtttatgtcaagcttgtctaatccctagcctgcagcccaggacagctttgaatgtggccaaacacaaattcttaaaacattatgagatttatgcactgaccctttttttttcccttttttttttctttttttttttttttttccagctcatcagctattgttagtgtattttatgtgtggtccaagacaattcttcttcttcctccagtgtggcccagggaagccaaaagattggacacccctggtttatgcaattgtctcatctttgtatagataattataggactaaataacacattttcaaatcttaatgggggctgtttttttttaacaggaaaccaaaaaaatattaatttttttttttgagataggatctcactctgttgcccaagttagagtgcaatggcatgatcttggctcacttcagcctccgcctcctgggctcaggtgatcctctcacctcagcctcatgaatagctgggaacacagatgtgcaccaccacaaccagctgatttttttgtatttttgttagagacagggtttcatcacattgaccagactggtctcaaactcctggactcaagcgatcccctgccttggcctcccaaagtcctgggattataggcatgaactactgcatctggcatgaagtgaattactttttaaagcagaaaaacaaagttgtttttatctgtgactcctggcctcaagtgattctcctgcctcagcctttcaaagtgctgagattataggcatgagccactacgtccagcaaagttatttttgttatggtaataaataaattgttctttttccagcctgtgtcagatccatctgttgagagaatatagtatgaactgttttttttttcttcagtatatcccagatccacccagttgtctgtggaaaggtaaaactaataattattctagtgtttttttgtttaagatatacagctgaaccatgcatatatttatatatgaatatatatatatatatattttttgaagagcagatttcttttttttctcatagagacagggtcttgctttgttgcccaagctgggtcttgaactcctggcttcaagcawtcccacctcagcctcccaaagtactgggattataagcctgagccactgtgcccagcctagatttcaatttttggtacacaaataggatacagtttaaaatgtagattggtgaggaatgccttcatttgcttttctttaactccttaagtatgagcaatagagtgcagagatgacatactgtgactgtacaaacagcaggaaatctgcaatctgagactttttttttttttttttttttttgagacggagtttcgctcggtcgcccaggctgcagtgcagtggcgtgatctcggctcactgcaagctctgcctcctaggttcacaccattctcctgcctcagcctcccaagtagctgggactacaggcacccgccaccacgcccagctaattttttgtgtatttttagtagaaacggggtttcaccgtgttagccaggatggtctcaatctcctgaccttgtgatccgcctgcctcggcctcccaaagtgctgggattacaggcgtgagccaccacaccgggcccaatctgagacatcttatctcatgacagttcatagtcttggatggtaaattccacattcttaccttacaatttagattaaatatgaaatctttattagaaagcagtagatatccagcctgggcaacgtagtgggaccttgtctctacaacaaatacagaaattagctgcagggcgtggtggcatgtgcctggagtcccagctacttgggaggctgaggcaggaggatcgcttgagcccagcaggttgaggctgcagtaagccacgatcacactactgcactccagcctgggcaacagagcaagaccctgtctcaaaaaaaaaaaaaattggctgggcatggtggttcatgcctgtaatcccagcactttgggaggctgaggcgggtggatcacttaaggccaggagtttgagaccagcctggccaacatggcaaaaccccgtctctatggaaaatacaaaaattagttgggtgtggtggtatgcaactttagtcccagctacttgggaggctgaggcaggagaatcgctggaacccgggaggcagaggttgcagtgagctgagatcatgccactgcactccagcctgggcaacagagcaagactctgtctcagaaaaataaaattaaaaaattaaaagagaaaacaatagatattaataactaagtctgcttggccagataaggggagataaaaagcttcagatattaattaggagcatgtcttaagaaaacctcattacccacctgggggagatagaatattatttgtgaagttactgtctcttttcttcatgttttatcctcataggactgatctaagccaggatgaccctgttcaggatcatttgctatttaagaagactctcctgccagtctggaagatgattgccagtcacaggtaggtctccaaagtggtaataggattatgttcagagctgaagcagtaatacatattggggtttaagcataaaaggagatatgttcatccctcaaatgagccatagttgaaaggtagattctgtatctaagcccgatttatcccaaagtacccacagctgctttcacaagtctgtacaagaaatagttgctgtgccatttgagttgcctctagaaattggttcctactacatgataaaatttatatttaaaatgtatattcttcttttcaatctggtggattctcttttttcacagagacagggccttgggaactttgaacaaatttctgagccctaaatcagtatattgtaataatagtgaaatattttatagttttgtgttttttttaactctctggcaagagggaacaaatagattttttcctaatggtgctgacagtctgcattcccctaaaggaagtctactaagaactgagctactcttctccttcagagtgccttgccagggtttctttatcctctctgggtttgtcccttaacaggttcagcagtccrtttctgaagcctgtgtcagaaaggcaggccccagggtacaaggatgtggtgaaaaggtcagtgaaaaaggggtcaagaaaggttggttgcttttatatctgccttttcattttttatttcccatctgttagattatttttataacttacaaactcaagatatgtttcatagccaaacaagtttataaagttatgatgagctcagtatcatatcttcatttaagaaggaatgcagggaacaaaaggatgatataggstttttattttgtactattgacttttaagtaatatgatccattctatatatatatatwtwtttttttttttttttttttgacagggtctcactctgttgcccaggctggagtgcagtggtacagtcttggctcactgcaacatcctcttcccaggctcagctattctccagcctcagcctcccaagtagctaagactacaagcatgagccatcacgtccggctaatatttgtattttttgtagaaacggagctttgccatgttgcccaggctggtcttgaactcctgagctcaagcaatccacctgcctaggccttccaaaggctgggattataggtgtgagccttggtgtccagcctgatcattaattataatcttaaattagcctttggttgtttttgacactattcttttggagcaaaactttaaaaggaaccctgtatttattcagttagttataggtatagtaaggcacagatgtcgatccaaatggaagttatgaacattggttgattgtagtattgtgtccggaattggttccttccggtgggttcttggtctcgctgacttcargaatgaagctgcagactctcgtggtgttacagttcttaaagatggtgtgtccagagtttgttccttcggatgttcagatgtgtccggagtttcttcctcccggtgggtttgtggtctcgctgagttcaggagtgaagctgcagaccttcacagcgagtgttacagctcttaaaggtggcgcctctggagttgttcgttcctcccagtgggttggtggtctcgctggcttcaggagtgaagctgcagaccttggcggtgagtgttacagctcttaaaggtggtacatccggagttgtttattcctcccgttgggttcgtggtcttgttgggttcgtggtcttgctggcttcaggagcgaagcggctgaccttcacggtgagtgttacagttcataaaggtagtgcggacccaaagagtgaggagcagcaagatttattgcggagtgaaagaacaaagcctccacagtgtggaaggggactccagcgggttgccactgctgccttgaggggccagcttttattcccttatttggcctcctccacatcctgctgatttgtccattttacatagtactgattggtccattttacagagtgctgattggtccatttttatagagtgctgattggtgcgtttacaaaccttttttggtgcgtttttacagagtgctgattggtgcatttacaaatgtttagctagacacagagcgctgattggtgcgtttttacagagtgctgattggtgtgtttacaaacctttagctagatacagagcactgattggtgtgtttacaatcctttagctagacagaaaagttctccaagtcccacccaacccagaagcccagccagcttcacctctcagtattttgggattttatttttattttttatttaaaaaaatttttttgagacagggtctcactctgttgctggagtgcagtggtgcaatcatggttcactgcagccttgacctcctgggctcaagcaatcttcccacttcagcctccggagtagctgggactacaggcatgtgccactgcacttagctaatttttaaatttattattttttaaatttttacttactattattttttgagacaggtctcactctgttgctcaggctggagtgcagtggcacatttcttggataactgagcctcaactgcccaggttcaagcaatccttccacctcagcctccctaataactgggtctagaggtgtgtgccaccatgcccggctaatttttgtattttttgtagagatagagtttcaccatggtgcccaggcttgtctcagactcctgggctcatgcagttcacccacctcagcctcccaaagtgctgggattacaggtgtgagccactgtgcctggcctgatatttttattataataaaatattttctttgtttgaaatgttattaataactttatttttcttcagaatatcactgaggaggaatttttaaattttttgtagatatggggtctcactagattgcccaggttggtcttaagctcgtagtctcaagcaatcctcccacctcagccttccaaaatgctgggattacaggcaggtaatcctagcctattttggattttttttttttttttttttgagacagtcttgctctgtcaccaggctggagtgcagtgatgagatctcggctcactgcaacctccgcctcccgggttcaagtgattctcctgcctcagcctcctgagtagctggaaccacaggcacacgtcaccacgcccagctaatttttgtatttttagtagagacagggtttcactatgttggccaggatggtctcaatctcttgacctcgtgatccgcctgcctcggcctcccaaagtgctgggattacaggcttgaaccactgtgctcggcctattttgggtttttatagcataggtcatctaaaatgctgtcataaacctgtatggtaatagaatgtaaaagatcatgataggacctttggagagtcactagtctgtgctgctatagcacaataccacaggctggataatttataaataatagaaatctatgtttctttgttttggttctggaggctgggaagtgcaagatcaaggcattggtagttttggtgtgtgaggtgggttactctctgcttctgcttctaagatgatgccttgttgttgtattctgcagaggggacgaatgctgtatcctcacatggcagaagggacagaaggataagagggcactctcttcgatatggagcccttttataaggatgctaatcccattcatgaaggcagagcactcatgaattaattacctcccaaaggctccacctcttaatactgttgcacttgggattaagtttcaacatgaattttggaggggataccatcattcaaacagcagagacaatgataccatcattcaaacagcagagacaaacttctttaggaatgaggaaactaaagctcagaggtgcttggtcatgacttgctcgtgatcaaccaacagttaatagcagagctagaactaagccccagattcttacctgcagttcagtcttctttctacactgctgtgccttctcttatatatctactttctgtgtctcattaatattgtcttaatattcacttgatccttttttcatctccatgaaaggagaaaaaaattattcttagctttttatttgtgcagtaagagaagtagatgaaataatatatgactatacattgtaaacagcaaataactactgtgtgataaactgatgattggtgctctttacaactttgatacctggggccagcactcctcctctgatagtagaatatagtgrcttgacctgtgggctctggagtcaggctgcctctgaattggaattcaggctgtgtgcctttcagtgagtacttaacctctttagatttcaatttcttcatctgtgaaatggagataataaggccgggggcggtggctcacacttgtaatcccagtactttgggaggccaaggaaggtggatcccctgaggctaggagttcgagactagcctgaccaacatggtgaaaccctatctctactaaaaatacaaaaattagctgggcatgatggcgcacgcctgtaatcccagctattctggaggctgagacaggggaattgcttgaacctggaaggtggaagttgcagtgagctgagattgctccattgcactccggcctgggcaacaagagtgaaactccgactcaaaaaaaaaaaaaatgagatattaatgatacctaccttacaggtttattgagaggattaagtgagttagtatagaaatacagtgtttggcccattgtaaacaggcaaatattaactgctgttgctattttattatctgatgagggttgttatctttgctactgttttcattaagaactggttagttcttcaagagaacgtgttaggttatcatatgttccacatgaaggtttgattttctttgttttttcttggccacctgcagacccatggacttaactagcctgaagagaaatctctctaagggtcggattcgcaccatggcccaattcctgcgagacctgatgctgatgttccaaaatgctgtaatgtacaatgactctgatcatcatgtataccatatggctgtggagatgcggcragaagtcctggagcagattcaggtactgtatgcagatacctgtagcctctggaatcttgatttcagaacgcctatgagaataaaggtgatttcgaggtgactgtgttctcagagtttatttttaaaggtgattaaggccctgaaggattgataatgtgcctgctggtttggaaaaccctgagcctcagtaagtccagctctgatagtgaagtagtctaggaatgcaggcagcagtgaagagctctcaagagagctgaggatagacaagtaatgggaattcccgcttccagagcctcaagtcaagggctaaactccaaagaggctggagtcactgtgtattttttggttgcttcatctgttgttattaatgtacgttcacactttcccatctttaggggataagatatagtagctagaagacatttgtgggtttcttttctgggtagcatcatactttaaagaaaaaagtatagttgagtctatttgccaaaaaaataaacttgcaatactttagtgtttaaggttcataatagcttgctatgtgttccttaaccctttaggtactgaatatctggttagacaaaagaaaaggctcaagtagtctggaaggagaaccagctaacccagtrgatgatggaaaacctgttttctaacctggagctgctatcctgactttttctagagtttgaatctctcccggaactctgacctagagaggatcctggtacttctttgccatgtcctcattttcttttccaacaagaataataccttaactcacaaccaacgagtcaaagatgcatgtggacataatataaagaaaaaaaggggaagctgaggtttggatttatgccataaatgttgcccacatctttgttccatcggcttgatttaaagacaattccattagatcttttctaagccttttactctataaataaatgtatttacacaataggaatattgctttttaatgactagataagctgggcatagagggcacagcatcatctggtgaaacgaaggtatctgacacgggtcatttacatataccgcctggaaaggaatggttgggggaggggttcttatcatttatagagtagggataattgaagcatccttcaaacgggaagaaggatgaaataagataaattatgagtaaaatgtcagaaaacatctagtgctctaagattcacaaggagaataaaagtgactggctggctccctttggttaaaacgaactggccagaagctgcaaggttccttgctgggattggctctctgcagccaccgtccccacgctggggcttcaggtctcctagcaacaagttgtaccatatgaggacggccgctgaggtgagtacttagagagggtcaaattcagaatttgcaggtgcaacccggaaagtccccgcggacctagaggccctgcttttcaattagcctgaccctatgcacagagaggtccctgcgggacagggtcgcttcacagaggcagctggccgaggccgctcacccgccgctgtaatggtgtgtggttgcccaccagccaccgtcccctcgagcccccaccacccgctctaccgccccctcgagcccccaccacccgccccaccgccctctgctgcctggggctgttgctggttccaggccttcgggtcgccccttggcctctggttatgtgagcccatagtccttcctgccttggtgacatcgtatacgaaaagccggggctcgatttggacatagtaggaatcctattattgagaccctgtatatagaaaaacatggcagtttctaccttcatcagttaataaaatcaagtacctactattgctattcttaatcataattacattgaatttgcgatgggggtggggggaaatgcatgtcattgcagttgatacctgttaagaaactcttaatttgtgccctgaaaagccataatggagatatcaatgcctccacctcagatatatgtagaaaaaactctggccattatcaaaccagatattgttgacaaagaggaggagatacaagatattattcttagatccggattcaccattgttcaggtaacttctgggtatgatgattcatgcttttttcctctctgcccttaaaaaaaaaatgcttatgtaaatgtgcctacccatttaaacccttagtgttcagcattaaatttaagtttattcttctaagtataaaagttatatgtgatagtttttaaaaggatgtaaaatgagaaataaaatggacttttccttcacctgtcctcttttaccccaagtcccaggctccagagagaggcaaccacttaacactttctgttcttccaggagttttctatgcatttataaacattttccccccataaaacagaacagtccctttcccttgacccctttacagagtccctcagataggattccagatcattgcatctgaattgatctcactcttcctaatttctgtgtaatatttccctgtgtattagaactacaatttatttacttgatcttctattgatggaattttaggctattggtacttttttcagttatggcataacatttaatgttttaagccttatgttctgcaattagtaaacattgtcattctaggggtttgaaagtgaatataaatagcattgttaaggataaatcaaatagaattgaatatttttaatcttcctcttttatagtttttttttcttttttttgagacagagtctccctctgtagcccagactggagtgcagtggtacgatctcggctcactgcaacctctgccttccaggtcccggttcaagcaattctcctgcctcagcctcctgagtagctgggattacaggcatgcaccaccatgtccagctaatgtttgtatttttagtagagacggggttttaccatgttggccagggtggtcttgaactcctgacctcgtgatccacccgcctcggcctcccaaagtgctgggattacaggtgtgagccactgcaccccgcctcttttacagtattcttattcgaacttccaattttttattttctcccatttatacagtgtcatattgcttattcagtcagtatttttaaaaataaagagaaaatggcgggtacggtggctcacgcctgtaatcccagcactttgggaggccgagatgggtggatcataaggtcaggagtttgagaccagcctggccaatgtggtgaaaccccatctctatgaaaaatacaaaaattagctgggcgtggtggcgtgcacctgtagtcccagctacttgggaagctgaggcaggagaatcgcttgaactcaggaggcagaggttgcagtaagccaagactacgccattgtactccagcctgggcaatagagggagatctgtctcaaaaaataaataaataaataaataaagagaaaatatcaatcttcagaaaagatacggaatttcagttgagcttcaaaggacaggtggagtccgagagtagggatggcacaagaaagtgttaggaagtatttaatatgattaaagactcaggtaaataactttttagtaaatgttaggaaaactggtagccactgaaaaatttggatcaagtattatataccaggataaactccaaataaacctgagatctacatattaaaaaaattaaaccatgtaagttcaggaagaaaagataatggatttattttgttgttggagtaggacagccttttttttttttgttatgacttaaggtctaggagccatggaagaaaagattgataagattatatcaacaaggccaggcacggtggctcatgcctgtaatcccaaaactttgggaggccaaggtgagttgatcacctgaggtcaggagtttgagaccagcctgaccaacatggagaaaccccatctctactaaaaaatacaaaattagccaggcgtgggggcgcatgcctgtaatcccagctactcagcaggctgaggcaggagaatcgcttgaacatgggaggcggaggttgccgtgagccgagatcgtgccattgtgctccagcctgggcaacaagagcgaaactctcgaaaaaaaaaatttttttaatttaaaaaaagattatataaacaaaaaatttctgcacaatgaaataaacaccataagcaaagtcaaaacacaacaaacttgggaaaaagatttgcaactcatagacaaagggcttgtcttcttaatacataaagagctcctagaaaaagataaaaataaattagtagaaaaatgggcagaacagatggatggtcacagaaaaggaaaaacattttttaaatatatgaaaagatgctcaatctttaggtgggaaaaaaagcaagttaaaactacactgagattccatttggcaaaaatataaaagtaaatggcacaacccctatcaaagggaatctggcagttatctaccaatacaacagatggacttaccatttgatccagcagttctgctcttggaaatctgtcctatagaattccttgtgctcttactacctgtcatgcgcagagccctgtttagtcccatcagtaggtgcctgtattaatatgaagtgatatatatgcaggttattttttgcagcattgtttacttatcaacaaaagattgaaaataacccaggttgggagattgggagacaggactaaataaactctggaaaacccatcaaattgcataatatgcaactaattgtaaatagaagaatgaggaacctgtctgtactgttaacggaagaaagcaaagtgtgtagcaaaaagaacaaaatagcaaaaaaaacacaaaatcatgtgtaccaaccttttgtgatagagacaaagtaatatattcatgtttgccaatatttgaaaaatggaattctggggaaataaacatttaaaaagggttgcctattgagggcaaggaagaactgagtagattaggaaatggataggaataagatttttcagtatatacctttttgtcttgctttgaatttttgaatcctgtaattatattacccattaactttagaaaaaataaatgaagtatacagataaaggcgtcccatttaagttttttaaaagtccgtattttgcccgggtgcagtggctcatgcctgtaaacccagcactttgggaggccgaggcgggcagatcacaaggtcaggagattgagaccacagcgaaaccccgtctctactaaaactacaaaaaattagccgggcgcagtggcgggcacctgtagtcccagctactcgggaggctgaggcaggagaatggcgtgaacccgggaggtggagcttccagtgagctgagatcgcgccactgcactccagcctgggtgacagagcgagactccgtctcaaaaaaaaaaaaaagtgacaaacttaataattaagtggctagtgttaattataaattaaaaattagccggccgtggtggctcaatcctgtaatcacagcactttgggaggatgaggcgggtggatcacctgaggtcaaaagttcaagaccaccctggccaatgtggtgaaaccttatctctactaaaaatccaaaattagggctgggtgcggtggctcatgcctgtaatcccagcactttcagaggccgaggtgggtggattacctgaggtcaggagttcgagaccagcctggccaacatggtgaagccccatttctactaaaaacacaaaaattagccgggcgtggtggtgggagcctgtaatcccagctactcaggaggctgaggcaggagaatcgcttgaatctgggaggcggaggttgcagtgagctgagatttcaccactgcactccagcctgggcaacaaagcaagactccatctcaaaaaacaaacaaacaaaaatcagctgggcgtggtggcgcatgcctgtaatcccagctactcaggaggcaaggctggagaatcacttgaacccgggaggcggaggttgcagtgaactgagattgtctgggcaatgtactgagaccagaaaaaacaaacaaacaaaaaaatttaatgtaaatatatatgacactttccctagttagtaactttcagagcaaaggcagccatggtacatccttcattttttgctttaattgcggtaaaatatacacaacataaaatttaccattttaaccgtttttaagtgtacatttcagttgcattaagtacattcacattgttgtacaaccatcactactgtccatttctagaaccttttcatcttaaactgaaacactctacctaatgctaactcgttgcttccctcttccccatccccgataaccactattctacttgctgtctgtaggaatttgactattcaagctatctaatttaagtgaaattatgcaagttttgtcctttgcactgtatgcttttaaaataggcttgggagtccaatgaacttgaggctttcctgtcccacttaagggaaaagctgaaaaatgatatgtcatttcagtagatggcagtgttgcctttgttacaaactaagagttctgttctgatagtacttggtatcactgcttctctgtgaaaatattcaacctaatttcagatgagatcgggtgtgttcagggtggtatggctgtagactattcaacctaatttcaaaaaatttcacctgatccagttttaaagcaaccaatggaataattgatttagtatcaattttatttaaagatgaacccttaaggccgggcgcggtggctcacgcctgtaatcccagcactttgagaggccgaggcggcagatcatgaggtcaggagatcaagaccatcctggctaacacggtgaaaccccgtctctactaaaaatacaaaaaaaaaaaattagccgggcgtggtagcaggctcctgtagtctcagctactccggaggctgaagcaggagaatggcgtgaacccagtaggcggagctcgcagtgagccgagatcgcgccactgcactcaagcctgg

SEQ ID NO: 98133 - DNA, 30366 bp, Homo sapiens
gtaatagaataatgctttgcttcttttggaatctgagggaagtatagtattttcccttttgccagagagatcttttgtctctatggagtcaaaagtgggaggggtgggaagagaggttgggaaccaggaaactagccacagtattgagtttcagccaggtgcatcagattgagaatgtaatgtccctagtttattgaacaagagcagaaaaatctcttggagttcaaagcaaccatggtgttgattttctcctttcttgaaaacaagttttgaacttagactgtagaggttggagatttagggggagaagataaccatttaggataatccataaagtttaggacttgacttagttgacctagttaattttagaactaggttgacctagttaattttagaaaatttaacactgctacagtacaatttaaacttgaacatttgatttcaattttttttagagctgcatttttgcaagaggtaacagagttatctcaacaaagtgagttcttgagagttttgaagaaataaagtatccaaccattaagatttatgtcttccagtcttaactgaggttttctatatagtaggaagtgccacatttgctatttgattttaaaagtgtagatagatgttagccatacaaagtgtaaacagccctaattaaaatgctttcattgtgaccgggcatggtggctcacacctgtaatcccagcactttgggaggctgaggctggcagatcacttgacgtcaagagttcgagaccagcccggccaacatggtgaaaccccatctctactaaaaatacaaaaattagctgggcgcagtggcacatgcctgtaatcccagctactcaaaaggctgaggcagtagaatcacttcaacccgggaagcgggggttgcagtaaaccaggatcacaccgctgtactccagcctgggtgacagagcaagactctgtctcaattaaaaaaaaaattttttttttcattgtaagaactcatggcttattaaaccactgggggcttttggaatcttgtttctataatcatttgtttctattactagactacgtcatttattttactgttgctttcttttcaatccatattggacaaaatttgagaccaaaatttaaagggaggggtgcgaaaaagaagagactcttaaatgatttttaaaattcagtacaagtgtatttcattttaaatgatagatattgtgtttgcaaaaatgcatgacatcaatccactctgtcccccatacttcaggtaaataaacacattttcagtatactttatgaatatattattcacttttctgaaaagtacatttaaacttcaaaattttgtatgcacaatagtagaatctgtttgaatgtacttgacctgttttttcttctgcattgtgaatgccttcttaattgccttctgcttttactagctgcctgtatcctaacaatttggagttgggaactcttctgaatagaaattttatcttccattctctatactctgcagatttttatatctagtcgcaacatttctattatgattcatacttcctcacaacaattatgaatgttctacagatttagaggtagaattcaaaaacatatacaaggaaaaaggcagggtgcactccttttattaaaaggccagaacacatcctggttcactgttgcaagaccactgggatgcattaggtgaatctaacttagcttgtgacacaagttaataaagttgaatctggtttttttgttttttttaaggttgatggctgaagtgagattaatttctaaatagtctcaactcttgagacttgctatattgcttataatgaagaggaaaaggacactttcattactttacgtatttatgtaattggagggaatggaaagtttttgggaatatgaatcaaatattagactgttttcttattttagtttgtatatgttttaattgttttctctctctacccattaaagattccagtgctgaatattcaaatgaaaatttttcctgcactttgtactgtagcagggaccatattttcctgtacaaattacttccgtgtaatcttcacaggtggtgttggcaaaaatggatcaacaatagcagtaagtataccttaagattttcaacacttgtttacactaggacttggttttgttgtcattttgttttttatttcaaatgtataaaatcatttgttaatttataatttatacttagcctttaaagaaactaatgttcaaaacttcaattttatatatacttacccacatttatatgctttatatattcatacttttatgcatacacacacacaaacacacttattcacatgttttttaaagtatgagctgctttgtaaaaataagcctggtctcttaagtgaaatcctcagtttgtgcctaatgaatttatgctgctacttttcattagctcttctagtttgtgatttatagaaattgctgcctatcaggcaccatgaggttcctgaaagtttgagttgaactgtgaactgttctgcagcagatccatgtagtatctgatgagtactgaatactattaactcttctcttcactctgtacagggaacaagtgtcctttctccttttctccatattggatcagtgattacattagctgcaatgatctacaagaaatctgcagttcagctttttgaaaagcatccctgtctttatatactgacatttggttttgtgtctgctaaaatcactaataagcttgtggtaagcacctgagtttttatttgctgtgtttttcactttcatcttattttggatttatggctatagttctcattctgtagcttcataaatggtcctagagtttgccctcttctaatcagaatctcttgatatcaacatgggaactatttttactcttttgtgaagctacaatttgaagttactggaagttcttggaaaacatacaactttttacccttttatccactgtttaatttggttattcagtttatttacattctcagtctcaatctggacactcaaattaaggcttcttgtgaaaagcatcttttgtagggttagttgacatgatacatccctttctttctcagacgcatttcatattgttgggtttttagttttgggaattcaacagctattcctaaataattattggaagttgatatctgagcacaatatgatttactgtgtagttcacaattgtcctcttatgaaaatgcctacgttattctgttttattcataggttgcacacatgacgaaaagtgaaatgcatttgcatgacacagcattcataggtccggcacttttgtttctggaccagtattttaacagctttattgatgaatatattgtactttggattgccctggtaggtattgtactaagtcttatttcatggtttgagggtttgaaggttgcttgttttcttattttgatgacccagtcatgaaagatcgttcatataattgtaatgatttggaatgtcagaaatccacataaatggggctgtgtgagagttctatggctttatatttgagccttttattttttgcattaatcttactagtcctgcctacatcgggcagggctcataaattgcaaatttctgactgagtagaaaagcatgaatcagcatactacaccctgtgggcccatagcctgttttggtaaatacagttttattggaacacagctatggccactcatttatatattgtctgtggctggtttcatggtacaatggcagagttaagcaactgtgacaaagacaataaggcccataaagcttaaaatatttgccatctgtctctctaacaaagagtttgtatgtgaaggaaagattgcaaggaaattgaattattttatggaatggaaggtgaatctgtagagagaacagagtccagtcctctttactttcaggaagcttagggagagcctaaacgggtgctgagaatgtctcttttctttccaggttttctctttctttgatttgatccgctactgtgtcagtgtttgcaatcagattgcgtctcacctgcacatacatgtcttcagaatcaaggtctctacagctcattctaatcatcattaatgatgtaattggtatataggaacatcatgttttctgcaggaaagaaagtaacatattaaggagaatgggggtggataagaacaaatataatttataataatcaatgttgtataacttttattctttattattggtaacacgccctaactatcctgtgtgagaatgggaatttcaagtcccatcttgtaaattgtatatgttgtcatgcagggtttgggccaagaaagcatgcagaaaaaaatgccatgtgattgtaattatcctggattcagaataatactgtgatggggagccagatccgcagtggtggagagttctaatgttgactgtttgcaggccaaaagatgattgctttataattttaacaaatcattgtcttttagtaacatccttgtttagtgtcttctcaagctttctttactgaggaattcagcttgtgacacagatacatcccactagcttgtgaggtggaactagtaataaagaccttgaatttggattgaaaagtttcctatctttacattgttgaggaagtccttttttttttttttttttttttaattgctcaagaaatgattctctcacaggcttgggaaatcctgttagcatgcagaataatgtggtaactttgtcaatttcccattttatttttttaaataaatatatgatctaaaagccaactttttctcagttttactcagtggaaagataaactaagttttaatgttatttttttaaatttaagcaaaatttatttctgttctttaataaataagaaaatgtggtccactgcattgttgtgatgtgtcttgtgacatttctattttgtagaaactttaaaaaggagaactatgttcatttttcctgtcaatggtttttttgtgttgtagttgtcacctgtgtgattatcaatcatttagaaatctcatacccttcccctaaattttcagcaagtgcctgggcctctctaagaggtcactttgtactctccttttctggcagtctcctctttggtatctgtactatcgtttgaaatgggaaccagatatgtttccattttatacagataattcagttgcttgaagaagagggacacaggagaaaagatttaaactattggctaaaatgaggtgtcttattattgattttcatctatatcttgtcccataatcaggaataaacagtagctacactgccttgtatggcagccagagcgctgcttgcttgcacttttaatgattccatcaataccatgtagattgaattagcaaggagaagtaaacctttcatttctttgccagactatattgggaaatgaaaatccgtcattacttttccttgctagcaattgttcgaatatctgggataaagaaatacatacaggaaaatgttagggcagaccaagtattaaaagctaggacagagcaggacaaaggaggaaggataattctacttgtttggcaaagttacatcagttgtcttactgacacatcaggtactatctatagtggaaattgaggcccggagaggttaaatggcatgccagtgtcacttgctatttttcagaacaaaaattagaatccagatctgaatcctggtgcagtgttctctcctatgccctactgggctttagtgggctaaagttctgaagcaagatgttaagggctaattgaaatgtgtttattctcctagattctttttcagcatagatggaatctgaaaagcactcagatatttagtgtgtgcttccttcagccctaaatacagcattagcatcaaatcaagggtacatttgtaataaacctcagcaaaccttacctgaagaaccttttaagaaagtacagatttccaggtcctatcactagagatgatttggtgtatttgtgatgaggcataagaggatattttcacaagattctcaggattccagttcctgttctgaaacctttggaggtacaactatatttaggcaccactgccataaactaccaaaaaaaaatgtaattcctagaagctgtgaagaatagtagtgtagctaagcacggtgtgtggacagtgggacatctgccacctgcagtaggtctctgcactcccaaaagcaaattacattggcttgaacttcagtatgcccggttccaccctccagaaacttttgtgttctttgtatagaatttaggaacttctgagggccacaaatacacacattaaaaaaggtagaatttttgaagataagattcttctaaaaaagcttcccaatgcttgagtagaaagtatcagtagaggtatcaagggaggagagactaggtgaccactaaactccttcagactcttaaaattacgattcttttctcaaaggggaagaacgtcagtgcagcgatcccttcacctttagytaaagaattggactgtgctgctcaaaataaagatcagttggaggtaggatgtccaagactgaaggtaaaggactagtgcaaactgaaagtgatggggaaacagacctacgtatggaagccatgtagtgttcttcacaggctgctgttgactgaaattcctatcctcaaattactctagactgaagctgcttcccttcagtgagcagcctctcctcccaggattctggaaagcacacctgactccaaaccaaggacttagatgccctgtgtccagtgctgctgctgcttttaccagtatctcttacccttccggttagaagaagtagagctgctgccccccatgattctatcactccaaacatatccccatggccaggtcttccacttgtagtccacttgattgtcatattcattgccttattttccacgaggaaaatacttttacccatagtaaaagccaaagacacatataaaaataagattttcctctttactctcgtccttacatgtccacagacttcatgtagagaggctgagcctttcgaccacaaagtgtgttctgtgttgaagatgttataatgatgggagagggcagttgcagcagcttctaaccaagtgtctacaacacatgtactactgtttcctacctgtgtcacctctgcaaaaaatggagctctgagcccagttctgtgagcatggtgtcrgagccctccaaagtcctgagaaatcaataccagggatccaaatctcagacaccagtttgaagcaatacctggataccaagactcagagtgaggatatggattttgggagctgacagttttgctgatcctgccacactggcaggggctgaagtccagaaatggtgtgtagctctagtcattcttattcaccacagctcttatttcacagttttttcccttggtttcttctgtttcttctgttcctcatattcaagtattttctgttggaaatagcctgtgggttcaaatacaggtgttagaggcatctgatctggtcaggcagattataatgagctcaggaataaggatcagaaatatcctgtctgctccccatactgccatccctgccaggatgtctctggcctcacaggttctggagatccagacattcagttttgtccaaaaaggagcccataaacagaggatacttagcaggaattagctctagactaaaacagaggaaagggctcagtcctgttcactaatgggtaaaccaacttccacaaaatggcagcccattagacattttcttaggtttcaggttatgtcatttcaactccactaataaaagtctacctacagctattttgtgggtttctaaagagaagtattctttctttcccctcctctttattctrgaggtaaccctctatgggcttagactgatgggkactgttactgtacctgcaggaggattcttgctcttctcggcttcctggatgaaaagtgagaagagctgtgtcttcacaaacttcttcacaaatcggcggttggtcttggaggtcagagccttacagaaggatctttcttggaagtggccttgcccatttgcytcccgcttgatataggaagcataatggcccacaatcttgacaaagaactgcacaaaggggcctgaaacatgctcgttgatttgttctgcagctgcaggagatataaaggccatctcagagggtagcagaaggatgaaattacccaaactcaccttcaagaatggctttcttgcaggcggaaagctcctggggaaagccatagggtagggttcataattactgactgagatgggaatctgggtatgagttctctgccrttgcttaggaagaatacaatcccaaattcagacttgccctaggttctaggcctctarggctggtctaggactactgaatgagttcattttagttctggaagggaatgattgagaagcatgcccttgcactgcctggagagacccaaaataagagtaaggwcttactctttaactcattgatcccctgaccaagagagtctaagatgtcatcctgaagcttcggtggcaggatgtctttttcatcaccaacctagaagaggacagagctccgaggtcaagcaggaaggaagtgtggagtgaaggtggttggcagaaaagcataaggagggcatgaattctacacccccactccacccgcaaatagccacataggacagaaacaacagaagctgtttcttggcctttagtttgactctagacattagcaagggatcctctccatcccggtggtacttgatttatatcccttgcttaaaaggcactatcactgattgtcttatagtgaagtcatctgtgtttatgtccatgggctccttgagagagatgtggtctttttagcacagattctcactcaacaaagaacttaaatgtttgtttaaataagtggaacatggatgaaactagagtggtagagttgttgataggcctgcaggggatctgaacccagacacttaccgacattaagaaggttccttcacaaagattgaccagcaggacctgaaataaacatagactggctttctctggtcctctttcttcatagacccccagaggatttaccgtcttgatttctgcctgtggctgtatctttcagcccaggtagcaacaaaatcaatatcttcagwtctcatttcctatctagcattctcctttctcaccattcccctctggagatctcagttccattcctgaggaaagggtgtgggtgtttgtaggaagggagtaggagaaagagctaaggtagaagggaaatacaagatggagaaatcacagccagtcactcccttaataaaacattgactgcagaaattgcttctacatggagcatttagtacattgttcacataagtgctttacacgtttgatctcaagcaacagtcccgtgaggcagatacaatctccattttgaagatgaggaaacagamccaaagaagctgcccgaggtcatactatgctgctaataagagaaccaatttttttccaagcctagactgatattcttgagattgcattcctctctctacaattccccttcaactccctgctctctagaacagagaccaacatctttttatttttttcatgcttgcaacatcttatgtacaattttctattagaaaaactcctgcctctcgtggtggctcacgcctgtaatcccagcactttgggaggccgaggcgggtggatcacgaggtcaggagatcgagaccatcctggctaacacggtgaaaccctgtctctactaaaaacgcaaaaaatcagccrggtgtggtgrygggcgcctgtagtcccagctactccagaggctgaggcaggagaatggcgtgaacccrggaggcggagcttgcggtgagccgagatcgcgccactgcactccagcctgggcgacacagcgagactctgtctcaaaaaaaaaaaaaaaaaaaaactacctcacagctttgggccttccagcaggaaacagcaaaggaagaaaatgagcccagggtcaacaggaagaggaaaggaaaggaagtgaggagaccatgtgtctacagtcctcaagtgagataagcactgggctggaacttgggggacctgagttttagcactggccccatcactgcccagggagccttcagtctagaccagagattacaaataggcatcctgctggctgattccaaccagcagatctgtttctttgatcttcacagtatttttaagtaattgatttggtttccaatatttaaactggactatctcacataaagtttggatttggggcttctcctgaaaagtcaggagatctaacactgggtccacatttctaaaggacaacactcagatggaactgagtagcagttgcctgctttaggcagggcatgttcccaccagtttaccgtaacttcccaaatcatgtattggtcatttaaatgcccgctgggcctctcttttccatttgtgacccttggtcttgatagagagaatgatccctccattgtcccttcttccaaatacaaggagagagtggaaagtatgccaaaaaatagagcatgcactgtaattatctgtcatcaggggagaaaagttgaactagtccaggcctgaaaccacttgtatacataggctcagatgccttcatgaagggaagactgttcctttgagggattggggggagagagtgtgtataaataatttgtttttcaagattgttcccagaaatctttccagtatttgggcatattattgtctgtggagtaatcccttaccaaaagccagagtctgactggccatcaggagaggagccacggcttccagggagctggagctgcagagtcaagaagtttcataatttctggggttggaacatttaaatgtttattgctaaacatggggctaatactctgtcccagttagtcacaaggctaaagctggttcaaagggcatgtgtactcagcagtcctaaggaaggatgagggggccggtggagcaaagaagggaaacacagccttcttctttactttgcagcaatggtttctataggagaggatttggttttatctgtgctaggttccactgttgtctatgtggccttggataagtctctggagctcagttatctcttggagtgagtcaatggttatggccagggcagacattcccaagtccctcttctggcttgagatacagtaacatactatcttttgaaagtccctatactgacaactctaaagcacatgttttgagttatttttccaacagygggsatagatttacgcttttaatgcccattttcacaactgagttctctggtgtgtctggtgcactgccaagatgtaagaagctaacaaaatcaaagaggattcagacctatatcctcattagccaccttagctctgagctactcagaaagatgacttgctgcaaaaatctgcatttttaagactcatagtttgccagagggccatgttagctcaattccaaggaattcaaatacattccagtggggtgtgtgttgtatagaccagctgtgtcatacatttggatgagatgggacaccccgaagactgctcattagggccagctggcacagaacagtctgctcacccctgaataagctatccactgccccttatgcctaaaggggaatccttcagaagggaacctgcatttattgagcatcacctgtgtgtcgggtgccaggttaggagctctaggcaggtggtttcccccagaatccttaggaagtgaacactgttatcsccattttagagatgagaaagctcaggcttaaagaggtaaggtaacttgcccctaatcacacagctgtaagcagcagagctgggatctgaatcccactctacctggctccaaatcatgcactcttcttgccacatcatacctcttccatagggctgtccatgacctcctgctggaagcgcatttgtactccaaccatgaagggggtggggcagcagacggtggccagaaggctctcagggacaacagggatgtaggtgtgcgcccagytgaaggggtagagcagtgcggcagcagcatggatgcactgagacaaggtgctgggacagagcacagaggatgagagtcagggggcccctgcaccaccatgctacacacccctcatcgcccaccaccaacagcagctagagcagtgctgcccatgcccatgggcagaaaggcaagtctgggggccatgctggtcacagagcttgaacgtacattgctgggagggagggacagaaactagagagtctgaggcttcactatcaagaagggccttgatttgacccttcttttcccagttagtcttctcaacttactactggccaaaaataaaagtgactctgaagagaagagggaagaagagttgctttcattcaaggagataattgattgagcccctagcctgtgctcacaactgtgagcatacctcacagatgtggataccaggaagagtaagacactgaccctgcttttaaggaattcacagtgtagttaagagacaaacatgtaaacaagcactggaggctcagccgagaggcaaagcctttttacctcgctatgtctatccaccctcatccccagcctttgcccccacacagccccctctgggcacactcgaggttattaaagattaccaggttgctgcctgagtagcttgggaaattcccaggttctaggaacctctgcccagcaattcctacacggaaagtcccacaaaggtgcctcctcaagactttccagtgaagcatttctcgtcactcctgcccaagtcacaacttggaccctactcctctcgccaccacatacacacagtcccactctctgtctttctcttttatcccctggctttcatggctcttctttactccagccaaattgcctcaaagtcaaggccaataaaagcacagatgcgggaatccttgtttcagttctgggtttcaagctggcacttcctgaattagcaaaattgagtctctgagaggctagctgactggaagtcccctccctgtccgagcttcagggagctgaaaaactcagtgtgggaaggaagtggggagtggtgggatttccctgaagaaagtaaacgtctgagaggtgaatcctgcygacctccacttcccaaacactgatctgaggaggaaaggcagaatcccagctctagccacacaggaatttctggtttccattcaaggctgggagtgaaagagctatttccaaagcaaaagatgatgccactcccttcaaggattacctacaactagttcctctttggttatcacccatttttacagaatcttcaacacrgagaccccactgcttgcccaagtttcctttcctctgaaacccatggcattcacctgcccctctgacttctgttgagtccctaacatccttttcttcttccctaaaagataaaagcagggttgtcaacctaaaatcactggttttctccctccccagatatgaatagaaggtctacccctacccctactgttttatgacttytttcattctccattctattacatctccccacgtccttctcagatctgaagcccctaaaaggtagagaccatggcacaatagtaccctgcttccactatacacagggatatactcaactgtgaacttaagaacagaagctagcactcagcaatatgtgctcagcagggtgttaggtacctaatgtgcattatttcatttaatcctyaccacaaccttatgaggtaatcacaatcattatttccattttyaagaagttaacaaactaacttaatgggaacctcayagctaaaggtagaagaactggatttaaacctcctaattctgctgatttcaatccctgtgctttcaaccagtatgtaattccgcatccccttcaggtgaaggaccttgtcctgtttgtatcttcccaatgcttggcatctggcaaccagttgacacacaataaatgtttgttgaatgagtatctacctcctgccctgttctccaccctccctcagccttgcaagggcagaatcatgtctgcatccaccctaactggtcccacccaggctgtcccaggaatacttcctgtccttccccaagctaagtcaggagcattcctcaggcccaggcagcagtcctgtgtggaggaagaggcagtgggggtggttcaaaacagctgtttctcttggtttaaagaacaaggagctagaaacaggagggtgggcgcatggaccctacagcccattttccttggataacctccagtctgttcccttgaacccagggatgctgggcagttcaggtgagccgtycaggggctgggcccacctgagaccttccgccaggaagatgatttttctctccagcacggcagaggcaaagatctgaagtatctgttcaaaactgagacagtgcaatagagaactaaaatccacatgttctaggtgggagtccaggggccgtgtcagtgaaatgaactgtgggraaaccagagagagagaaggtgtcactatactgcaagatcatrcagaccccgaggtgctaggcctctaccagcctctattccttctgcccccaggagtgaatctggccctgtctctctgtccccctgctaattggctggaggacagcactgatgtgatcttgagtatggcccataatgtcctgcaccctccctcactcgcctccccgagcacacgcccctctctcactgtgcttcaccacatgggcttctgttccttgagcaatcccatctttcctgcctgcagccttcacagtgagggccctcctcctgcactgctctgctcccttcattcttaccctctttcaggtcacagaggcccccctttggccatgtgatactttcccatcttcttatgtagcaccctgttttgtttttttttctttcatcacagttacataatttctaattcaacatgcactggtgtgtttatttaacatctgttctccccactggacttacagctccaaaaggtcagggaccacattcattttggtcaccactgtattcccagaaaatagtayagcttggcacacagcaagcattaagcacttattttttgagaaagtgaaaatttctagcctctccccttattttcctgtggggaagccaaggttcaaaggggcacacagactattcagagttccagaggacaggactggaattcttagaacagtgttctacctgctgcctcagtgtgcttggtgccttaaaaygatagcaktcccctgtgcatgggtggagactcggaggtggggatggatgataagaaatggacagatggacgctgtaaggtagagacaggacaaacaaaggagagtggaaggggggtagcggcaagtggcagtctgagggctgagggaaaagtcctttatagcaccagaagcctcaacttacatggtttatttattataaataaaagtcttggtggcttgagcagtaactaggtgcttgtgggtatcaagttagaaggatcagaaaatctgggtttgatttcagctttgtccattctaaccaagtcccagtccccatctggctcagtttctctgtactttaacctggttaatggaagaacagtggtgagaggtgccacagatgcctaccctctccagctagggaaggtctcacccattttgctaacccacctcagtgcctgagtcggggatgaagctcttgagagtgacagtcttcccaggwgcagggaaggctgcctctcggaggccctgcatgaacgggtagatgacagccatggagatctgatgtctcttctccacttcatccaggatctgcagggaaaagaaccacgggaggcacggctcaaagggacactaccaggcaggtggaagagactctacttgcccctgagcgtcataatgttctcatactggttcagctgatcctcatgtatcttctagggccctccacgaactggtcctctccctccctggcagaggctgggctcatgctaaataatctgcagtttatctcccacataagacctgccttcttccagcttcctttttattatctctctacacatccatattcttcccctctcctaacaccaacataaaagcacctccctgggaagtcatcccggagtaaactcatcacccatgatggtaccatgtccactcatgctggttggagcaggaggctagaaggctaagcctcttggtaccactctgtcctccaactcccactgtagattcccgargtcagagactgcctccatccctrggagcactgcacaaaggaatgctctgcccaagcaaaagctgacagagtttcctcccctcctcctccaaaggtcctgctggggtcagagcataatgaagtcctttctggtcaccagtggatggcatggcccccatggattctgctcaaattctgtctcagatgcactggcactcaaattagctccaagagaagtcctggggacctcaactgttcttctacccttgaaggagtcagaatgggtcttataactccttcatatttgtttagtgctctgccttttataaagagtcttctcatatatcacctcatttaagcctcacgccacccagtgagataggaaggtgagattattatatccattcgacggatgaggaaattgaaactcagggcagaagtttcttctgcttgtcctacttcaactactttcttacttggctagagtgggaacagtagctgtctctgcaagaggtccagtcccctagattcaatttccacttttcccttaagtcaagtgcatgcccctttgcctcagttttcccaagtgtgctttaatgctgactctggctatgggagaagagctccactaagagcttagttgcacaggcagggttggcagycagagacagcctggaatatgggcaggccctgaggaatcctatccctaccttggagaacaagccgaagcagccgatgcagctgatgatgcagtacactttgggaaggcgagggccagggccggyaggctggggagggacagagaggctccttcagtgctgcagcctccccaagggcttctcccaactgggtatgaaggagcacaaggctgagggctggggagggggatttatggggaatggtgggtgcagcagggaggtcagaatggccaccagcatcaaaagaagaaatccttgagggtactgggtgagttggtgggcaagcgctgccacctkcagtgccagcacaatctggggtcagcaaagaggggtagcaagtgtgccttagagatgaagaaatggctaaggaggaaagcactgtaaaggtgacttggggaatcctcctgagacctaagatttgaaactaattgtccaagtcccagcctctgctctgggaggctccaggggccaaggtaagcaggcctggatagagcaggcagggagaggagttagttgtattgaaagccagagagagcacagaccagagcctgaccagcagsgggagaaggggcatcaggtcctcgtgcttgtggggctgcagagggagcactagcatggcagcaggtcctgggctgtgctttttctacaaccagtgctgccaataagcccggagttttgcagctcaggcttgagcaagcccagccgtggagctgagcagactgcagaaaggaaggggcagttctgagctgcacagaccaagaggcgcctgcagtatccaatctttctgctcccatccacattggtcagaacgaaggagaaggtctccctaagaaagagcagacaaggcttgatttgtattgctcactgaatcctaaaacaggaaagyggtcagcactagagggtggagagragggcaaaggggagttgctgattaatcacaggagtaagggytcactggtgtcaggccctaaacacatcatctcatctaattgtcaaaacaactctttgaggtaggttcagtaattattcccactttaaagatgaaggaactgaggccagagggtgcttcttattcaaggtcactcaactcataaatagtgaagtcaaagctcaagcagtcaaattccagggctcatgctagaagggcctttgctacrtcgccttcttggaggctaactgctttctgctaagtccagcttgggccagtagcagagttaaaagcagcaactattgcttctaggacaggtgggagaatctggctctttggacagaagtgactgatcaaactgatagctcatattcttggccttgagggaccccaggccagatgttttcaaacaaatcaattacactcccaggccgaaaatcaacaaatgacagcagtgagggaggctacaggagcyacagaactcacacatgttccttctccccaaatccaatacccttgcccagggctgagcaattacctgggatactcggtgagtgatgcccactcattcccatctgggaagcagaacaaggggatagctttgagcarccgctcctcctcctcctgctgaccccgaagcaggttctcccgctataaggcaaaggaaaagacaagtggatgtgaagctgggggcagagatagcaggagacagcttcagagctggtgggcttcctttgaggctctaaagcagtctarggttaagcttctccactagcataggggcgaagggtgcctttgcccatgactctgcacagtttgcattctgggtccagttggaacaactccaaagctgaaacagcccctcctgggtcaactctacataagcttgagttcgacctcagtatcgagatctacatagaaaggggacagggccatgttgaatatagaaaggccctgaaatggcccaggcccctgggaggacaacatcagagaggtaccacatcagagaagagaagcggccagctcagttggcacacctgctaatgagaaggcttcccaaccctctacctggtgaaggatcagacaaggagtctaatgcttgggctcgggcagagggctgtgcctgcccaccagttacaaggctgccccactctttccttcccacacatcccagagaggggattcattctaggagttctggcagaaggtaagcttctctgcagagaagggtgactgaaaatgggatttggaagacctatcaggtcccctaaaaggcaaaatgtctagcctagtttccctgctaggaagcctaggtcagtccctcacaaagaagttagacctagattctgtgggtgataacagagaactggggctgtgctaagaaggaaatggagagcagtgagctcagagctcagggcagctccaggctcaagccccggtagggtagggagaaggaggtggaacccccacccctaccaccttccaaacaccccagtcctctggctggccctgcccctccttcagtccttaccttgggaaattggtaggtgattataggctcgtaatcatcctctgaacgcttctttttgagagaaaccacaagaaggtattcaaagaagtgctgccccccagcaaagttgggcaaagagtgctcctgggccctttctggttcctttaaagcttcccctgaattgtcctggggtggtcctgaaatcaagccagagcccatttagtataatctcattgatccattcctggagtggagtctgtgagaatccgggtgacctccacacctcaaggccgccttgccaatgctgagatacctggatactggccagaaccaccagtcactcaggatcagggccaaatgggcagtttccacacctgccctggtagacttgaaaccatggggagccaagcagaggaaagaaaccactgacacagaagccacggaaatgtgctggagaggccacatggaggccaaggccccagggtaccacmgagactgcctaacctgtcgggtgcttctggcagtcctggaacaatayggcctgagagtttagttcatactaagtgaataagaacaggctcaaagggcatgtgactgtgaccacactagccccasagagggcatgaccagctcttaaaaaccagcagaggaagcctcctgacccagtcacatggggaaccatgtggaggccgagatataaaggaagaggaggaaggagcatttcaaggaagaaacagtcccgcctaagagggtcaccctaaaaacaaggaagtaggcagtccagtcctgacctgctcggagttgaagcagtcggcgttggaagagcctgaacacccggcctaccacttgtccttccatctctgggccttcaggacagagcggactcccctctcccctaacacagacagactggtgacagtaagcctgagaaaggggctgcttcggtctccagccacaactctgtgaagccaagccacgcgctgtcttccagagagggaatagaagtttccatcctgtgcacccagtggttgagcaagaaggatgtgacgggacccaggaaggcagcagaagccagcaccaacagagtcagcatcctggcactgcagcgcagatctcagctcctcccaagagccccagggtgtggcgagagaaaaggtcatgagcaaacacctctggctgaaagtagccggaaaggcctggctacttatgggctaagggttttgaatctgggctgcagattgtgcagagagttaatttacaaccttagaacagtggacaatgcttgatagtgtcagactgtgggcactggaaaccggctggtctcaggatagggatcctatacctccaacacttggattgctgacctttcacttctcaacttggtcaacggaagtcaaaaaccccagcaaggccacctgctgaattctagaacttccaggacttcccgacctagagcacatggccaaacactttctgcagccaggatgtcactgccctcccctgattaagataaatagacttggcctaataattatccaaatagattaattcttccaacaaaagaaagagttctggaagtcaatacccaatagccttctttcctgatggtgcagtagagagcaaaatccatctctaagcccagagttcgtgatattttggaaatagctacaatggtgaatttcaccccctggagagttctgtcactggcacttgttccagggttccagcagagtccctcttctcaaataggaagcactggctcagaagactgtccccagcataaggtaggggactgattgcaccagcagcctgagggtgattccatggcagtggaaaacatctgggtgatctccacccaacccccacgcctgctcagccttcctccgggtcaggccaggtcagctgttctgcccaagctacaggcacagctgctagcccactgctgtgtctggagactaggtaagagagaaggaatagcaaaaaaatcaccttggattctcacagaaacccctgaatgagtaaatacagggaaggcttttaccaggaagctgcctcaaagggaaagcagggggcaaaagggtttgacgccagtgtttgccactcctgctaagaataagcacccctctggaagagagtggggtgctaggatagggaaaacagctgctttgctcctaagagctctagacctggcttctgtgggactagaaaaagccaggactcacggccaaactcmtgtacagtaaagaaagatgttcaaatgctgtaatgggtgagaagagcgaactagaacacttggagctggcamcacaccttacttgcaagctgcacagacttgttgcacaagccttaccacctgtttgaggaacaagcatcttcctgatacagatggggaaactgaggcataaagtaattcaaaggctattaaaattgacaggatttgttgggaatggggattaggaaagctccaaatccatgstcctgccttctggatgcatttgacatcaaataccccacagaggttttcaaaggacattgagaaacagaatcttatyactgatcattccagattctaatgaaattatgcctttccctaaatcctttgggctgcgttttcagatcattttcttctgctttatcaagcaagccaagagaatagcaaaattaataaatcattgacaaaagaaagtaattagacttttgggatgaggcccaagaaatgcagcaaaagactgttttctcccctctttcaaaaggtgttatccacaggagagaaaagcgtaagagaaaactaacctccatcaaactcatgtttcatataaggcatctcatttaatctccagtgccctagaaaggaattattattcagagttttagttgaggagggagccaccctttctagggaagtcaggaatctggttacacttgttcctccaccagaaagcctctcccacacacacctgactgaagtcccagatctgtctagaacataggtgaggggaccttctggaaccttgatctgggaagctggcccatcccttccagctcagctgctctcaacccaggaccaccaccacatcactccttgtcaccaggatacacacacacacacacacacacacacacacacacacactccctcctaatacacaactgtcctggggccagaaaggcaaaggargaagggggagaatccccaggcaagtggaggatggtatggaagatgaagagggcatatgctcctggccctacaagtgttaggcctcagttcttacagttcctcagtatcaggaagctcctccaggcacaatcaggaagtgcctggtgttggggcaggggtgggtgggaacaactggaatgtctcctctgggctgcagggggcagaccccttccattcacacagatgtcccagggtctgggaagaccaggacagaccaggccagtgctctccagagaagagagaatgtcagcctcatcctgccttctgctcccaccactgcacggtcccaggcctctgccccaaactgtggtctctgacctctccctgatggtgcagatggaatggccagatattggagatctgtgtctagagaggacactacaaagagggaaggagcagggtgtggcaggaggaatggcaacaggaggaagagcagatcactcagaggtcactgcagttcaaagaarggtgcactgacctcactccctgaggtccccccaactctggggcttgggctaagagaggggctcacttggcctcctrgcgtgccaatgttggaaagggcaggttgtctgggaatggcccctgctctttgctcctcagacagtaggacctctgggcaaagtatctaagggtcacggctgttcagccataggactggctagtggtaagccacacaaatatttgccgagtgaatgaataaatgaatgaatttctaactgccctccttccaaccccagggctctgctaagaaagaaaagaaggtgcttctttaacttagaagttgacttctaatttaatccccataatcctggacgggggaattatgtccatttcactgttgcggggctgagggaaagggaaggggtgccctgtctgggcgacacgctggaaagcagcagctgcgcaggttctaccgccgytccgctggaggccacactctgaagggcacctggccgagggtgggtgggggtggtaacgtcatcggggagacctgtgtttgtggccggtggctatctgckgggcaggggcaggggcgctggctccgaggaactgggcaaagaccacggaggactcccagggcggcgaggtggggcggggcggcgggcacgccgggagctgaggcagtgcctctgggaggacaccacaaccggggcgctttcaggcacactgcggttgcaccacaagcttcctggatggaaggacacgtggccccggggccccacaacggcttcctgtgtcccgccgcctccccctcgccccckcaggcctggcctcgccgtccccgcccccacctgaccctcttcccctctccgcgcgctccttcccgctcacctgcccccgcgcagcctcctgagtccccttccaactgctcccggatctcgacgccccgtgccgccctccaccgggccccagccgccagccctagccccggctccccggtgcccacgccgtccccccgcgctctccccggccggcactaacccccatggccgcgcttcagtctcaggctggctcgaaggcggcggccgagcccatccatggcccctggagtgcccggctcccgctcccagctccgcgctggccccgcccccctatccttgacctccgcgggtccgacactttcactttcacgcggggggaggcctaggggacaggttcggggcggcgcggcgcaccttccggactccggcccaacccccgggcgcacctgggygggcccgctctgccctcgccctgggcagggcagcgtggggtggaagagggcgctcgacgcgcgtccgggactgggcggcgccacctcgttcccaccctccgtggggctcccggggaggcttgacttagcgaacaccctgcagtccgcaaaagcgcatgtcctggctgaaatcaccgtcttccaggtggccccaaacgaatcccaaaaggggcagagttttcagtcctcacacctctccaacccctccacctctccctttgcaactgctttagcccttcgaccatctccaggtctcttgccctacttgtcctctcactctcggagttcctgaggaggaactggagatgcggattagggacctgtcgctgccttccattcaaacttggccttgagcagaccagcaaaatgggggtaacccctgccattccacagaaatgtgaaagttcaggaatagaaaactctttgtaggttgttacataatacaaatttaagggactgttattgtcataattgttgcagctgtcccctctccccttctaatcctgaatttcaatgcagcctttccgctcctcccttttcacatcttcattgacttccaaatacgtccaggctgtaaacttcaggtatcaaccatgacattgtgggtctgctcagcccacttcctcctgggagatctgccctagttccccgctccctctcaggacattatctgtagggctgggaagtgcagagtccatctggggttgcttggtttacaaggttttagggtccttttcaggagaggtaggcagagggaagaagggactctggcagaaatacgtctggaatctgttggcctgactcccagacctacagccctctttccatggcctccaggtgactctccagtcaccatgggagagccggaattgggaatccagccctagtattaactgtctggtcttagcccagaggttctaaaagttgactttactccggccgtatgcaattttgcacttaattacagtctgtttctgttccctattctttgtgtattccctcacacaagtacacttcccttccccaagtaccttttctgggctgaacccatgtcttatgcatctctgtgtaagaacagtcgttgctcatgataaacttgtccaattgattgaatattattgtgccttaacttccccgatctattttgtggtattcccaaccaaactaacttcctttctttaaaaacagatgaggaaaactgtgtacatgtgcaccaaaaagataagtacaagaatgttcaagggagtcttatttgaaacagactcacgctggaaataacctcaaatgtctattaatagtaaagtgagtaaatcgcagtatattcacataatgaagtactacatagcagtaaaaataaataaaccactgctgcatgcaataacatggctacattgcacaaacatcatgttgagaaaaggaagccagacacaaaagagtacattatgtaagagtccatttgtataaagtttaaaacaggtgaaattaatctatggtatgagaggtcagaatggtgttacctttagggaggaaggaggaaataatgattgggagaataccatagtgtttctaggatgctgataatgtcctgtttcttaaccaggtgatagatacatggatgtattcactatgtgatcgttctttgcagtgaacacttaagcacttctctatatgtatatgagactttaaaaagatttttaaagtattcgttaggatgttagggtgacattaatgaaggtaatgaaacaggaagaagttagttcagaataaaactagaaattattgggatgggaggaagtggagctaactaagtataatctgcatttttgagaagtgtggataataataggaacaagttaattgatccatagtggaaaatttgggtttaaagtgatgggttaagatggcgaagatgagagcatattatgggtatagcaatgagaattagcaagggtagacatttaaagtataagaaagagggtgtgcagatggagcagcgtctgagagaaggtggggggcaattagaagcttaggtagaagtttggctttaaatgggaaaaggaaacttttttttttttgagacagagtttcgttcttattgcccaggctggagtgcaatggcgtgatctcagctcactgcaaactccacctcgcgggttcaagcgattctcctgcctcagcctcctgagcagctgggattacaggcgagcaccaccacacccggctacttttgtatttttagtagagacagagacggggtttcaccatgttggtcaggctggtctcaaactcctgacctcaagtgatctgcctgcctcagcctcccaaagtgctgggattacaggcgtgagtcaccgcgtgtggccgggagaaggaaactttatctgagggaaaaaaaagatgaaaatggctatagatgttgataaatgtgtagataaggtagcaagaagttaaaggataccacaggaggcctcagtttctgctaagacaaaaggttctttttcttcttgtagctgccatcttccactgtcccctgggtcattctcctagtctggctgtagagtggaagtgaacgaccctagccttccttttttgaaggtcttgaaaggaagcacactaataagttgtattcaaggaggcagtcagtatgacataacagaatgagcctgggcatctgacacagacgaacttggacctgaacccactctgcctcttgtttgccctgtagccttgggttaggctttgcactgagcctcacttttctgatataataaaatcaccttgcagggcagttgtgaggattagaaagaatatatttgtaataaaaatgccaaacttcatacatacctttaatcctcaaatcactgtagtctcagctccatttcttttaattgcagaaagcactgtctattaccaggcttgtatctccaggaatttctgagaaacctcaagaaacacacactccaaagaccaattctgatattcactggtcattagggtccatcatgggaattcaaactattactttcccttccacagttatacccatttgtctgaagacatactgctattgttctcccctgtgccacactgcccaacttggacaatgattctatcttcaattccatatagagatagctgaggtcagaagaggttttgttaagacttagctgaaggtttgttaagactttgttttatgataagagaagcacgttataaaaggaaaacttaaacacaaagtatcaccactcttggggtctgtatgagggtcctctttggagtacttctctccctacccctagagctgcccccatcttgcagggatcagctaacctgactccagtgggaatgcccttgaacgcagccctgtctcagtattcgcatattcaagaatgactgacaagagcgatgtttattacattcacggggaaaccctgtcccatacttagaacctaatatcttttggcacagagataccagaacaacaacaaaaacaaaagcaacccatatttccccaagaataggcccatcaatacagaatgccaccatcaattggcctgcacaattcctcttcctttgagatgaacaaaagctcaagctgtctcaaactgtgtatactgcaagccatctgaaatttggcttctcatctcctgtgagaaatgagttgaataacctacccatcttccagaaacaagcaatgatatccaggattaggaaagaacatctgtatattagaaacaaagatagccttttctgttaccacaaagagttcctggagttaaaaagttctcaaatctctgtctcctataaagggtctctgctctatatttgatagccaaaatcttcttgtattctctttcttcccagtcttctaaagtgctaagttttcaatcccaacattttgtgtgtgttgatccctctgcttggaatcttcttcctcccactcctcactctactaacttctactcattctttatatcttgcttaaacgaacttttctgaaaagacttctttgaccacctcccctttccatctaaatcagatcctcctgttacaacctcaatcacaccgtttccttaggagcatttatagccatttgaagttacatatatgtatttctgagattatttgttcgactactctctccctttctagagtcatccccaggaggcatgagtcttatctctttcacttacttctgtgtccccatttcctaagcacagtgccaggcatacgttagataaacagtaaatatttgttgagtgaataaatgtatgaattaatagatgggtagtatgcagaaagcttctatctctaaggagacagaaaattaatttaaacatttttttattttctgggttctactcagggcaaacactttgggtgcctaagactcatttccccttttacccttgctggatatatggatatatttgctcagaggtatatcagatggtggaatctgatcgtggtagtcctggtctccttcccccaggttgactcatggtggccatgtgatccaggtgtggccagtgagaggtaaggaggtatctaatctagtaagggaggcaagaggcaatctcctagggacttctgggataggattctccagaagtgatgctgtttccctgcctctgggcatcactgggtttggatatgatgacaggaactggtgagatgaagccagcttgtatagcagaacagggacaacaggctctcagggtaatggggcaggagtcagggatggcatgtcaggcctgaagctgccttcactctgcactgcttgttacctgaggtaataactctccttatggtttaacacagtgagccttctaaatacattttacatggcatctcagtgccatgtaacatacacacatgtaatatacaaataaaagtttcacaaaacaataccattcctactatgtgcaaggtatgctgatatttctcctttttcttccattctactattgcgcttttaaaaccatccttgtttgaggcaccttaaaattatttcacccccaaaatgtgttgtgacccacagtttaaaacatctttgggttttctggtactttttctgcacactctgaagccagactatctgagttggtgtctcaggtctgccagttactagtttggttacgtcaggcaagtttcttaacctctttgtgattcagttttttcataactgatagaataataatggcatctaccttacagggttgttttaaggattaaatgagctaatatatctaaagcgcttggaatgggaagccattggcaagtctgaacacaagacttacatgatcctacaaagatgagtaaggcatggtccttgttctcacagagtttgcattcttgcaggaataatataatgcagagatactgggattaagataagcacgggtagttcaagatcatgaaggagaaacacgcattttagcttaagaaatcaagtctgatctccagtaggtaagtctgggagataaaatctcactcacttttttttgttaactaatagactagttttagatttacagaaaaatcgagcagaaagtacagagagtttgcacatatcccctcaccccacccccatatatagttttccctattattaacatcttgcattagtgtgggacatttgttacagttggtagaacaacattgatccactattaactgaagtccatcatttacattagggttcactctttgcttgtacattctatgggttttgacaagtgtacaatgacatgtattcaccattacagtattatgtggaatagtttcattgccctaaacatcctctgtgctcctcctattcacccctccttcccctgtcccactccaaaacactgatctttctaccgtctccatagttttgccttttccagaatgtcatatagttggaatcatacagcatgtagccttttcatcatacaatatgaagccttgcgtcttttaattagaaatgtgtatttatctttcaaaaccctc

SEQ ID NO: 98134 - DNA, 35138 bp, Homo sapiens
ccacctcacatccatgtttttgcatgttatttctttccttttattgattagcatttgattccatgaatatagcacaatgtatataaccactattcttttctggaaaacttatgtccaggttggggttattatgaataaggctatgaaatttcaggtacatgtctttgtgtgaatttctgttttcatttctcttaggtaaaaacatatcctatggaattgcagttaatttggtaattctagatttatagtttttaaaaaaaaaaaaaaaaaaaaccctgtcaatttttcagagtgactctatgactttaccaaccagaaatgtatacaaattccaatttcaagtcatgtttttaaaaaagacgatcaattgactatatgcatttgtctatttcaggactctattgtgctattggtctatttgtctatctatgttaatactatattatctcttttactgcaacattataatacatcttgaaaccaggtacagtaagtcctccacctgtttgaagattcctttggctattctaaatgctttgaatttccagattttagaaacaacttgtcaatttatttaaaatatactgttggaattttgcttggggttacaatgaattcataaaccaccaagcagaaattgaaaatcctaacaatattgagtcgtccaatatatttagtgacatatctttccatttatttaggtattttaaatttcttctcaacagtgttttgtaacttgtagtgtaaaggtcttacaggtcttacatgtgtgtcactgaatggttcctaagtatatggctgttttatgctattgtaaatatgttatgtttcattttccaattattcattaatatagaaatgcatattatcaattgtcaaattacttttttatatctgttgacaataatcacatggtttttctcattttgctatgtggtgaattatattgctgggttaagcctaacatatatacaaccttttacactgctaaattctatttctttttaagtattttttgcatccatattcacatgaaatactgatttttaaatttcttttattgtactattttgtcaagtcttgtagtgggattgatatggtttggatttgtgtccccatccaaatctcatgttcaattgtaatccccagtgttggaggctggtcctggtgggaggtgacttgttcacgggggtggatccttcacgactggtttaacaccattcctttggtgctgttcttgtgagagagttctcatgagatcttgtcgtttaagagtgtgcagcacatcccttctctctcttcctcctgctccagccatgtaacatgtaactgtttcccctccgccttccaccaggattgtaagtttcctgaagcttccccagaagcagaagccgctatgcttcctgtacagcctgcagcatcaggagccaattaaactccttttctttataaattgcccagtctgttatttctttatagcaatgtaagaatggattaatacaggggttatactggcctcataaattcaaaattgttttgttttctaatgtttgaaagaatctctgtagagtttaatattatctctaacctacacatttgatgtaattctccattggagcaatcaggagttggtgttttctttttggtaacatttatgtttaccaattcactttaataaatatggagcttttttcatattttgtatcctgcatcatttttgagaagtgtgtttcaaaaggcatttgtccatctaagttattcaattattggcataaagctgttcataacatgcaattatctttaatgttaatagactaatgtcctttctattctaaacattattaatttgtgtttcctctttttaatttgatcaggttgtttcctaggctgctataacatcgtaaactagatggcttgaaacgagagaaatttattctctcacagttgtgtagactagaagtctgaaatcaagcctccctctcaaggctctagagaaggggtcttctttgcctcttccttacttctggttgcaggcaatctttggcttaaagttggcatcactccaatgtctgcctttattttcacatggactttgtatctctgccaaggccttcttataaggaaactagtcattgaatttcgggataccctaacctagtatgatttcgtcataactaattacatctgcaaagaccctattttgaaataaggtcacatctgaagtttcaagtgaacacgaattttggagtgatattattcagcccagtatatgtcttaccaggtgtttatcaatcttatttcaaaaaactcactttcaacttgattttgtgtgtgaatttccatcaactttgaaaaagttcttagtaaatatctcttcaaatatttgttctgtatcattctttcaatcttccctttctgagactcaattacaaggatggtaagccatttcactttccttcaaatttcacacactctataattttactccccttttctttgcttttccatttgtatattttcaattgctttgtctttattgattttttctctgtgtacttagatcatattcatttctagatttctgtgttttgttgtttccatatttctgctgaaattctctatctcttcatgtatgttttccactttgttttactagatctttaggcacttttattgttatgatcaccctctgataatgcaaacatatggacaatttcaatttgcttctactgactgattcctctctggatcaaacttttttcctcctttgcatgtcttataatttttaactgtgtgctgtatattttttataaaaggacagtaagtatgaaaagaagtaatagttaacaccagaaaacagcatgctccttttgttaggttcagaatatgacactgaatcaatctgatgtacagttgagagcagctgggctttgttgcagctgtagtttgattcacttcctccctcctttcaattatatatataaaattgtattttatatatgtgtgttatatatatatacacacacacacacacacatatatgagacaagggctcactctgttgtccagactgcagtgcagtggtgtgatcacagtcctgggtgaagggatcctcctgcctcagcctcccaggcagctgggacaacatgcatacaccaccatgtcctgctaatttttagtatttttttttgtagagatgcaggtcttgctattttgcccaggctggtctctaactcctggcctcaagcgatcctcctgccttggcttcccaaagccctggaattacaggtatgagccactgtgactggccatttcaaatattttgagtgaacaaagtttccttttaacagaaatctggatatcagccctggtaagattctagtgtttctgtttttttgttttgttttgtttgcttttcagctaagctgccagttattgaaagaacagatttttctttgcactaatcacaatagcgtattttagaatttctggggcattttacttgtaatctgttgatgtccgtggctttctgtgcctcaggtgaactctcagtcatattatcattccctttggaggacacagttcttaaaccataatgcctcagaatgacttttcctttgtttcaggtctgttatttttcttagcttcccaataaatgaacacaccctttctaaaatcagcacactggttgtttaaaaccaagaaatattttcaacactagacttacaagggtactaataagccactatttactgaactttcattttccagcaagtctttactggacaatgaaagataaaagttatcttcctctttcacaaattcattgagcacttaaaatatatgacatcttactataaaatacaatataatcttagtaacttggatgaacgaatatcaagttcctaaattatattagatttcaggtttgattttctaaaatcttattaaaagtagactcgttcagggtccttctaccttgtgattccaccttttttttttttttttttttgagacggagtcttgctctgtcgcccaggctggaatgcaatggcacgatctcagttcactgcaacctccgcccccccgggttcaagtgattcttctgcctcagcctcctgagtagctgggattacaggcacacaccaccacgcctggctaatttttgtatttgtagtacagacagggtttcaccatgttggccagactggtcttgaattcctgacctcaggtgatctgcccacctcagcctaccaaagcgctgggactacaggtgtgagccactgtgcccggctgattccaccatctcttacaagcttgtaatcaatatccaattggtacaaagagaaaaaactgggagaaaacattatgaattctcaaaaccttaatataaaaatagcaaatacatccactccactttctaaaattcagttttgcatctacatctaactgcacatgaggctaggaaatatagtcttgcagtatacccaggacaaaaaggaaacagatttttcactatcggttcacagtatctgccaattttgttagcttaagacctcttactttaaaagttaaatattcaactcaaaaatgttgatggaattgaagagaaatgccttatctgttcaatcaagctattgtatctgacaatggaggcaaggtatattttgatggtatgattgtcttctgtcacttcagcattacagttagggatgaacacacattccaaattctcttataatccctccacaagcctacagcagtgtccgcttatcagtagggatatattccaagacctccagcggattatttgaaactacagatagtactaaaccctctatatactgtttttccctatacatacatatatacttatgataaagtttaatatatatatatctatgataaagtttaacatatacattagccatagtaagacgtgaacaacaataataaaatagaacaattataataatatgccagcatactacccttgtgcttttggggcattaaataaaatatgggctacttgaacacaaggactgagatactgcaacagtccatctgataactgagatggctacaaagtgactaatgaatgggtagtgtctacagcacagatatgcagaaaaaagagatgatttacatcctgggcaggagggcaacaagatttcatcacactactctgaagagcctataatttgaaaattatgaattgtttatttctgaaattatcttaatattttcagaccatggttgtctgcgaataactgaaaatgcagaaagctaagccatggataatgcaagccaactgtattaacatttttagcctatgttatttctaagggtaaaagttaactaatgggattcaaatattatgaaagtatttttttgtcttaaaataatttatttaatatgttggtatgtatcgctaagcctcgtgttctaggaatggacaaagtctatgtttttccctgagccactttccccatacaaattttataattttataaactttgactctgtcaatttccttctccccatactatcatgcttcataacttaaataatagtttccttgatacgggaatcaggactaaatgacattttgcaggtgtgttacaccgtgcttttcaaaggcatgatacttttttatggtttgtatccaaattatttctagcaatgtcagcatttagtcaatcaatgcttatggaaatgtctcccaggtttattgctgtttaatataggcatagtattttattccctttctgtcttattagtccagaagacttcagaaatattatttactgattcttgtatctagcaactaatttataattgaggtctccatcacataagcattatttcttgaattgctccaactgacagtttaaatgttttctccccaccttttcttctggccagggaaccatctcttctaaaaagataaaaacctgattaatcttcttcaaagattattctgcaaaccagttcatcactgggcactttccaaatgagcatttttttctttttaatttcagcagggatctgtaaactattctttacctgtacatacagagatccaaggagaaacaatccaatcatttgcatacccagaaaaaatgagaacactgtttttgtagatgcatgtatcacamttattttgcatgtagtttaattggattgccaattttgttctttagaatttgggctctacaaaggttacatcctattaaaaaggctcaatatttacctgttcaagactacttttacatgtaattataacttgccataaatgaaaatctaagaagctcttgagtatggttatgacttttattaatcatatctgctgttattcccaamcttctcaatgttacatgaatactaacccttgttttatataaaatatgactaaagtaaatttacctacaggtgcctctctccttcattggtgattaaaatttcacgccagagactaaacttcatgaaactactgcaagcatgtgtatgatagaccaattagcttagtatctggcattgtggccagaaaaaaaaaaatcgttacctacaaaatctcttgggcaacacttaagccatggaagagcccacatgaatccaggtctactttcctttacaggtagattccagaacaacaacaaaaaatgtaagactacaagaaatgatttaatatgataaaactcccatttcaaaacccagttctaaaggatttactgactaatgctgattatttagtcatggaaaatgtctctcataaaagtgctcctaacaaaacatgatctacaataatttataaaatgtgaagggttgggatgtgcagactgattggtgcacgtcaggttgtttctcttaaataaggtataaaaaactatgatatcatagtctttygactttattttctgagataaaaaagtataggcataggtgtttttaatagtcttcttgatgatatcctttagaataatctatcaaatggcttctttcatgtttcctgattatcagcattcatcagtgttactgtcagccttgattaagtggttgaaaatttcagagaagaataagcaacttctgtgaacctttccccaatccctgagaatcataatcattacagaaatattttatcctttcatcaaatatctctggaaagtagccgtgttcgttcattgttaatagggcaaggtgcagtgtcatagagggttaatccatgtaaattggcttccacccgtaaagaaattttctggaacagaaaagaaaattatatatagaagtttgctccttaaagagagatcactccttcaatatgttctataggctaccttgtgattatgaatgtaaatcaattctaatggtagtgagacagctgttttactgtcaaaggtatcctctttgtaccaattaaaatctggaaaaaccaagcttctcaattcataaagttccctgtttttctttggtttctactaagaatcagtaaaactaaatgttgagaatgacctatgtaaaagtacacagaatcgataacaaattctatgtaagaatttctgaaatttattttatagccccattttcaaggctaaatcttgctagcaatacactacttctttaaacacagaaacaattcacctgaaaagttacatcacttgtttatgataccaaatcacaaacagttaattttcaaaaaggcgggagagttgcctatggaaagttctcttagtctaccttcctggactaagagaaggaagtctgactgaataaatctaataytgtgccttcttacctgaaaatcacgaatgtaagtcaggaaaaaaccaaagaaggaaaatgacatagaccattctgctgcagtagtgatcatgtgaagcacataaccctgagtgaygggaaaaaaagaatagttttgtgaaatttcatttaaacgatctatatactatgtttcaaataaaaaacacacaattcttataaaataatggagcttctgaaaatcaacccttgacttaccaggcatataatatctctagaattaaagagccagcattaggaaatcctcctaaatgacactctatttgtttcactgggagcgaataaaatttccaattaaatagctaagatagaacaggatcatttttactctacaatcgagaaattactattgccttacccaaagccataagattcataatatgcaactaagaaaagtttaacaatgctcagaataaacttagtaagtgctgtgtttacgatattaaataatatatgggttacaattgggaaaatctagtaaattatttcattcattcattttcacaaacatgcccaatttggggctaattcttatataaaacaccaccaagtggtttgtgaaaacagatgaactcattttattctttagtatatgttcctcttcctctattctcagagtcccagatgttatatctacattcagatatccactatattgaatcctaaatgcagagtccataatcaatttccagataacaaaaagtgggagaagatgtcttttcaattcagaaaacaagtattcaaaacataaatgatctcggttggctatattatatactatacccayatttaggggagtcaatttctcagaaaactcttctgccatcgcaatgctcttcatattttgacaatatctacagatcacaggtgacaggagaatatggaaggttctacataaaccctaccatatcaagaaaataattttaatacagaactgattattctaccagaagactttcattgttactgatgaaatgaaaaacatatcaagatcaatcaaaataaccatctttaatataaaactaagtttatagactgtaagttcttactttgtcctcggggttccaatggagtttctgttctaaatcagtcccaaaattgccactgtgcaaaactgatgagcaagtcagcactataaaaacataagtcaaggaagaatctcagagacgatctcagagaacaaaaatcactttacagtctaaaaggattactcacacatttattgctaaggtctaaacccattttcttaaagacttaatgttacacagcagtgrtactgtaaaactaaaaatgtgctgctcagagggtcacaacaaaatggttctcacagtcaaaccccacctctttgctcagaaaattagcagttctatcataatctttaactagataatggttctcagaaagggcatttactcatccctcatttctttgaagtgagtatgatcaggctcaacatttttgttcctagctcaattactgaggcactatgtacaatctgaattycatatttcaaattctttagtttaggattgtgaacctaagaatctctcctacaaaaaaaaaaaaaaaaaaaaaaaaaaaaragacaaaaaggcttcttatactgcaccaatagtgtttacttaaatcttgtcattcaattcctttccaagtgtagccacattgtacagtgaaggatactgctaagtgcacttactccacaccagataaccaacaacagtctgatccagaagacttgtttgccatggattttgggctgcatttggtaggaaaggatggtctgaacaaacatatataatgagcccataccaaaggtaagcacagctccacttacatgtgcagcaaaaagggttgttttctgagagatagagagaagaaatacgtcaataaaagaaactcagaacacattggcaacacaacatttaaaagcacaacccagagatttcaataggacattcactgagtagagaagctcggccaattctacaaacaaattactttctgaagtaattttctctcataatactcagyttaaacctaaggattatagtaataccaaactatttcatatacctccactgaaaatataataggaattattcatttattattttcttcatttaataatatgtttacttggtgcctattaggtgctaggcactgttctaaatcttcagatccattagagaacaaaacaggcaaaaatccagctctgagtttagtaaaggtacataaacaataaatataaacttcagaaataaggaaattccagtgtgtctgatggtgaaaagggtcataggaaaagcatagtgcaataagaaaagattaggatggactgcagtgctgggaatagggagtttccatttaaattcaatttaactrtaaataaaatttaaagactcaagaaattaaaatattctcccttggctctagcttgattggttatatatagttacactgctataagccaaggaacaccaaggattactggtaatcaccagaagccaggaacagattctccctctgagcctccaataagagaatcaaccctaccaacaccctgatttcagacttctggcctcccgaactttgacagaataaatttctattcagtcacccagtttgatattttattatggcagcactagaaaattaatacagatttctgcttactaaagttttactactctcctttgataaatttcgtatgaagaaaaaaattcctctaagtaggtagtgaagacacttaccatgtagttatttttctgaacaacatatacaaatttgttttaaaagaaattcaatttttattttttaagttagatttttcaaataccatcttatagcaattattaggcatctctttaaatgcaggcaaccacagcrataagagaattttttccaatcctgcatagtccctttaacctctctcaataagttactaaataattaatgaaagcatgtttgtcttaagtactaagctaggtgctggagatacaatggtgaacgtttcgaaaccattgtgcttataattaataaagaaatacatcaactaaaaaataaaaataataaatttacaaccatggatataaagggcgttatggcctaccaaacagaggaaacagtatgtgagaggaaattaaataagcttgtcctatttaaggagcacaaaaaggctagtgatatatataatggagayattaagaagggggacaatgcaaaattaggcttgaaaggtagacatcagccagattatacaagatctttgagttagttaggcagtttggtggtttagcaaattatttttttctctcttgaattgtatctcttttcacataatttttaaacctgtagaactttaagcaaggacacagggatgcaaaatgagatgtatatacgtttccaaaagatcacttttactgcaatatgaagaaatgattcaaggaatgtaagagtgaatgcacaggaaccattgaggaggctatggcagtagttcagatgagagatgatgaaatctaagctagttgagaagaagacagtaaggagggaagtaaagacagaaatggaaagaagtgaatgtcttcaaaaaatattcaagaagtaaaaccawtaagtcctgactccatttaaaacacagtgctagcctctcttccaagccaatacctgcaagggtaaaaccatttatagacctggttttgtaaaatttttcccgtataaatcacctagagtttgtctccataaaagaaaagggggaagtggaggaggaagcagtgcactcaccactttaattaagtagtaaacgtttactctggaaaggaaggagatcctcattagtatagcagtgggtaaaaaaaaaaaaaaaagaaaggaaagagaattgtttgatatttgggtaatgctacaaggtctggttataaacagggcccagcaataaagccgtcagtgaaagatgaagagggcatctaaagttgcatgaagagatgttaacaaaagagaaaaagtaatttagtcaaaattacacggccataagtactcttgtgaaggtaaattagaataaaagctaaaagcaaaacaataaagaaagtatataggctaccttaagtaattgagataaaagtggaaaggcggcttgtgtgggtgctatcaagaactgctattggaatttgctgggctgtgtaaacaaatactggagattcatgtttaccataaaagtgatgagaaacattgttaaattgaccaagagacagacaatcaccatcctcacactgaaattctccaaaacattttttaataatgagctacagaaactgattagggaaggcagaactctatttgtggcacagacagctagctagttgtccacccaaattgttgttatcctttcatagtayaaagtggctgctgggaactaatgtccagcaaaactaaattttctccagggtccattttttctgacctgtgcacacccgctgcacccccatatctagcaaacatgaatgtcagtggaattacatgagttactgtcaggtgacaaaaattctgtccttcaccaaacccagctcaggttcctctgaactttcttgtcaactaggtcctgacttctgggttgccatgttcatctctgcattgtccaattttagcaagaatcttgttcagtttagccgtaatcatccattctcagtatctgatcaccataaatatatcacctctaccatccctcaagtgatgtctaatcaccctggcctgccttcaccaagaatcctattaggtcagtgctatggttttgactatttgacccctccaaatctcaagttgcaatttgatccycaatgttggaaatggggcctaatggcaggtgtctgggtcacaggggtggatccctcatgaatagactgatgtggggggttgggggtggtgaatgagttctcactctattcattcctgtgagagctggttgttaaaaagagactggcaccaccacccccttgcttcctcccttgccatgtgagctctgcacacaccagctcctgctttgctttccatcatgtgtaagcttcttgaagtcctcatcataaccagatgctggcatcatgcttcttgtacaacctgcagaactatgagccaaataaaccccttttcctataaatcaccctgcctgaagtattcttttatagcacacaaaacaaaccaaggcagtttaaccagaatcccttcttaacccttacgtttccagcttagtaattttccatccactaaccactacaccctgctccacagctatgaattcccacttttacttgtattcagagttgagcccaatgtttctttcctactgctctctctgtggagaattgaaaaatatttgataaaggttgaccactactttaacattaagtatttgacattatttttcctgagaaaaagctagaagacctacagttcttcctttcatttcctcatatacaaggcaggacacctaggaatgcaggcaatcaatgaaaacatccaaacaagtagataaaataggtaaatgattataaattgttaggcatattaaaaacaaaacttttaaaatctgtaattgtgtcacttctaatttatatcaattttgtttcagtagtgagttgaagtaatctccaactaagtagtaatgaagactcyaataattgtcctgtggatcctaaaaaagttaaaataatttgtatttgttcagacttttaaatatgaatttttctagttgtgcaagtagctatttctaatagggtcaaataatttaaaggaagtgatttctattttgctaaggtaaagaaataacaacagcatgtaactgaatgcttcaggtttcccttttaatatatatatttatgtacttaaggaaaatacctatgctgggctaaaacacaaacctggaagtttgccacaatagaaagtcctaaacaactcagtattccaagtacaaggccagccttgtttaatttgatgataacgttctcttcaggactcagagcatgaacttgcttataacgaacataaatggtagcaatgcctgggaaaagataatccaaaaaacaacaaagtaataaataatcaagaaataaagttgccaatgaagagttcacaaaggtcactgctatccagaatcacagattttccttttaaaattaatcagagagaataaaaagaaaaaaaaaamcaaaatagctgtagttttgtttttgcttttaaaaaatggggtctctctatgttgcacaggctggactccaactcctgacctcaagtgatccattrgcctcagcctcccagatagctgggactgtaggcacatacctgtgtgcctggctcatgctgtggatgttggagaaccttaaggttgtattatggaactactgatscctccagtgactaagcaaatcatttgccttccatgggtctcatatttacaaacagttatataaaacacaaaatgtttttatgattagcatcagaatcagcactagttatagaatatagataaaatgggcgtaggcaaaaaacccaaaagcttatttgtgtcactctcatatcattttatttcaaattacaacttggctcagtaagacatagtagccaattacacagggggaaaagcccaccttaccatatttatcagtcaagaactagctaaatcaaattttccactgcagaaatattgccagacaattcaacagtgtagaaagcawtacaagagatatgcttgtaaagacatgtttctgaagagtttggtcatgaaatgaacttctttaagttgaattatcttcctgatttctatttttgacctaagcaaataataaacatacagaagaatgcaaatatttaaaacaatcacacttgatggaaaaatattatgtgagtaaaccattaataaaaatttggttcaaaataaacagggatatgaaatacttcagtagcaactctatccctttagcattagaatgttgctcaaaaatcaaaacatggttccatctttattctcaaacatctaaactgtttatcccaaaggaatttagttaggattagcggtggtcagctgcatccacaactctttgttccttactggttgcttaagaagtccactacagtcctcaaggaatatytggttagacttaacaacttccatttgaatgaatagtagaataatccgacacatwtttttttaaaggtttattcccataagtccgcatttctagaaaagtgtttttcttttaaaaggagcataattatgatcaattatttagtgataacatactctcaagtataactagaaagtaaaacaagtaacactccagtgttgaaagaagaaaatactgtagcaatttggctattatcatgttaaaatcactttcattacttacataaaactgccgcaatatttagcattgccccaaataagcatttttctggagctactgtaccagtgtcactgaaagaaaaaaaggaaggtatgtggatttctcatactagataaacacatatatttcttctaagggataagaatatcaggagttaattcaaacctcttatcttttataaatccatgagttcaactcatatcattttatacagagaacatgacaatttgagttcacaaatatctgcctacttcaccttttactcacatcattttaagattatttctcttccacatagtagaaatcaatatatattgatttttaaaaagctgtccttggtatgttaagactatgttattgacctaccatcattcaggcagatggatttatctgtcccaccagaatattccctaaacaccacaggcttttcacaactctgcctttttgcaccttttgttgactatgtctgtattcaattaacgcctattcacctactgatcaatttttaaaagtattatcaagcacttaccatgtgccagacaccatttcagaaacgggaacacagtgataagtaaaatagacaaagcccctgccctcgcggagcttacattcaagacagttttgagtctcttcctctctataaccttggataactcctctagcagatagtgactcacatagcatgctttctgaacttctataaactcacttaccacacagcattgcaatgtatccacctgcatgcctgtctttcagggcagtatgcaacacaccggggcagattaaaaccccaccatttacttactgcaggaccttaggttcatccttttatctccctaaaactgttcccttaatttgcaaaatggagctattcattccctcccagctcatcatatcactgtaaggatgaaatgtaatggtaatgcatgttaagtatctagcacagtagcaggctaatgggagatacccattaaatattagttctttccccttcttaaaactactacaaagattaaaaagacagtgtctttggccttgaattgacatactacaggaaagagataattagggtctcaactaagacaawgcatggggataaaaaagaagtagaaagttatagctggtaagaatccataacatatagtaaacatttagattaggggtgttaggaaatggaaagtattaaacatgaattgtaaggattgctccttctaactttccaattccatgagtctttctcttaaaaaaaaaaaatctgcagtgaaaatagagaaacaaaaaataatgtatttgtaaagaaacaattataaaataataaatttatcttttacatacaaaagattttggtactctttgaccatcttcaggaggagggaataaagggttttttgttcctgctacttttcaaattttccacaatgtatatgtattattcttagaaaaatccataattttcatagctatacttcaaatgatacatgtaagttaacaaaggcatgcatttccaagatggttggctaagagtgttccttcctttggctcaggagagaatgacatacactggcctacaaatgaaaacagccatgcccatcacctcattatcatagcacttcatctcagtggtcacagcatcaccaaaaaatatctgatcatctaacatcaaaatatatgttatcattattctgtacgttaaatattggcaaagtttaaatgtttttagattaaaaatatacatagatgttgtaatatttcttctcttaccccagtggctagtcactcccttgggcatccactacttgaaccaactaagagaacacctgaagcacacttatagcaaaattgtctttgaagtgaaatttacatttggttatgtccactggggctgttaacagctaaaccattttcttcgtttcttttttttttttttttttttttgacagagtctcgctctgttgcccaggctaacagctaaaccttttggataggatctaggaactgaaaagaattttgcagacttgctagtttaacttaatcattttgcagatgaaggaaatgagcctacaagaaataaaaataagtactagagtttaaatatgtatgtcagaatgttggagaaagacctcagggtaatactaagttcattagcagaaaaatcaaaaagcagaagaggcagaacagaaaaggaagtgtctagggtgctttttaaagaaaatcacatgcagtaccaccaaggaagtgaaactcagaaaaagaactaagtggcctcttatattacagtagtccctcggtatctgtgggggactggttccaggacctccatcagataacaaaacctggggatgcccaagtctcttaacataaaatggtgtagtatttgcatataacctatgcacattttccaatatgctttaaatcatctctagattacttataatatctaatacacatcacttcattcctgtggattcaacgaagtacttggcacctggcaaactcaagttttggaacttgatggaatttctttccccagaacattttcaatctgtggttgattggatgtatagaagtggaacccatgaatatagggggctggctgtattaaaagtttttcaaaacgaaagcagacaagttctcagatggagaaaaaaartactgtgaaagaccctcatgaatcttaaatatgtaccttccggagttactaaagaatggtgtggctccttaggctacatattccactagcagagtggtaattatttatcaaattatttctcgaattggaaccttaaattctaaaacatttttgggttctgtaaatcttcccaaactgcatccaatttgtttatatcttttgtgccacgccatamcactgtggaaacaacatgtagatagtaatgcccagatcttttcttgacatttttaaaagataaatttaatcttccmatttatcattctttaaaagattactattttctgtgttggaaaggttatttttctgaaggtaaacaaatgaataaatgaaacaaccacaacagcaacaaaacaaaaaatattactcaacaatagcaacaaaatttggcatctctgtgaagagacagatgtttcaaaagcatcatatagaggctgaatactttcaggggtggacctaactatattccaggtgaaatcatctagattaaaacactagtagttgcttaatcatatttaataataacgttttaataattatgtttccttcatctccctgccctatgtaatttatttaacttttatagagaagtttaagtctcaatagctcagaaaccattcatataattatgatttcctcatatcctttttgtgaatgcataaactgatgcaacaattctaaagatacatttggaaatgtcaaatgaaaaatgtagatgccctattacctatctagcaatctcacttctagaaatctacctcatatcaacatcagtatgtaaagttgtatgtaatgaaaccttcattatagtactgtttgtaacagccaaaaaaaagggaaggaagaataagtaagcaatttctttatcaacatcctatcactttttataaatgaaacaaaataaaaaacccaaaaaagtgagaaagaacgagaaaaaaagagaaagagttttgtacatacatgataacaagataaaccaaactctggaaggaaatctaccaaactatgaattgtctctagggtgtagaaactggaaggtgtcaggaagggatttttgcttttcatttttataatcactctagtattgtttaaaatttgttgtaataattacgttttgctattgcaattttaaaaaaagagggttattatagcttcttggccttttggctaagatcaagtgtaaaaaaagagggttatgaacatagtatatgcaactgactacccattcttcattcgttgtgagatttcaaaaatgttatcaataaattttgatacttaatacgtcaaaaatatctaggcagcataaaaagtaagagcctagcttctagagtcaaactgtccaggtttaattcttggttccaacactgagttatttgcccatgagcaaataacttgacctccctggacctcatttccttctctctcaaatgaggatcatagtttctaccttatccagttgttgtaaggattcaactatttaggacatgaagaatgcttagtaaattactttctacgaggctgggcacagtggctcacgcctgtaattccagcactttgggaggccaaggcgggcagatcacgaggtcagaagttcaagactagcctcaccaacatggtgaaaccccatctctactaaaaatacaaaaattaggcgtggtggtgtgcgcctgtaattctagtgactcaggaggctgaggcaggagaatcrcttgaacctgggaggcggaagttgcagtgagccgagattgtgccactgcactccagcctgggcgatagagtgagattccatctcaaaaaaaaaaaaaagtttgggtgcagtggctcacrcctgttaattccagcactttgggaggctgaggtgggcagatcacaaagtcaggagttcaagagcagcctgaccaacatggtgaaaccccatctctactaaaaatgcaaaaaaaaaaaaagaaatcagctgggcgtagtgatgcacgcctgtaatcccagctactcggcaggctgaggcagaagaatcgcttgaactcgggaggcggaggttgcagtgaggtgagctgagatcatgccactgcactccagcctgggtgacagagctagactccatctccaaaaaaaaaaagaaaattacttcgtacgcagtaagcatattaagacatgtttgtcatttccattatcttttcatatcattattattgtttgtagcatttattttttaattttaagcggcgaataattccaattctatattctgaaacaacttcaaatacttacttagaaaacaaggcactaaagagtcacagttcaagaaccagttcacaaactsaatcttattgggctgtctctacatttctctatcacaaagaaaaagccaaattcaagttcctttttatattccctttattgttgtaatgccaatgtaaaatctgatttttaaaaggttgacattaaatgttgacttcaatgttaaaataagaatgagacataaagagtctcctatacaaagaatacatttcacttacctgatataaggtaaagccgggtctatatggtggagtgttactgcagtaatgtatgaaaatatgaaagcagcagatgtccaaattacaagggctgaaggaaggaaactgaggccttgctgaaaccaccacatttctaacaggttttctgaaatagagaaaacatattagaaaagataattcacaagagtttcctcatcctactttagccatccatgcccacagccttgtacttaccaccccaagctgtttcacctctgaaatcatccctcatgccataccccaatactcgctctccttccctttcttagtgagcgcaaccaagattcacccacgtgacagagctagaaacttgctttcttgtcccatcttcccatggaaagtaccaagtactgtttatactacctcccaaatttatttcaaatctaccctttttctccatcttcactgtcactactttacccaaaccaccatcatctcttggtcaattataacttcctaaggggtacctgtgatattgtgaaatacatatgtatttggtcttcatcccatttcctggcaaaaagctcttaaaacgcttggaatctccagggtaataggagtgtcttttatatgctaataaggcttgcagtccatatagttttaggatgggagctggtcacaggaaagaccaaggcataattagagggttggacgttcagtcctccatccccaattccaggaaggcagagagagaggatgaaacttaagttgatcatgcctgtgtaatgaggcacccataaaaacccaaatggactgggttcagagagcttctagatagccaaacatgcggaggttcctgaaggatggcatacccagagagggcacagaagctccgtgcccctttccatatcccttgccttatgcatctggtaaatataagcatttccctgagttctgtgagccactctagcaaattaatcaaacacaaggatggggtagtgagaaccttagtttatagccagtcagttagaaacatgggtaagacaaccccagctggtgattggtgtcagaagttgggaggtagtctagtgggactgagccctcaaccagtgcgatctgatgctatctctaggtagataccatcagaattgaattaggggatatccaattggtgtcagctggtggagagaaatctccatacttcttgatgatcagagaagtattgtgttgattattgagtgagagaacaggaaaaacactttgggtggtttttcttcctctttttttttttttttttgagacaaggcctcactctgttgcccaggctggagtgcagtggtgcaatcacagctaacagcagccttgacctccctggctcaagtgatcctcccacctcagcctcccaagtagctgggaccacaagtaacgcaccaccatgcccagctaactttattatttgtagagatgaggtctcattatgttgcccaggctggtatcaaactcctgggctcaagaaatcctcccacttcagcctcccaaattgctggaattataggtatgagccacccagccagcctagtttttctattattactcaatcctcctccagtcttgaccaaaccaatctagactccactctaaaaccaaagtaatccttctaacttcaaaataccaatctgatccccttattctcctacaatggtttcccctatacccttagtctttgctccttaacgtggtccataaggtccttgcattgtcttgtctttacttaccttttttttttttttttttgagacagagtgtcactgtgacacccaggctggactgcagtggcacaatctcggctcgctgcaacctcagcctcccaggttcaagagattctcctgcctcagcctcctgagtagctgggattacaggcatctgccaccacgtccggctaatctttgtatttttagtagagatgggatttcaccacgttggccaggctggtctcgaattcctcacctcaagtgatccacctgccttggcctcccaaagtgctgggattataggcgtgagctaccatgcccggtctgtctttacttatctttctatattcacctctgggccatgcttggttctcaattctttgctctagctatcattatctcatcattacaaaagcaaacacctagcatttactatgccttagcagtgtttactaaacaccttaaatacatgaaataatgtactttcctcaacagaattagaggttaagacaattgcccaaggtcatagagctggatgtggtggagatacgattcaaactcaagcaatttgattctagtgcccaatcaactatgccacagtgccagagcatatttcttatagatcttcaaatgtgtcatgctctctagcacaccttcagacattcatggtgactagaacactacctacccagttaacttttatgtttttcaaggctcaatctttccagcttcagytgagtgtccctgctttgtttttaacagcaccctttacttccccaaccagggcactcattacatttaacttgcttgtttggttttctcwtcctcactaaactttaagttctgtgagaacaggaaacaactgttctgttcactattatatttccagctcctacattggggcagcaggagcaggggcggagacagagggcctaaatacactcataccccacatcaccactttcttccttgaattccagattaaggatgttgttaagtaataatgagtcaataatgtgaattaagaaacattggtacaaattcatgcttttaatttttttaatttttaaaaatatargaatacttttaaattagaatactcctatgaatgtgagaataatttcatgtttgaaggagtatcttctcrtatttttttgatgacctaaagaaatttagtgttttccatgaactttgtgaatacttacagcttcctcatctgagactgactttccaaagaatgaaatctcagccattttttattggtatttgtcrtttactctggccatctgatttgttgctaaatatacacatttgcatttcataatcttctcttttctcttcctttttccttgtcagtccttaacatyccatcaatatcttttttcttcatctattcagttaatcatgacaagtccttgccaaatcctattggtgctttccccagcataggtttccaggacaagagttcttaatttacataattttgaatcatttctaagatctttaattttttcatttttcatctctttaaaygttaatttgtttctgatcattcctataagtccttaggagtctatgtcagtttagctgtcccttacacatatgttttacagtttttgactctgagcctatattggacaatcttaaaatctgggagtattttaaaaggcttaactaagggtgagtcattacagagaggatccgtatttgttttttccagacagtatggcacattaccaacccgggccaactttatgttaatttcttggcttctggttttttagatcatgtagatatgtaaatttgaaccttgaatgagtgatggcagaccctccagtttcaagttttcaggtggtatctttattcccccacctggagctgtgatgaaaaggaacaaatttctctgtgatctccctttgccaggagggagacatttttctggcccacctatgactgactgtgtagacttttgtgggtcctggctgaatgtggggcaaggtgcttctccaataccatgagttgtacaatttcaagtggaaatacttaaactttattctatgaaaacatcaccccctgaaacacaggtaccatttacctcaactaccatggaatggcacccattgacattgaagcatgtgcctgggaggttacagggatatgaattctatctctctgctttgggtagagagcagcctgtcacctgtccctgattgtgctctacttctgctatcagccaaatgcccccaaaggaaacacactgctagtatactactctagtttcagcytttttattgttgttgtttaactttttagccctggagatttccctgtctttcgtagaagacctgtcatgaatttaatgagctaatgtaatttattcagcatttaggtgtattggtaaaagagattttcaaatattttgtccacctcattgctagtagcaaaacctcctccccctttgttttacatgtctaaatccttctttttcttcaaaagctcaaatgctatcttccacagataactttacctaagccctttgtatgtagaaataagcacccctttctctgagaacacttgactttcacatcttttagagctcattgtctctacagtatgaaaattgaggacggtgtctttagggaataagatccttccacttctctacctaagcatagcagaggaccttacccatagtaatcactcaattatttgttgaatgaacagccaragcaaaatccttttatttcccaaaactattcatgatttttctatttcagtaaacaacattaccatttttttcaggttatgaggattctaagacttcagaggaatcttaggttctctcttataaagtcctcacatgctgtcaccaagtgatggcaattctatttctacaagtcatttaaaccattcttcttcccagttcacactgtaaccatgtgattctgactttcaattctcttggcctatctgcttttccttccccttcacccattccacctgcattacctaattaacattcctaaagtattcctctgctcaaaactttttttttaataaaattgtgtgaacttcagcaagcttcataacttctctgaaccagtttctcctttgaaaaatggaataatgtgaggctggrtgcggtggctcaggcctgtaatccagcactttgggaggccgaggcaggcggatcacgaggtcaggagttctgagaccagcctggccagcacggtgaaacccagtctctactaaaaatacaaaaattagccaggcatggtggcgtgcgcctgtaattccagctactcgggaggttgaagtaggagaatggaggctgaggtaggagaatcgcttgacccagggaggcagaggttgcaatgagctgagattgtgccactgcactccagcctgggcaacagagcaagactccatctcaaaaacaaaaaaacaaaaaaaaacaaagaaaaatggaataatgttatcaacacagattgtaccatctgctatagcaaccactgctacatgtaactatttaaattaaaatctcgatagattaaaattaaataaaatttttaattcctcagtcacactacccacatttcaaatgctcaaaagccacgtgtcaccatcctggccaacacggtgaaaccccgtttctactagaaatacaaaaaattagccgggggtgatggcaggcgcctgtagtctcagctacttgggaggctgaggcagaagaatcacttgaatctgggaggcggaggttgcagtgagctgagatcgtgccactgcactccagtaaaaatttagaacatttccatgattggccgggcacggtggctcgcgcctgtaatcctagcactttgggaggtcgaggcaggcggatcacgaggtcaggagatcgagaccatcctggctaacacggtgaaaccccgtctctactaaaaatacaaaaaattagccgggcgaggtggtgggcgcctgtagtcccagctactcgggacgctgaggcaggagaatggtgtgaaccccggggggcggagcctgcagtgagccgagatcgcgccactgcactccaacctgggcgacagcgagattccatctcaaaaaaaaaaaaaaaaaaaaaaatttccatgattgtggaaaagttctattggactgtgctgagtagtctttgtayagcttatactgatagcacaagcaaagaacctaacagattgctggtgcataataaatggtagcttttagtattatctgttaaatagtataaaataatacccatttcatagaggtttattcaaggattaaataagatacttattttcagagatgatcagtatgtacttgttcctcttataatgtgaaaaatgaattacctgttttacaacttcacaaaatgttagtcttcagacctgctcatacctgcaccttttgtaaatcctaaaaycgacacaaagaaaataagaagtttttctctcaatccacacaattttaaacatgtacagttttaagtcaacacgccaatattgttcatgggcagaatactaggctacagcattgttaacaggttatttttctttgatgagttgacacttgagttttttacaatgatgttgtaccatctggaattaaataatgttttaattccaggatataaattttcatatgcattctcacatccaacaccttcactatcttaaagaggaaaaaagaaatatcattgcrtcttctcctatagagagacatgaggaaaaaaataatagattattaagcaaaataaagcaattgcaagtccatgtgatgtaaagaacacagctgtgagatgagatatctctaaacacaagtcctacctttactactacccaactctatgatttcaggcaatttacttagcttctgagttacagtactcaaacagttgttccttggagtggagtagaataagcatacaatataataatgatagctgatttattaattatgtagtcataaggccacaggtatggagtacaactttatgtatgatttttttctatgtacgaattatcttggattcgtatctccttaggctttgagagtcccagttgtttaaactgacagtttatagaagcagggcttgaaatggtttaccagtttgcgaatgacaactgaggaatttaaatgcatggactaggtgaggaagactaattgtcaatgtgtttttgcctttgaaacctgaaagcattgctgagtaattgccaaacmaacaaaattagaatttcaatgattcataattcaaaaagcctttcaaaataattgagagtatgcaggaataaatttcacagggcagtaagaatgtttataaaaatgttcttgcaggccgggggcggtggctctcgcctgtaatcccagcactttgggaggcccaggcgggcggatcacgaggtcaggagattgagactatcctggccaacatggtgacaccctgtctctactaaaaatacaaaaattagctgggcgtggtggcgggcgcctgtaatcccagctactcaggagactgaggcaggagaatcacttgaacgcgggaggcggaggttgcagagagccaaggtcgtgccactgcactccagcctggcaacagagcgatactccattaaaaaaaargaaaagaaaaagtcttgcatctctaacctaacctatcttctctgctctctttgaagttctatgaatcaaaactgtgattacaattttttaacaaatatttaaatacccgtggtaataaaatgaattcctcatgctgtcttcgccaagtggtgaatgctaagaaataagaaaggaaattctggaagttccaagtgaacggtcagaaagccctaagctgcttttagagatgcacagaaccatcaggctcaaatcaaaatataatttaaaaatacttacttttctaaactctaacttggcctcctgacaaacataatattctcctaatggttaaatcctaaagagtctagaaaattaagtttttttataagctgcatcaaatgttacattaagagaaatgaggacaatccgataatgcaatgcaaaatacagagttgcatttggttactgatttataaattaaaatttgggagaactggaaagattatttctacagtgttttgtgtttttcagatgtatcctacttgaaagcacggttgtgaagatacccaggaccagcaatttcctttctgtgtgggacccacccgctgcgatagaattgagtgcagaagactgagcttcgtgtaaacacaaggtcaccagggatcgtaatttcaaactctcccctccccctcgctccctccagccaccaaagtatctgaacccagaaytcacaacaggaacgtgtactcaacaggaacgtgtactcaattagcttttgtgggaaagggttgaagattyttggtaactgcttcaacaaaccagaggaattaattagaccgctgattttctccggaagcgcgaagcactaggccgtttgaggatctccgctccgctttgcctgggaccaggaaaagacscgagagacggaactcggcatcaggcactgcttggggcaggaggagagtaggggaaaccaaggaagagaacagaaaggtagggcacggggagctgagcccagctgcactcatccccgcccccggaaacccccgcagctcccgccccaaccagcccccctctggcgcctggcataaggtagcccccggaggcaatgagggccagcaggagtctcgcgcgcctgcgacgcgggtaagggggctccaggctgcgcccacttccccgagctgccagatcccaccctctgacgcacccttctagagggagcgggctgcaagcgctggggcctgtcccttctcccctacttcgacttaccttaccagaccgactagcgctggccgctggcgccgaagcccctatgctaaaaggagacagggctgggccacggggcgcgctcccgagcagaccggccggccccggggcgcgctcacggcaccgaggagcgcgcctgcggcgctgctcgttcaaaccttgttcccctttacggcaatcgcgaaagtgtcgtgaacgtgctgccgccgatcagtcacccagtcggctggagtcggaggcgatatttctaggggtgtacttgttggggtcagggtaaggctgcggagcgcggtcaccggacgtgaaggatttgaagggcgttgtaggggccagtggagagaggactggatgctctggggcgggtcattaggatatagctgtgtatggactcgcgcgaggcgaacgccgtccttcttcctggcgcagggtggcctcgcgcgcggggttgtggggaggcgaggggcgactgcccccttgcccctctgtggagactgcccccttgcccctctgtggagacattggggtggcggagcgccggcgcgggagccggggggctgttgtgtgggagcccaaggtaggggtgggaagaaccgtggagggccagcgctgagcgggccgagggctgggagcgctacccgtgccgaacggaccttgcttgtcaggtccacaccctcctgcccgaatgctggcaagtccacacaccgtgtggcatcctctgccgggtttgtctccccttaggaatgcggtgctgatgtttgtggctgggacgcgcttctggtcagcaacttttctggaaatttcagcctatattgataagctgtgagattgctagctggcgtttatttcagcagcattcttgcaaggagaaataaccaaaagagttgctggtgtttgccagtattcccagaaacactgcatgaacgggatctttagccatgtttaacttgttttctccaattcagtgcttggcattttggtgtcatttttgccattttgcatcattagtattgaatatataattttgcttgaagtcttttaatcagtaaatccatagtatgacagtaggcaaattcatagttgtctttcaacaaatgttagtgtctcgtcttgtatgtggacaaagaataaagatttatttcctactcgaactattaggaatatgtccagtccgtagatgttgagttgaacgacttataacacaagttagactttggtaagggcatttagagcattactaatttagagccattgccattcacataaaattcgagattgaggttctaaaagcatttagtttcctcttcgttttatgctgagaaaaactagttaaggccccctgcacaacttgtctttccaacacatttaagaaataagttagtaaatctaccttatattaacaccaattacattttattgcacaatttctttgttttctaggctttagatttgttttttaagctggttaaaggtgctgatgttctttttgagggtcatgctgtgtttatttttaaggggctagaaaaataacctataaaataccaagcttttgctgatttttatgttgtgtgtgtgtgtttttttaagggggaagaaagtgatttcctcttttaaggagtgcaatatttcacttcagcaaaacgctaaatctaagttgtgttacacagccctgtttttgcttccaagtctgctgaaaaggcttttgtttttgtaaacttgctctatgtatcacttgttaaataatgctgaacttaatcctgtgatcctattagttttctttttcttttttttcttcctttctttccttgttctttataatttgcccttcctttctgctagtgtagccatgagtatttttctttaggtagccaattacctgtgaaaagactgtaaacatactgctgaatcagtgcagatcaaaacttggcacccttagacatggcggggatggaaattctggaatttcacacaacaggttgtgtattgtgtaagcttaccttatgcactgctcaggagttagagatttttttttttaatgtgatacttgtcagacattccccatgctaaagtccacacaggaataatgtagcccatatgccattatcctcagctgatataaatgcagccgttttgcatgatagacttttttagtaaaggtattaattaaatatctctgattatactttttctacctttgttggattttccacataaatatttatgcttgcacaaagaaaattctttgtcagaccgtatgtgttttcctagttctcctctggacttacaaaacagtttgttgatagcattcataacttagctgtttctgagaccccaccctcccctttttgagtttcttaaaggtatggaatgttatatttcagcctttctgtttcatcagagtctggaaccactaagtgtttattaaatactagacgaataatatttgttaattgttcagtaagtactgattacctactagcagggtgtggtggcacatgctcgtaatcctagcttctctgtggctgagacacaggaatcgcttgaacccaggaggaggggtttgtagtgaggcaagatctggtactgcctccagcctgtgctacagagcgagatcctgtctcactaaattaaattaaattaaaataagtattgattatctacttagtgctaagtatggtatgagcttgtgggaaaagaatgttaacaagacaggcttggcccatgcacttgtagagtatacacaacagtctgggggaaagaccaaaaaaacacaaacaaacaaaaaaagttcaaagtgtgatgagtgctttaaagggagcagagcactagagccagattttaacagaggaacggagttactgattacaagtgaaaaggctacaatagctataggactgtgacagtattataggactttgacagtattattatgaactgacagcattacagctgatgggaattttatacagtttaaaatattcacttttactattatggtacatgaaaacgtattctcagttaacaaataattttggctgtgttctaaagttacaggtttctttataagcacatcagttgctttccattacatccaagtaaaatgacaactctgcgttaattctccaaacttcattttatcccattcttccatctggtttactcctatccatccatggtgatctctctcgtacctgagcaagacaaactctttactatctcagggcgtgttccattttcttggattattcttcctcctcccctaaaacgtctggctccttcttttcctctgagcttggtatagaagctacttgaagacttcaccctgtttaaaatgtgtaaccccagctattttctagcttagcactttgttttcctcattgtgcctatcacagtgtgtaatctttttatttgcttgtttactagtttttatttcttttcccactggacataggagctgggatcatgtcagcctcattcactgcatttatatgttggctgaatgcattggaaactggtaatctattttcttataactgttaagactggtggctaggtttctaagccagcaataattttaatttcttacttttttttttctttttgttacttgtactgtggtaagaaaaggacattttctgctcatccttttggtcataggcctgattccatataaaaatttcaggtggctacaataacttttgggtttttttgtttgttcctttttgagacatggttttgctctgttgcctgggctggagtacagtggcgtgatcatggctcactgcagcctcaacctcccgggctcaagcaatcctcccaactcagcctcccaagtagctgggactgcatgacaggccagcatgctaagctaatttttttgtatagatgtggttttgctatgtttcctaggctggtcttaaactcctgagctcaggtgatccacctgcctcagccttccaaagtgctgagattacaggcaatgagccactgttcccaacatagaataattttttaatattctacctcctttctgtattcccaccccacatccatttttcctttctcgccacattgtcctgatcttcctgttgtagccacctaccctatgcggctccattgagatatgcttgcttttcatttgctaaaattcagaagttcctgtcttttctgtaatggttttcatggtcatagcccctggatctcagatatgatggaaggaagagtagagatgaacctgtggtagtgactgcaaactctgtatctatatgaatgtgttgaaagtaaagtagccatctgtaggtcagagactacatgtatctgaatttatatttgcagtgttgttgctaatagcttcacagagacattgttgctgcaatgttggcaaagaaagccttcaaaaactcattgcctcttttcatgtataaatttgtaccgtgggctagatctggaaaggtttgtcaaaatgtagatgtttataaaagagaaatagaaggttaaaaaacaatctaggtcgcagaggggaaaaactgagagggaaagtatcagtttatcaactagtcctgccaaatgctcagacttaaaaccattaggatcagttgcttatagctatttagtgccaaaagcaggctagcactcatctttttttctttacagtaagagaatagaatactgcaacagtaaaatacaaatggaattgactgaatttttaattcccatttcaagtggaattccgtaagagctatcatttaccaaatacgaaaatatatcattgctcgactatagaaaatttggctactatgaagctaagtgtattcgtggttattggtctctcatttgatctaaagtgatctcgtcaccagttatttaatattatataaacattactttaaaacagttttaatcagtacctttgtgatacagttgtgtgaaagaattcctcaaaatgtaagaaattagctttgatttctctccttgatttgaaatattaattttttttttttttaagacagagtctcgctttgtcactcaggctggaatgcagtggtgcgatctcggctcactgcaaccttcgcctcctggggtcaagcaattctcctgcctcagcctcctcagtagctgggattacagatgcctgccaccacgcccatctaatttttatatttttagtagagacggggtttcaccgtgttggccaggctggtctcgaactcctgacctcaggtgatccgcccgcctcagcctcccaaagtggcgtgagccaccgcgcctggcgaaatattaaatatttttatttcagggcatctcagttggttaaattgtggcactgatgagtctcttgagatttttgaaaatttatttaagggcattaacttgactataatgactattttctaaaccaaatattgagatacgtgattgacagaggttttggatgccaccttaggtcattagtaacattgaaattttggaatttgatatttatagggatataggaaaaaagtcctgttccattgtgttcacatgtccataccaggctgtggggtgagtgtccccctggctggtacctacttgtccatgtggttactcatgagctgagtgcctacatttcatgttttgtggcatgtgaccctgtgctccacttcccagaatgcacatgtggcctgggttcatagtcctctagccatggccgggtctcagttcagtgccttccatcctgggcagcaggagcaccatgttgcagtctaccacagctgcctctgggccttggcctggcttcactgcattccagcgctgcctcccctccaccccagacaggggggaacctgccactctcaggaccaccctgcaaaggcagaataaaccagatcctctcacagcaaaaaaaagttaaaagggacaactgagcatgttttgatagtagatctattgtcgagatgtcctagacctataccatttctgggactttgattctgctttgtggatagtttccaaccagaagatcaaaacatacctatgccactaatcttttttgttctattaagattctttcttttttttttttttttaaatggtctctgttcctcctcctcctcactatggtaagtttctcacaaggttctttatt

SEQ ID NO: 98135 - DNA, 12733 bp, Homo sapiens
tacagatgcccaccgatatgcccggccaatttattattattattattattattattactattgagaggaggtcttcctgtgttgcccaggcaggtctcaaactcctgagctcaggcgatcctctttccttggcctcccaaagtgctgggattacaggcatcagctgtcatgccctgctggttgtttattttaaaagaggcttcatctttgcttagtgaatacaaagcattcttcaaaatacaggttaagagggggcagagcagatgcagcaggagggcagggaaatggagtggggctagaatatcttcaccccatgtgcttggaaaaaacaatgaaactacctccttgtttcctaagtggagtagtccttgtttacctctgcctgggtctcttcccttcttgcctcttctttttttgacacggtctcactctgcagcccaggtagagggcagtggcatgatcccggctcactgcagccttgacctctcaggctcaagtgatcctcccacttcctcctctcaagtagagtagttgggaccacaggcacgcaaccacatccagcaatttcttttttttcctttttttttttttttttggtatttgtggagacgggattttgccatgtagaccaggctgaccttgaactccwgagctcaagtgatcctcctgcctcctccttctaaagtgttgagattacagacatgcacyaccatgtctggccctgggtctcttccacttttatgtatttcttggcattcttctgccttttcttttcctgcatctgacttgctctatcccatggggcttctcacccagctgaaggggctgctcctagaggctagaggctggagggccctgtggcagggcagtgggggaggccagcaccctcaccctgagctccagcgtttgctggtctggctggcatacagagatgcagctggagcacaattcagtggaggaggcagggctataactaagcagtagggcagagagcagagccagagccccctgggcaggccagaaggaggaacctgctcagctgactcttcccaactgctgcccttggtacaaccagcttgagtcacctgctacagaacaggggctggacacagaagcagtctgtggagggagaatgggcaggggtgtgcatgtccattcagtagaaggccagagaggcccacatgtaggcctatgatcagactggagcctggcttgactgatgccctctgatccaaacaccaggcacctaatgcggcctctagcactggcctagagtgctaaagtgagtcagacctgggaacccccagtggggagggagccttgagagtttggcacaagaaaggaagaagagctgagccaccgggggctgagtggctgaatggggcagggattcccagcaagaatgaggttggtctgagggttgggaacatgtttggctgggactctggggtattgacaggtcacccagcctggccagtagggcctaaggccccagctgggataggaagctgaatcagagggggcaagcctagagcccagggaggaggctggaggggtctgacctatggatggaactggctgggggtggggtgtgaattacagctccagggaattgtccttgagccatgcttcaaggaactggacacaggaaaggtggccctctgatagggtcagggtctgtgacccagtgactaacagagaggcttcctcttccctgatgcctcccagataggggcctcagaaagctgctgctgggagtttggagtgggggtgggcagagacatcagagaactcagggttctccccactcacctctctgatctcgcctgcaggccagcagcacagtgatgcctttgcccaggtgaatgccctgaggaaggtgccaggccttgaaggatggggacttcaccttggctgagaggtaaccggtccctgggctgctgccgggccttgtggggccagtcagtcagctgtctgtttactgctgatggcttggatcatggactgtgggccctgcaccagccccagggtgaagaatgggtggaggcaggcagaggtgcccagtgttgacaagggctatagaagtcccctcctgcattgtacaagtgaggaaactgaggctggaggaggggagggacttgcacaaggccacagggcccagtctgcttccgggcctcctcaccgccagtcttcccctccgaaaaaaagagagtgctaagtttcgaggagcggctgtaccaggcatcttagtgctaccattttgcccacaaatcctgtggggcaagtgctgtttccctggagagtcgagggaccactcagcgagcttcagtggctatttgctaaacatccaccagggccagaccccatttaagccctggggcttgagcagtgaacgtgtctacgtccttctcctcatggagctcacattccattaatagaagggggagctgacagtaacccatgtaaacatggaacatatcggatgttgatggatgccatggaaaaaataaacagggtaagagtgggggtgtgtgtcattatgagtaggatgttgagggaagactccctggaggaggtggcatctgagcagagagctgtaggaatgtgcaaggcatgaggrgaagggtgttctcactggagggaagagtgagggcgaaggctccaggtgggacaatgcatggggttcagactggagagcaacgggccagggtgggtgcagtgagcaggaagagcrggaggtcatgacagaggggagcatgggacactgggaaggctttggctcttaccacaggtagattgagtcgctggagggttttgagcagaggggaactgtgatctgacttacgtcgtaaaggatccccctggcaggggtgagaaagccactgcagtcatctggcatgcagcgctggagccccagaccaaggtggtggtggtgcagggttggtggggattgtggtcagttctgacttttattgaaatctaactgcagggtttgctgaagggttggaggtgggtgggaaaaatgaaagccaaaaccagcctctaggttggtggctgcatggtggcgtcctttaccgaggccaaatagtgcctccttggtggagctggattcacattcagagcctgggatcactggatggtccaacacccatagaggcatgatgagctctgggggtcagactgcacaacccttcaccataggtgaacaggagatgggacagggtggggagcaatgctgccatgtcacctggaaggctctctccctgctggccttgctcctggccctgtccacgctttggatatgttggggagatatccaacatgctctcgttcttcagactcacagtggatgccccttcctcctggaagccttccctgagcccctgctgaagttcatgacattttgtttcttacttgctgcccttagttgagatgatagtctggccccgtgtagggctgtgtgaccctgggcacttacctaacctctctgagcctcacatccctcctctgcatcatggggatagtgaaaatgccccagaaaatggctgaagagtgttcagggcatgttttctgcccctgccatgtccccccagtgtggctagcttgctstrtatgarctgcatgtacaaagcacctgaccactggtaccyccaggacctgcaggcccgcgcccrtggggatsagtacctgtsatggcagcacatggccctgcagagtagctgctgctgggccatgtggcagaaggcgagccatggagggcagggacatctcccaagatgccaagggatgctgctttcactttacaaaatcctgtttagacctgagaccaaatcctggaatgccagagactgcctaattcacccaacttgtttcctaggagggaaaccaaggaccagagccaaggaaggattcccctaatatgccttaattccagagctatgagcagttaatcctatgctcttttgcatactccaggttgcctgggaatcttgcctttagggggagaaaataaacaaaccctcactttgctacacacataattcgtagatggagaagtatgaagtgaaaaaagtcaaactaggaagaagtgaggagacatttcaataaacgtttgtctgatgtctcggtatgaaaggactttctaaccctcagaacagtgggagaactcaacaaagaaataaccactacatgccagctgcggtagcatctgtaatgagcacacctgtaatcccagcactttgggaggccgaggcaggcagatcacctgagattgggagtttgagaccagcgtgaccaacatggagaaaccccgtctctaccaaaaatgcaaaattagccgggtatggtggcgcatgcctgtaatcccagctactcgggaggctgagtcaggagaattgcttgaatctgggaggcagagattgcagtcagctgagatcacgccattgaactccagccttggcaacaagagcaaaactctgtctcaaaaaacaaacaaacaaaaaaacatatacaaggacatgttgtgtaagaaaaaatggattaaacataaaacaagcaaaaaaccgggaaggatcttgataaaagatatgtcagaaggaggtaatgttctttaagatgctcttagaaacccttaagagaggcctggtatggtggctcacccctgtaatcccagcattttgggaggccaaggtgggcagatcacttgaggtcaggagtttgagaccaccctgggcaacatgatgaaaccccatctatattaaaaatacaaaaattagttgggtgcggtggcacactcaggagactgagacaggagaatcacttgaacctgggaggcggaggttgcagtgagctgacatcataccactgcactcaagctccacttagagcgagactgtctcaaaagcaaacaaagaaaaataagagaaacccatcagacaagagacaggaaaaaaatgagtcatagctcactgcattctagatctcctgggctcaagcgatcctcctgcctccgcccaggtagctagaactacaggtgcacaccacaacactgggattctttttttttttctttttttttgtagaaaacaacgaagggaatcttgctatgttgcctagcctggtcttgaactcctgggctcaagcaatcctcccttcttggcctcccaaagagctgagattacaggtgtcagccactttgcgtgaccacaatttcaatcatatttaaaatgtacaattcaagtgattttgccacactaaccacagactcatgtttaagccacaccaacggatttccatgttttaaataacatattttgccaccccctagtggacagtggctcaccaccggcacaaggggctacataggcagtcaatgggaaccaggcggggacgggaaatgtcgtgaacccaacggtccctgcccagccccacccgcgtccgcaacgtgtaaccacatctcctgactgcccaagagaagcgcagatttccatactgaacatgaaattgcctgacttcgaaatggtggcaaatcattaaaaaaaattttaaactcactttgcattggttattagggtcgaacttggggaagacccctacaggtgtgtgtgtgtctgtatgttaggggtgttcagacctttaatagggctagaaaccaggcaaccacaccgcggaaagcttgaggagagggaaatccaccagacgccaagcaggagggtcagggaagagacagggtggggccactaccgggttaaagacttgtagtgggtggggctacacgtagggccgagacgaccggatttccggaaatcagagccggcacacgtgacttttgtttgcagaagtgggaaggtaccctaggcagccaatcggggagcgctgagtctctgtccagccaatgagaagccaggttgttttagcgcctcgcccctcctctccggtccgcgagccttgggtatctccagcttttttccgccagagctgtttccgttcctctgcccgccatgccgttcctagagctgcacacgaatttccccgccaaccgagtgcccgcggggctggagaaacggctgtgcgccgtcgctgcctccatcttgggcaaacctgcagacgtgagcgtgggccgggcagcactgggcgaggggaagttggtgggccaggggtccggccttgtccctgctctgcctccgcaacagcgaccccgatccctttccccagggaccaccccccaccccattccgcaggccaagctctgactttccgtgcttcacgatcccgcggctccccctccgcacgtctttcccttgtcgccctccccagtcatgacccggacgtgaccttcagggacctcggcctgtactgggatccctgtccccgcgaacactgcgcgtttcggctttcgcgcgctcgggtcgggaccccagacgtagcccgactggctccagcttcgggtaaaacttttcatgttcccctcagcttgtgaacgtgacggtacggccgggcctggccagggcgctgagcgggtccaccgagccctgcgcgcagctgtccatctcctccatcggcgtagtgggcaccgccgaggacaaccgcagccacagtgcccacttctttgagtttctcaccaaggagctagccctgggccaggaccggtgcgcaggggtagtaggcccggaatattattctaaaacacaatcagagtactccattcctgctaacagtttaaagccaaacacctaggcaggccatttaggcttctgaatgactgggtcttgaccaggagagctgctgtctaggttttctcttcctgaccagttcctcaagagaaatgcaaaactagtgattaacagtaagagtcaggcagggcgcggtggctcacgcctgtaatcccagcactttgggaggccgaggcgggcggattatgaggtcaggagatcgagaccatcctgactaacacggtgaaactccgtctctactaaaaatacaaaaaactagccggacgtggtgggcgcctgtagtccccgctactcgggaggctgaggcaggagaatggcgtgaacccgggaggcggagcttgcagtgagccgaaattgcgctactgcacaccagccggggcgacaaagcgagactgtctcaaaaaaataccaaaaaacaagcaaaagaaaacaaaacaaaaacagtaagagtcgtcccaacgcagtggcttatgcctgtaattccagcactttgggaggccgaggcaggcagatcacctgtggttgggagttcgagaccagcctgaccaacatggagaaaccctgtctctactacaaatacaaaattagctgggcgtggtggtgcatgcctgtaatcccagctactcagaaggctgaggcaggagaatcactttaacccgggaggcggaggttgtggtgagctgagattttgccactgaactccagcctgggcaaaaagagcaaaactccttctcaaaaaaacaaacaaacaaacaaacaaaaaaaaacacacacacacacaatccaaaaaccagtaagggtcatgtcctgggaggctaactcagccgactgttaggtcaccatgcttatagccaagaaatgtgggatgctgctgggccctgagcggtcagataaactactttctctgataattagaaggctacaggaaatgttttgttttgttttgttttgggtttctttgtgtgtttttagagacaggatcttgttctgttgccccaggctggagtgctatggctcaatcagagctcactgcagcctcgaactcctgggctcaagcaatcctcccacctcagcctcccaagtagctagaactacaggtatgcatcaccacgcctgactaattaaaaaaaaaatttcttttggttgcgtgtggtgtcttggcacccgtaatcccagcactttgggaggtagaggtgggagcatctcttgagcacaggagtgcagggctagcctgggcaacatggcaagaccctgtctctacaaaaataaaaaagaaatgagctgggcgtggtggggtgcacctgttgtcccagcttcttaggaggctgaggtgggaatattgcttgagcctgggatgtcaaggctgcagtgagccatgactgtgccactgcactccaggctgggcaacagagtgagaccccatctctgaaaaaatatttttttggggagccaggcacagtggctcatggtaatcccagcactttcagaggtggaggtgcacagatcatttgaggtacagagtttgacaccagcctggacaacacggtgaaaccctgtttctactaaaaacacaaaaattagccaggtgtgatagtgcgtgcctataatcccagcttctggggagactgaggcaagagaatcgcttgaacctgggaggtggaggttgcagtgagctgtgatcatgccattgcactccagcctgggcaacagagcaagacactatctcaaaaaaaaaaaaaaaaaagtttgttttgaaatcctggactcaagcaatccccccaacctggacctcccaaagtactaggattataagtatgagctaccacactcagccactttttttttttttgagatggagtctcgctcggttgcccaggctggagtgcagtggcgcgatctcggctcattgcaaggtccgcctcctgggttcatgccattctcctgcctcagcctcccgagtagctgggactacaggcacccaccaccacgcccggctaattttttgtatttttagtagagacggggtttcaccgtgttagccaggatggtctcgatctcctgacctcgtgatccccctgccccggcctcccaaagtgctgggattacaagcgtgagccaccgcacgcggcctcagccacatttattaatttcactcttggcaaacatcagggggaagctgacccacacggcctgggaagggggttgtcttttgcatagagaccatgaccaggtctgggacagaggaaagtcaaataaatcacacattagagttagaagcagaggctcaggctgagcccaggtttattatccaaaatcaaaatgaaatgcagtgattaaaggacacaaggcctcagtgtgcatcattctcattgtggctttcaggcggctgtggaagacagggtggggatggtggcttcgggaggtgaggtgctctgggacttgggcaagtcttargcaagccattcctgctttctgggcctggctcccatgggccattagaaatgaaaatgctttgtggactgctgaggacggtgcaagggtgaggtttcccagctcaccggatcatggccagcacccagggcatcagcttctgctttatggtggggtctgcaggtgggaagtccttggccttcagaatgacctcatgggcctcctggaagaggtcctcccccactgctgcctccacgcgctgccgccatgtggccagcttgggtcggccttcgaagacttggcagccagcacccacgggctgtggggaaaagggtacagactggggatggatggttgtgagggcagggatgggcagcatctgatttggggaccacagatctccaggaggtgtttgcacacacacttaagcacagtgccatagcccggtgtggcagcataagcaggacttcagcaactagccagggccccctgcctagtgggttcacctgcccacagcactcacatgcatcagctycgtgatggctaygaggtcagctaaggagatgtgaggaccagtaaggaaggccttgttctggaggaacttgtcctcgagcaactgcagggtcacatycaactctgccagggtggctgccagtgtctggggagatactggctcacccaggaaaacagggaacatyacctggggattgggcaggcaaagtcgggagttactggggtagggagttagttttgatttgcatttccctaatgattagtgatgctgagcatcttttcttttttttttttttttgagactgagtcttgctctctcgcccaggctggagtgcagtggggtgatctcggctcactgcaagctccgcctcctgggttcacgccattctcctgcctcagcctcccgagtagctgggactacaggtgcccgccaccacgcccagctaattttttttttatttttagtagagacagggtttcactgtgttagccaggatggtctcaatctcctgaccttgtgatctgcctgcctccgcctcccaaagtgctgggattacaggcgtgagccaccgcgcccggccaagcatcttttcttgtacttgttggccaaaatgataatattctcaacacattgggttaagtaaaatatatcaatttccttttactttttttttttcttttgagacagtgttcagctctgtcacccaggctggagtgaagtggcaccatctcggcacactgccaactttgccccctgggttcaagcaattctcctgcctcagcatcctgagtagctgggattataggcacaggccaccaagcctggctaatttttgtggttttagtagagacaaggtttccccatgttgaccaggctggtctcgaactcctgacctcaggtgatccactgccttggcctcccaaagtgctaggattattggcatgagccactgtgcctggactctttttactttttaaatgtgcctactagaaaatttaaaattacgtatgtggctcactttatacttctatcggacagcacttgactaaatgaactaaattccagagaggcataagccgttcctagatgagctactttcattccaatttcatttccttgggcccaagcaggctgggagaaagactgtcacaggcatgggcttttctgactgagcagcagtttgggaactgggggcagggatgaaaagcagagagatcttacaggcaacatcgtagttggtgattagattccaaagccatgctagactgagctagtgacctgatctcacattcaagatatttgaaaccaaagataaactgaaaccaactaaacctgcaacccagcccacctcctgattagcttagaagagaacagcctcacatcctggctacctgacacagggaagtgcaagccctttcttgggggtgtttattatgcaattcaatctctgctcttcttttatcataatgtctggcacacaaggatacatcatgaggccgggcatggtggctcatgcctacaatcccagcactttgggaggccgagatgggaggatcacctgaggtcaggagttcaagaccagcctggccaacatggtgaaaccctgtctctacaaaaatacaaaaattagccaggcatgatggcaggtgcctgtaattctagctacttgggaggctgaggtgggagaatcgcttgaacccaggaggcggaggttgcagtgagccaagatcgtgccattgcacgccagcctgggcaatggagtgagagtccgtctcaaaaaaataaaaaataatgataatacatcatgagacatgcaaagaagcaggcaaatgtgacccataatcaagagggagaaaacaacaatcaatagaaatagacccgtaggctgggtatggtggctcatgcctgtaatcccaacactttgggaagccaaggaggacgaatcacttcaggtggagagttcgaaaccagcctggccaacatggtgaaacctggtctccactacaaataacaaaagttagccaggtgtgctggtgggtgcctgtaatcccagctacgcaggaggctgaggcaggagaatcgcttgagcctgggaggtggaggttgcagtgagctgagatcgcaccattgcactcagcctgggtgacagagtgagaccccatctcaaaaacaaaacaaaacaaaaaaaccagacccacagaacacctacgtgttgaaattagttgacaaagatttttaggtaacagtgataaatatgttaaagaatttacaagaaaagacagataaaatggatgaacagatggtgaatttcatcagagaagtggaaattctaaaaaacaaccaaatggaatttccagagctgaaaaatacatatctcaaacaaagaatgtattggatgggcttaatagcaatttggcacaacagaggaaagaatctgtgaaggcaaagacaggtcagtagaaataatccaaaactgaaaagaagagactggtgcctgaacacctttggggaatgctctcgctgccgccccccacattcccagcctcaccttatgccacaaggcccggaggcagcttctccgcagagtcgtgtgctgccatgccaggtactcatccacacgggcacgggcctgcaggtcctgagggtaccagtagtcagggaccttatatttgcgcgtcaggtagagcaggatggccacactgtgggtgtgggggtcatgatgggtaagggaagggcactgtgctgggtatttcatacatagtcgcttttttttttttttgatacggagtctcgctctgtcgctcaggctggagtgcagtggtgcgatcttggctcactgcaacctccacctcccgggttcaagtgattctcctgcctcagcctcccaagtagctggaactacaggtgcgtgccaccatgcctggctaattttttgtagttttagtagagatggggtttcaccatattagccaggatggtctcgaactcctgaccttgtgatctgcctgcctcggcctcccaaagtgctgtgattacacgtataagcaaccgcacctgg

SEQ ID NO: 98136 - DNA, 13279 bp, Homo sapiens
gtgctcccgggtaaaggtatgaatggcatccacaaaactggcatcatctggagaaagacgattgctgggggcacttccctcaaacaaaggtcccgcggcatccagccctaatgggaaagcaggggtaagggttacgcgggagcaaggagaggggaagagagatgtgctttttagcttttggatattattatacatcagtgaactagcaggaagaagaaacacgtagggctgatccttccctagaaaacctcgccgtaaccttttctcagtaaaaccacagtagttcatggtgctaacaatgacacacaggctgggcattagctagcggggaaagaggtttgcggaaactctccagtggtagacacaaggttatgatgcctgaggccaggaggcctgggcagcatagtgaaaccccatctctaaaataaaaaagaatacaaaaattatgtggatgtggtggcctgtgcctgtagtttcagccactcaggaggctgtggcaggagggttgcttgagcccaggagtttgaggtagcagcgaatcatgactgcaccactgtgacccagtctaggcaacagagggagatcctgtctcaaaaagaaaaaaaaaaaggaataaggttatgagggaatgcttgatttacttgagcaaatcagttttgagtacctctcaagctactttcaagaccatctgtttgcatacaaaaaaagccaatatgctcattataagtagttccaacctacctatcaaagaatgaaatttatttgcctgtatgttgtcaataatttccctaaacaagctgatttttctcctaagatgtcatttcattagaacgtccagaacagccgcgggacatttcactgtatgtgaaaatgttgtgtgcaagtaggggagctcaaagctctgggcctcaagtgacagatgtctgtgcatgaagtaaggtggcacctcctggctgactgtggttggggagtatttatgcgctccaagttttttttccctgtctttcttcctctgccttctctggaggaccctctggtgtcccaccccagccctggtttccttccctacttggggggcgaaggaattgagagtgagccgtgagatcacccgttctccagccctacccacagtgacaaatgaaaaatgtccttggccgggtgcggtggctcacgcctggtaatcccagcactttgggaggctgagtctggcagatcacctgaggtcaggagttcgagaccaacctgggcaacatgacaaaaccccgtttctactaaaaatacaaaaattagccgggcgtggtggtggacacctgtagtcccagctacttgggaagctgaggcaggagaatcacttgaaccagggaggtggaggctgcagtgagccaagatcatgccactgccctgtagcctgggcaacagaatgagactctgtctcaaaaaaaaaaaaaaaaaaaagaaagagaaaaagaaaaatgtcctgatatgatttctgttcctttctttatcaggctgatgacaagacggcaagagggtgttgagctttcctgctgtctctgaggtgggtgggcccagctgatacgcctaatgtgacccacagcaccagttggatggagagggttctgggccttgggcctgaggctgcctcgctgggtgtggactctgacctctggccctgcttcttcagtgggagggctgctcatccccaggctattgtgggttaaatccatgggggccacacgccggtctgtgaccaggcttccccagtgaccagcaagatgaacaaaaaagcatgaggaaatgagctgtcataatcacaagtgtattctgttgaaacgtctgccattatccccattctttctcaagttaaaagaaattcttttataaaggaatggtaatagcagatagtagttgtttgtaaaaatgtcctcatggccggccgtggtggctcacgtctgtaatcccagcactttgggaggccgagatggtggatcacctgaggttgggagttcgagaccagcctgaccaatatggtgaaaccccgtatctactaaaaatacaaaaaaattagctgggtgtggcttagctactcgggaggctaaggcaggagaatcgcttgaacccgggaggcagaggttgcggtgagttaacatcatgccattgcacaccagcctgggcaacaagagcgaaactccgtctcaaaagaaaaaaaaatgtcctcacttgataaaatataaattcgcaacaactttgttattcatgtaaaatgctctttgttttggcctgtgaaatattgtttgagcctgctgggtcttgaaggatgaggaggagtttgagtggctgagtggtgggcaaagcaaacagtgcatgcaaaggcccagaggcacaagaggccatggtgtgtttgtgaagtagagaaaaaccttgtgtcgttgaagcctagagctatgggaagggatcagcaggaggagaggctggggcactctggggcttccacaccgagaaaggccttgcctgtgcctcccgggttttatacctgtggtatcagtgggcctcagacttggactggggaacaatctcaccagctgtgtgtttttggatccaatgcctggcagtgtgaagggtggggttggtgtcacggaagcctgggaggaaggccttcctcgcacatgtgcagaccttcctggatatcttgggccatttctgagtgtgtatggagtttggggtgaagttttggatgcagagctccctccctcaacccaaatgggtcccagactaaaacatacacgtttcacaaatgtggaaacggaggcactaacgtggctgatgaattacagcaaattaaggctgtgattcttcactccttaactcgcccaaattggactttgtaaattatagattaaaaaataagactctttcttgctagaaaagtccatcttttagtcccatttggcacaccaacatgaggtattcgtttgagggcaggcaataggaattgaggctataatttgctctgaattctctggaacagcaatccatgacattggtcatgtttgaaagaatgtcacaagtcctctcatgagcgctgatccctcacaataagtgttggggtgttttaatgatgagcctgttggaaaagcaggtccttgttggatgcccctatggagtggagatcagtgtgtgagttattaggcatggttacctgtgattctcccaatcttgtgcgttccaccgatggaactgccggcaaatcctgacacgtgtgcacccaggctgtacccaattaggtgaacatggcttcgagagagttgcacagattcctggaagacagcagcgggatgggggcaggagaagagctgcctggatgaaagccttttgcggtccagtgtgttgtggcgcccaccctgttcttcgtgcctgctcagaaatgaggtgccttattcacactccaaactgaaactaatctctcaactggctgactctcctgggactcaggtacctgtgacctcgcctggtagctgcagcctcctgcctgcctgtcttcccctggacactaatgccctacagaagtgatcccactcatttgtgtgggggcttgatagcttacagggtgtgtttgtatcccttagcatgtctaagggggtgagcataagaggaatagtggatgaggagaggggagaaggtggttctgtgaaacaggggttcaagggaggcgtctgagagagccctggggtctggtgtcagtcctgtgccttctcattcctgtgagctgagcattagtgcttctcctgcctgggctgctgttggagaccagcttaattcattcactctcagaggaagggaaaggagggaagggaggtgaaggaaggatggggcaggtcggtacctccagccaccggagaagagccgcgacctccttgcccacaaggcgggtgttgcggacggcgatggtgtagtggtcgtgggccagggtgatccagtccaccagccccacgttcactggctgggccggctgagacttcagcgcggccaccatctgccagatccagttttctagcacgccgtccacctgaggaggggacagagggagggtcgcactagtttcctttctccccgctcacccttcttccttctccagctcctggataatgctggaggaagggcttgctatgacgtttctcagccatgcacagttgacattttgggccagagaattccttgttgtgggggctgtcttgggcattgtacgatgtttagcagcattcctggccttcaccaactagatgccagcaacacccacccactgccccaggttttgaaaaccaaaaatgtctccagatttttccaaacgttcccccccgccccctcccgagaacaattatcttaatgtttttcctcttagggactttctaaaccttaaaacagtggagaaatatgtgtaaatcaggtcctggaagctgacctgtcccttagggccatttgtacgcctccttctgcgtgcagctgccccacctcacccctaaacccatagcactggctctgccctgcagactgcgttatgctggacttagcgggatgggcactgtgagcctgacatagtaggaggtaaaaaatgtttacagagaattgttctgtgtgtgtgccttgtttgagaaccaatttgcagggcactcctaatggatttacagagcaaagacacttgtgctgggccttaaaggatcaataggagtccagtaagacgaatatgggtgggggctgggcgcggtggctcatgcttgtactcctagcactttgggaggccaaggcagggggattgcttgagcctaggagtttaagaccagcctggggaacatggtgaaaccccatctccacaaaaaatacaaaagttagccaggtgtgatggtgcatgcctctagccccagctactccagagtctgaggtgggaggatggcttgagcctaggaggtcgagtctgcagtgagctgagatcacactgccctccagcctgggcgatagagtgagaccctatcgcaacaaaacaaaacaaagaaacaaaaagaatacaggtgggcaggtgaatgtggtagtggtgaggtctagggcatcccaggcagaaggaacagtgcgtgcagagtcacagaatcatgaaagggcagtgtggtatgtcaggggagaggaggaaagttggtgaggtgaaggctagacaataggaggtgaaggcttgacaatagcgggtgaagctggagagctcccctgagggcctgtcatgccattccagggtaagatgcattcctttactagatatttaccaagtgccttctatgtgcatggagcatcttgggttcaaatctaggctctcctagtttctagctgagtaaccttgggcaagttatttttctctgtgcttcagttttctcacctggaaaatggggttaataatgctctccttccaggattgttatgaaggagaaatacgttaatagatctaaagcgcttagagcagtgtctggaacatagtaaggactcaacaaatgttcgttactgcagttgttgttgttattaatattagcagtaataggaggaggagacatatactaggttggacagaattttgataatgaagagtgcattttggtaaaagcatcctggtaagaggctcctgtggtcctcatgttgcatttataaacaagactcattcatttgatctttaattcagttaacaaacattttggagcactgattacataatggatagtggcccacagtagtctattagatgagaataggacagaatccttcccagggagaagcttacggcctagcagagcagagaaacacagacaattagaaagccgagctgcagagcagtggtggagagtgctcagggccacacgggaactcccggtgacactgaatgccctgtgggagtgctgggatgaaggcagcaatggcttgcaggaggacctgtttgggactgtgtcttacaggaaaagtgggagttaatcaggaaaagaggaggagaaagaacactctaggcagagggcacagactaagccaagaccaagaagagagaaggcaggtgcatggggtgtggaggaagctattaatacaagcagttagatgttgctggaacgtcatgtgggaggcagggagaggtgaggggaggcaggtgatggaagggttcattttcctctccaggataggatagatgggggtttcaagagtacttttcaactagatggcagggaaaggtttctaagtcatgaagtagacaccaaaatctctggagggttcaaattgtgaactatgcttgaaatcatgggtgggctagacactggggaggcaggatttcctcytggagacaagttctcacatggtttgacttcatctattgccaataatatcctttctctccttcttccatagtaatagaatttttagcatcactaaaaggctacattttctttaacagcctatacttctcagccacctttccacttagatatggtcaatggatgtaactgggagaatttcacagaggctctgggacacctaaaaaacactcttttataccaaaagccattgaattgtgtaaacttgaaatggataakttgtacgctttgtaaattatatctcaatraagctcttgtaaaaaccttgcttttgactcctttgtgtacatcttttacwacattgtgcttcctggaataaagatgtgatggctagtcctctagctgccatcttggactatgaggatgagggtcacaccccaagatggcagagcagtgaactggaaggagctggggcctggaggacytcactgaccaaagctgtctagccggtttttgggttacatatatctttggaatattttgcgaaatgaaaacaaatttctgttttctttgaaccactgctaatttgagtctctgttatttgctgctgaacttaaaccttgctgatacaacatttcattgggagtccattcttctggcttcctatgtccccctgtgtgtaacatgcagattcaggaaggaggcttcttcctgcacggactgcaatcccttgtgggccccaatgggctgtgtgrcctctttgagccacattctatctgaaacatggagataattatattttctcacgctgcttactcatggaatcgagataatcaatgagctaatgcgtggggaagcacttggaaaattagaacgtgcttcataaacattatgcatggagttgttatcaccagctccctatctttttatgaacatgaacacgctagaaagaaaaaaagaaaatgtgaaatcggagagaaaaacggcatgtcagcatttcctaccgaccacccgtggattatcatcaccagaggcagggaggagttgaagccgcactcctgtaacgtgtccggatgattgattcgaatctgacagccctgattggtttctccaaagagcaggaatctggtcttcatctcatgcagcgttttgtttgtttcaacagcttgagctcttcttccaaatggctctgcaatataagattggggacggtgcttagcctggcatctgcttcatctgaagccctccgtcttctcaaaggctgcttctacaagcacaagccaaagaggttactgggagatgctggagatcagaatgagccacaactgtggggagccccaaagactgtttccagtggaatggccaagtgatggagggtggcctaggaggttgagatcaccagatcctctagcctgttatcccagtgaccagccaatcaagcactagagtcaccctctaggtcataaggaatataggcaaggcagttttggaggctcggtggataagcacctcaccccaaatcacactgccaaaaactgatagagacaggatttgaacccaggtgtcgctgtctccaatttcatccctacatccctacctagagagacagtgaatagagcatcttagctgggtgacactatgtattagctcctgaggctcaacttgtcctcacgtgcagacagattatatcaggtaagccttgcagggacaaggtacaggggtgagtgtggggcagggttgggggaatcacagagggagtagtggatgccgcttgagggagggtgtggcattcagggagggcttttcagggaatgtgatgttgaccctggccttgcaggatgattgagtgtgtgtgtgtgttttgttgcgggggtcaggggtggctgagggagcaacatgagtcgaggctcacaggcatgcaaccttgcatacataaagaggcaggagacaaggccaggcaggccagagcatggagggccctgggatgctgaagagtctgggcttcatgctccagatgccaggctgctgctaaagagtttgcaacagaaaagagtagaggaatgtccattcggaggctttccaaggccgtgggaggtggaaaaggagaggaagattgtttttaacatatcaccttctgttgtttgaccgaagggccttccagcctctcttctgggggagcctcactatgaccatgagccactttggaggggtgggtgagtggccatccaactctgccaggcagcccgacagctgtcctgtctgtggtgctgcaccagagacggacacctctgccaagaggcctggtagagcctggcaaggtggcgcgtttccatggcgtggcatgtcaagatgggcgcatcttttctgccaagattagggatcaggccaagagctgggagaggaagctctcatcccttccttctggtagaaggtgggctcccctgcggctgaggagcagacacaaggccgctctgacctttttggtcagtgaactcaattcagcccatttaataaggaccctgatcattctttctgagaataaaatcattcaggcttctcaaataatatgtcttgggcttttggtttcaggggacagcaggaccaagagatgatgaacctacaaagtgcaaggggaggtgttaatgaaaccaattttcctacccaaagggtattaactcaaaaggttattaattctcagcaaagggcaatgatttttcactatgaagacagaatgaaatgcatcatattttattaaaaggaggtgtgagcaagaatttgaataacttttctgagataatgaagaaaatttctgccgctctctttggcttttctgagcttatagagagtctcagcttgccctcactcctggaagcctgcttccaacctagcctgctgatttcactggctgccctcctgtctaagtcagaagccggggtgtcaccttgcactgctatgccagcttctcgatcagtccaaagcttcaggtttcctaaatatccctagaatcctgtgccttagttcccgtgcacactgtgtcttgcttggtttattacagcagcctcctaactggtctctctctgcttggtctctctgtcctcctgcacacagctgctcaaagagtctaaaacagaaatgacaatacctgttagtgactttcagcttcatggtattgcagccaaggccaccacctgagtgatgatccctcatcccccacctcctcctctcttttcgttctcctgctaccaacagttcccaaatgcccttttggatgccggtacctttgcacctcacctcctgctctgtctctgctgctccattcattaaaatggaactgagacttcacagcctccaggaagccttctcatctagtcagagataattactccttcttgctctcagcaccgtactgcctccctgatcctaatacacttgccctgcagcggggtgatttatttatccaggtgtgtgcttcctccacctgtcagcgaactcatggagggtagccctgggcacaatggtgggtgctcaataaatgttagtgagcggtgaggtgtcctgccagatccagatcttggatcaaaggctggcactcaatcttcagccatttatacattggacctaatgtagctcattttcttttattcagagactgaaacactacacctttcttcattttaggatagctgcctcaaatgttaagagggtcatatgaaaataaaatggggataaaaatagtgcctatcttatgaggttgttaggaggattaaataagatatttgtaaagagctcagaacaatgcctgacatgtaattagaacctagagaagagagcgttgttagaataagtaccaattggagcatctagcatcttacatttctgatcagtgaaatcctttctttctgtggaaattcaccccagttgtcctcataggaccaattctgtcttgtgtatatttactctggatttagctgtgagatacgctccagcccaggtggctgaggcttcgaggctgttcaggagagaccatggaaaacagttgtcagatggaaagccccacaaacaactggactgaacagggccctctcttttctcccttcccggaggctttagctctctttaacatgtgtatgagcgaggaagctgtatactgtatacaggtatgtgctcattcatttattcacttcctcaacaaacacttattaagcatgtattatgccccaggccccctggctaggtactagttggaggcaaagacagcatgtggctcctttcaggagtccccagccccatggtggggtgggggatgcaagcttgaaaagcaactattaaaagtggttgctgtgttgcagcggaggaatgccctgcgtaggggctttagggaagaggtcgagagaagataaagcatcagtcaagtctagatggaggaaagactctttaagagctcatatccacgagcaattgttaaagaaagtggggctctggtgcctataaaaataagattgggaggatgacatgagagttgaagggctgttgtggagaaggtagactagacttattttgtgtaacttcaagaggtagaaacaaacagaatcactgggtgggcatgacatggaagaacatttttaacttgaagtagttggcaaaaattcatagttgaagaacttgggacaaagagaaaataagggcagtaaaacaataaagataggaatgtcaatattaacacccaaaaatgtacactatgtgatcttataaggctgctgaagatgggccacagatttttttctgagcttctttttggccacatcaaagagggaagcgggatcagttatagcattcctggtggccaggcactcacacttttttggtcctgaaacccaagatggtttccctatgtgttattgaaaaaggaggttacaaatatatagcagcaagttttatgtggttaactctgagagccctgtaatcttcagtgaaatagcagccacagcaccaaatagcgtttaagtcaccgtgagtctataagagattcttcactgtaattgagcagcagcctctaggactgagggaggcaggggccacttcaggtcacatttaggggtggaaggaatagagccctgaagcccaggggtctgagcctccatgagatcagagtctgtcgcttattcctagaacacttaggacacttgggcatcctaagggaagcccgtggcttcaaggactcactgctgtgcccaccctcatacctttactgcagtttcttcctacaagttttagctttgcacatcaccagctctcgactgggcatctttgcctgggtactctttgggcactacagactcagcaaggccaaactaaatgtattttccttcctcccaacccattcttcttcctttcttcctacgtttcctattgtggttcataacaccgtcattcatctctatgcccaaggtggaaagcttagagcttatgccctctcttgcctctctactgggtcaccaaatactgaggactcaggctcagaatgatctcctttgtctgcccagtggcctactgtaggtccttagccttttttttccccttcaaattatagtgttgcaatagacttttaactgtttcatattttattttgctttttgtagaattaagggatgctcattgtatgtatgctgaaaatatatttcagtataatttgaaaagtgctgaaaaaataaagaatattattatttagaaaaaaacacaaataacatttggagtatatcttcataatgttttcttatggagatatttgttccatagattcttatttacagtgtgtataattgagatcatgttacataaatggttttaaatccttcttcacttatcattatcattttctcatagcatcaaaaattcttcaaaacatacttggaaaaagtgccgtaatttatttacttactccactattgttgaaaatgtatgctgtttcaaggttttatttgccctattacaaacaattctctgatgatgttctttatgtataaatatttatcggaatctattagtattttcttagtgtagtttcctaaaagtagaatcagttccttacgtgtgatcctatttatatctctttatatatacatatatattcaaattgatcttcagcatttttaaaagctgatatatattgaatgctttctctgtgccaggcacttttccagcagtcttatttgtattgactcatttaaacctggccactctatgataagctgtgaggaaaggatatgctttagctatgagtgaagaaattggttccatattggataagctagaagcagcacattctccaagcataccttctgaaactggagcttttctcatgtcttcagaagaggtagtcacaccagtgataagaatctggggatgatactgtggttttaggaggaggaatattaaattgaggtaagtgatcaaatccatcaagggattcagcccctgtatccaggaaaaggggttgatggactagggaggcttggggttgtcctctgtatgacagtaagttcctagagcagcaaaacaatccttaaaattagttagaaggagaagctgggtccagccattacatttctaatattatttcttacagcaagtgatttttctattcctagttaactcctaggtttgagggttcctgatatttcatacaagaagaaattatttcattttcttttgggtaaggacatcagcagatgggtgactgcaggcaattgaggtggggcaccttccatgggagagaaccagggattctaccataggaggcctgattggagtcaggatctgcctcccgcccatgatgcctgggctagaagctgttgctcagttcagtgtttgttgagccctttccatgtattggctggtactgggcacacaagtgcataagaaagaagcctcgggtattgctatgcccctca

SEQ ID NO: 98137 - DNA, 13303 bp, Homo sapiens
ctttaatctgagtaaagttgttggctttctaaaggccttttgctttagtaaaatggaaagcagccacctcaaataagcttcttcttgttaactgttccagacactttgtaatgtaccaataggtcccatctccctaaggtaatcacagcagaagccatgttctaatccatatttaagtgacatgttcactctggaagaatctatacaacttctcaggtagcctgcaaagttagaataaatggataaagaagtaaataactacagctgaaaaggggtttggggattatgtgatcgtttgatttgcctgtgaaaattctccatccaccactactaatatggaaattacaaattggcttttatattctagacaaatgccgctctcccttaagtcctttagtgtctgccaataatgtcattccagagaagaaactaagagataacctagaagtcacgggattagttcccctccaaatgaatgtaagcctctctacagagagagaagaatcaaatgtagattctgttagaaagtttagctgaaaacttgctctattcacactgtaataggctacttaatattttaactattcctaaaagcaaaacaattcaaagacccaccttccaccctattctctttcccaaattctcccttctctctctctctctcagttccctattgaatatctcagtattggaagattgcataggtagttgttaatgttttatttgtgaagataaaaaaattcctgttgttataaagctataatagtcaaaataatgtgatacttgcgatgcaacagtcacacagattactgaaacagaacagagagtacagaaatagacccatatagggccgggcgcagtggctcatgcctgtaactttgggaggccaaggctggtggatcacgtggtcaggagatcaagaccatcctggctaacatggtgaaaccccatctctactaaaaatacaaaacattagctgggcaaggtggcgggcgcctgtagttccagctacttgggaggctgaggcaggagaatggcataaacccgggaggcagagcttgcagtgagccaagatcgcgccactgcactccagcctgggtgacagagcgagactccatctcaaaaaaaaaaaaaaaaaaaaagaaagaaatagacccatataaatatggaaaatttatgcttgaaaaaagcaagcatcacaaaggcaattcagtggaggcagggtagtcttttcaagaaatggtgcaggaactattgtcattatccatctatctagcacttggatccttacctctcaacatacacaaaagttgaagtagatcataggcctaaatgtaaaacacaaaactataaaatttctagaaaaaaagcatatgagaaagtctttgtgatcttatgttaggcaaagatttcttagataccataccaaaagcctgatctataaaagaaaatgttaataaactggacatcaaaattaaaaactttaagagacactgggagaaattatttgcaaagcacaaaggacttttatccagaatatactaacaattttcataattcaacaatgaggaaaacaaacaacgcttgtctccaaagtgtgcaaagatttaaagatacttcaccagagaagatatgctgtggcaaatacacaaatgaaaagacactcaatggtagagaattggaaattaaaaccacattgagacaatgctatatacctatttgaatggctaaaatgtaaaagactaaccacatcaaatgttggtggggatgtaaaggagttcaaagtcttaaacattgctggtaggaatgtaagatggtataaccgatttggaaaacagtttggcagtttcctgccctaccacacaatccagccattccattcctaggtatttacctaagagaaaaggacatacatgtccatacaaatatttgtacatgaatgttcatagaagcttttattagtcccaaactgaaaacaatccaaatgttcatcagtggctgaatggataaacaaacatacaacaaatggataaatccaaatgttcatcattggctgaatggctattaaacctgatacaggttgaacatcccttatcaaaatgtgtagaaccagaagtgttttggatttgggatattttttcagattttggaatatttgcattatacttaccagttgagcaccccgatctggaaatccaaaatccaaaatgctccaatgagcctttcctttgagcatgatgttggtgctcaaaatgtttcaagttttgggggcattccagatttcagattttttgaattcagaatagttaaactatatacccataaatggactactacttggcaataaaaaagaacgaattgatatgcacgacatagacagatctcaaaataactgtgctgagtaaaaacagctagacaaaagagtatatactatatgttgccatttatataaaattctagaaaatgcagataatctatagtgccagaaagcctgggaatgtgggggtgggggtggagagagagataagacagagagattacaaaggggcactaggaaacatgtgagggtgagggacatattcattgtgaactctactgatggtttcacaggtagatggatacacatggccaagacttatcaaattgtacactttaaataagtgaaatctattgtatatcaattatactacaataaagctgttaataaaggtacattaaacaaaaatattacttcattacagaaattatgccatatatctctttgttgtcctttgcagactactggcagtagttggtctttgcacaactactgaaaaacaaaggaaactacgtaacatttttctgcaaagaaatttctccctacaccagaattccattctggcaaactcagtttgaaggagtggccaccactctaggccacagcaagaaatcatgagtgagttccttaataggtaccaggcatcttcttccagcactgtattttttaaaattatactttgaattctgggatacatgtgcagaaagtggaggttttttacatgtgccatggtggtttgctgcacccatcaacccatcatctacattagctatttctcctaatgttatccctcccctagcccgacaggccccggtgtgtgatgttcccctccctgtgtccatgcatcctcattgttcaactcccacttatgaatgagaacatatggtgtttggttttctgtttgtgttagtttgctgagaatgatggtttccagcttcatccaggtccctgtaaaggacatgaactcatccttttttatggctgcatggtattccatggtgtatatgtgccacattttctttatccagtctatcatcgatgggcatctgggttggttccaagtccttgctattgtgaatagtgctgcaataaacatacaagtgcatgtgtctttatggaagaatgacttataatcctttgggtatatacccagtaatgcgattgttgggtcaaatggtatttctagttctagatccttgaggaattgccaccatcttccacaatggttgaactaatttatactcccatcaacagtgtaaaagcattcctatttctccaaatcctctccagcatctgttgtttcctgactttttaatgatcgccattctaactggtgtgagatggtatctcactgtggttttgatttgcatttctctagtgaccagtaatgatgagctttttttcatgtttaacggccacgtcttcttttgcgaagtgtgtgttcatatcctttgcccacttttcgatgtttttttttttttcttgtaaacttgtttaagttccttgtagagtctggatattagccctttgtcagatgagtagattgcaaaaactttgtcccactctgtaggttgcctgttcactctgatgatagtttcttttgctgtgcacaagcggtttagtttaattagatcccgtttgtcaattttggccattgcctttggtgttctagtcatgaagtccttgcccatgcctatgtcctgaatggtattgcctaggtttttgtctaggatttttatggttttagttcttacgtttaagtctttaatccatctttagttaatttttgtataaggtgtaagtaaggggtccagttactgttttctggatatggctagccagttttcccaattgcttggattttgttaggtttgtcaaagatcagatggttgtagatgtatggtgttatttctgaggcctctgttctgttccattggtctatgtatatctgtgtttgtaccagtaccatgctgtttttgttactgtaaccttgtagtaaagtttgaagttgggtagcatgatgcctccagctttgttctttttgcttaggactgtcttggctatacagggtcttttttgattccatatgaaatttaaagtcgttttttctaattctatgaagaaagtcaatggtagcttgatcgggatagcattgaatttataaattactttgggcagtatggccatttttgtgataccatgagtatggaatgtttttccatttattgtgtcctctcatttccttgaggagtggtttatagttctccttgaagaggtccttccaatctcttctaagttttattcctgagtattttattctctttatagtcattgtgaatgggagttcactcatgacttggttgtttgtctattattggtgtataggaatacttgtgatttttgcaattgattgtgtatcctgagactttactcaagttgcttatcagcttaaggagattttgggctgagactatggggttttctaaatatacaatcatgtcatctgcaaacagagacaatttgacttcctctcttcctaattgaataccctttatttctttcttttgcctgattgccctgaccagaacttccaatactatgctgaataggagtggtgagagagggcatccttttcttgtgccagttttcaaagggaatgcttccagcttttgtccattcagtacgatgttgcctgtgggtttgtcttaaatagctctaattgagatatggtccatcaatacctagtttattggatttttagcatgaaggggtattgaattttattgaaggacttttctgtatctgctgagataatcatgtggtttttgtcattggttccgtttgtgatatattacatttattgatctgcatatgttgaaccagccttgcatagcagggataaagccgactggattgtggtggataagattttttttttccttacagacagaggttttattgtgtttggtccacagtcgtatttcacattatctcatggagcagggcccctgggtggggggtccctgtgcagtacttggaggggcatgtggccgggggagatggagcagtatagctggtcaggcccagaaggggagaagggctggggctccttaagacctactaaggggccgggcacggtggctcacgcctgtaatctcagcacttagggaggccaaggtgcgtggattacctgaggccaggagtttgagaccagcctggctaacatggtgaaacctcgtctctactaaaaatacaaaagtagccaagcatggtggcacatgtctgtaatcccagatacttggggggctgaggcaggagaatcccttgagctcaggaggtggaggtgcagtgagccaagatcatgccactgcactccagactgggcaacaactactaagaaaaaaaccctactgaggccacggtggtggtgtggggagttggggggattaggcccaaccactcagcatccacttccttgtacaggcctcactttccccactgggccctgaggcaggtctgaggtctgttggcctgagggtcctagggaaatccagccacttgggagcctgagatatttagcatcatagacaggccccctttcccaggggactcatttcccagcaccctctccactgtccccaccccattcctcaggaaaaaaaaatgtatttttcttttgttaatgcatcctgaaacttttgcgggtatagaaaccacaaactgatcggctgacaaaagtgggaagaggcaaggcaactggaaacctccgggtactggttccctccaagcccaggtctcttctccccggcacagctctgctggcagcctggacgtgccagcagggaccctcaccatacacatattgggatatggccktgaccccttctcctccacagcctggtggctcattcctgcgarggaccaaggcaagggggaagaaagccctgctgcctgattccacgttgccactcacagaccctcggttgattggcagcactgaacaggttaagaaaaaaaagatgaaaacacagaaaaacccaaaaacccagaaagggagataatgtggggagagagtgtgctgggagcctcagtagccagcctcctcctggtagtaagggggatattcagggacctctcctgggcccaggcagttgccagcacccaagggagccccgtcagccactgtgcctggcaggcagtacttggggtcacatatatgctggcccaggccaaagacctggctactatggttggtaccctgggtgtagcccatctgcagggacatggaggaattaccacacttgtcggttcccagcttggtgtcacagatgtgctgccgcgtcccaggagctgtcatgctcacctggctggcacagttatttgtacccatctggaggccaatgatcgagtggtccatgggggggcaggatgtgattcttggggtcacacagatgcctcttcacgccatacacggtcatgcccaactggctggtacatttgttggtgcccatttgcagcccgatgacgcactggccagccttcatggcggcgtcactgaagttctgctcctgcttctctgagtatttgatgccaatgtccaccccgctctgcggcctcttagtcttgaccttccctgctagggcaaaaagagacacctgcatgtgcctcatgttcccactctcaaacaggttgttggccttgaacaggtccatggggttcatgtcatagctgactacagccttgatgaagttggagaggttttccagctggtgccacttctgcatggagtggttgatcttggggaatgaggccggctgcagcttgttcatgagtatgcataagataatcccgtccttcaggctcttctggaagtcaggctcaatggagatgcaggtgagtcccttgatccagctgtgaagctctgcctccttctgggggtcatatttgggcaggagccagttcttgacctcggctgacagcccatactagacgcctttgttgaactgcgtggaactcatggctggcaggctgcgggatggggccacacgggacaggggtggataagctttttgatgtgctgctggattgttcatcagggatattggcctgaaattttctgtttttgttgtgtctctgccaggttttggtatcaggatgatgctggcctcataaaatgagttagggaggagtccctctttttctattgtttggaattgtttcagaaggaatggtaccacctcttctttgtacctctgatagaattcagctgtgaatccgtctggtcctgggcttttctttttggtgggtaggctattaattattgcctcaatttcagagcctattgttggtctgttcagggattcaacttcttcctggtttagtcttacagtattctctgatggtagtttgtatttctgtgggatccgtggtgataacccctttatcgtttcttattgtgtctatttgattcttttctctttttctctttattagtctggctagtggtctatcttgtttatcttttcaaaaaaccagctcctgggttcctgcactgtattctaaatctagtacactattttaccaaaaaagaaaaaggattcatcatcattttatccaagcaagcacgaaggcagtcttccaagaagtgaaatagaagagcaaacacacacacacacacacacacacacacacacacacacagacacacacaaacactgactggtagccaaaaatatttgtaaaatatttacaaaagctacaaaataaacgaaaggagagtaaagctgccagaggagagcagaatgtagttattgacaaatatattatttgcaaatggaagtttcagattcacctaatagttactgaattcttactatatgccaagcaatatgcttggaactttcaaatacattatttcaatcttcaaatgagcctgtaaggagtgattcataggccttactaatggaagaagacatgaaataacagactaaacaattcgccaaaagtcacacagcaggaaagctggaatttgatccatgatttgtggatcaaatccagtgcctcatctattataccacacttccccaagcattaattgtcccataaacttcattttaaaaataaatagaaaacaatgacagttaatatttactgacactttactaagaattagatccagtgctaaacactctagatatactagcttttcttagtccattcagtttagctataatgtcccagactggatacctaatagagaaaggaaatttatttcttacagttcgagaggctgggaagtccaaggttgagagacccacatgtggtgaacgacttcctgtggtgtcatcccatggtgaaagatggaagagcaagagacgacaagacagcacgagattcaatgtgcaatctcaagcccttttataatggcattaatctattaatgtgggttaacagattagtacccacctgaacacccctcactagtgcccatctctcaacactattgcattgtagattaaataacaaacacactctttctggggaacacattcaaatcatctttcatcctcacaatccatgaggtaggtacaatcatctctaatctacagctgggatatctgaggcctggaaagattaaataataacatgtaatgtgaatgaatccactcaagtataatagatgtttaagttgtctagttttctgatatgactgacatatttaatcttgattcctttagtatgatttgaagactatgttcaaaacttactgaaaaagtgatgatttcctttagttggtttagagagacgcaaactatagagttgtgatatactattctgtcaaactttcattttaagaaagcactgaggagtactttgttttcttttaagagactctaagtaaaggatgaagagaaattaactcaggctgaactacattaatgctgtaaaaatcctaaagtaacgttaaactttatgggttggtctttgttgataattagcttaatcagattgatcatttactgttcagcttgggaattatctttgcttatgacaagccatctgcatagttttgtagatggacattacttgccctcaatgtggttaagaataatataatctgaagtgtaaaaagatgattcatgggaaatcactgttgaggaaagcctagtattttctccagcttttacacactttggtaccccctgactattaactactctcactagaacactgaggctacatgtttagcagtcactgagcatgtcatgttcagtgttggctcacctaccaagagttaacgaccctaggaaatcagacacacactacccttctcaacatgtcccatctggtatgatttaggttcttagggatgtgttgtttgtttttattttcccatctctataaggtttttcacatcctattaaagagacttctaaggatagacactgaattcaaaaaaaatctgcagctctggtgtttaaatgactgttaaaagtacaactgcaggaatgacaacaaaactgcattcgctattgaaaggaaacagtgaaacctaatatcccatcctaccttccagcaaaatatgtatcgagcttttacaaagtgctgattctttaatatctggcataggaaatgatgttgagaataaatgataccactatttgttgattatctgccaatatcaaataacacattgtgagtccctgaggactcacgagggtcctcacagctagcattcctttcctcgaatttctttttgtattttggttcccataaaactacagttccattttctccaaagagattaatgttaagagaaaaggaagacagccttaaattcttgccagttgtgactattaacaactgtggaattaagatggagaattatctttttcttaaaatacttttatctttgaataaagtagcttttcattcaaatgtaaatatcttcaactgatgacacttctcctagatacagatacatttgaaaattatattaaatgacagaactttagttttgtccttgatcttatcatcttgaaaatcatgacatttttaggtaatgatgcagagaattctcttctctccatgctcccataacacaccacactctaatagttacatattcacagattatctcttgggctagactgaatcacataaaacaccacctttgcctctccaagatctataagtgcttgataaatgtttgtggaattgactggaaacaacttaagttttaaattttcatgtcctatatcagacagtgtcaaatggaaaccctgtattgtaacaaatggaatttaaagaggctaaagatgcaattttgaagtgaattttaggaaaaaaaggagttacaatgtgtctatgacctaagcatgctgcactgagaaattatccttcctaagtacctccattaatatgtcattccgaattttaatggctctcccctatgggagggtgtatagtcccttagcctgggaggcagtgtaccactgtaatatggaatataggccctgggtgtgactctcggccctacaactaactagcatgtaaccctgggcaggtaatgtaacccctcttagccacactttgctcaatgctgtagggttgctgtaataatgtattcaaagcatttagcaggtacttgacacaaagtaagtgctaaatcaatgttggctattaatatccaaaatgtaaagcctttaatactttgtaaaattaattgatttttcacagcttgagatataactcatataccataaaatccactcttttgatgtgtacaattcagtggattttagtatattaacagagttgtgcatccatcacaaccattacttctatctgaggacataaataccccaaaaagatacttcatattccatcagcagtcactttccattctcccagtcctttgaaaccactaatcaactttctgtttatagatttgcctattctggatatttcatacagtcacatgatacagtcttttgtaactggattctttcatttggtatagtgttttcaaggctcattcaggctgcagcatgtataaatacctcactcctttttatgggtgaacagtattccattgtatggatagaccactttttgttaatccgcttatcatttaatggacatttgagttgtttccactttttggcaattaggaataatactgctgtgaacatttttgtacatgtttctgtgtggtattagattttgtcacgtttcttctgtgatgatcacctggtttttgtcctttattccattactatggagtattacattgatttttttacatatataaaaccaatcttgcattcctgggataaatcccacttggtcatggtatataatcatttttatatatttctggattttgtttgctactattttgtcgaggatttttccatctatactcataagatgttggtatatagttttcttgtgatatctttgtctgtggtatcttctacatgttggccacaattttttgacccagaattatttccaatgccttgatgtgcatattatttcccagttcatctgactcccaacgtttctccccagtcccttcccaattccgttattccactaagactttgtgttctcctgcttcgagttgttgactaacactgccctttcttcccaattcactctacttatctatatcctacagaccctcaaatccctctttctcttgaaaccttgatagaccacccaacccctagagctctctcccttcttgagatgctgatgtcatattacaaactaacatttgcttactgcttaaaatttcccaaactcatattgcatttaattcccatgaccctgagaaacaggtatgtatgctattattaaaccaattttgtacaaaaccaagtggctggtccataattatatagctatgaagtaaaaaatagtaaaccctatgcttatggtggcattttaaagcaggggagggttctactgatacctcgccttctagctctgagattaagtttttatttaccaaattcagtctttcctccttcatgtagcaacaaatatttactatgtatgtttactatacataagatactatttgaggtactgagaaggcctaagggatagactccaaagagaatgtcctccccacaaatcttcatatatgaccagaaactgccatcttttgaaagtaaaacttataaaaatcaagactaaactgataagcaaatcagctcaaagatgaaaaaggagttacttatgagagtaaagtactgcttaaatattcaatattaattaattaaatcaagggcttttccaaatccagtatgtccttatggttgtattcctaatactttggtttgaccaactgaagtaaataaaatagtaacctcattaactgtaaaggtgatctgcatgaaacctaaagaaaatcaaacaatatcaaaattaatcaaaaggtgccagagagacttctgcttctaattgtaatggagtaaccgacactggacttgttttaccattataaacaactagaaaagtatatgaaattgttttattcaaacattggatatcaggcagtatgggactatgaatctagagaaaaggaaatccttttgtgcctaaactttctagattgcagtatggtatgaggagaccaaagcagaatatgatggtctgaattctgaccagacagataagaaagatcttgttgaacactggggacattcaacagaaacctcagaaggatttcagcttattaataagaataaactagtcttaacaaagcttaaaggtaagttccaaaagagacaagctgaacctcaagtaacttaactaccttttaggaaaaaaaaagtttgacattctttaaagaaaaacaacaaaatctctaagttcagcaatataatggtcacaatgtccagtatcctttcaaaattaacagaaaagccaaaaaaaaaaaaaaaaaaaaaaggacccataaacaggaaaaac

SEQ ID NO: 98138 - DNA, 64812 bp, Homo sapiens
gcggtggatcacctgaggtcaggagtctgagatcagcctggccaacatggtgaaaccctgcctctactaaaaatacaaaaaattagccaagcgtggtggcacacacctgtaatcccagctactcgggaggctgaggcaggggaattgcttcaacccgggaggccaaggttgcagtgatccgagattatgccactcactgactccagccggggcaacaagagtgaaactctgtctcaaaaaaaaaaaaacaaaaaaaaaccaggcctggcgcggtggctcacgcttgtaatcccagcactttgggaagctgaggcgggcagatcacagggtcaggagatccagaccatcctggctaacgcggtgaaaccctgtctctactaaaaatacaaagaattagccgggcgtggtggcgggcgcctgtagtcccagctactcgggaggctgaggcaggagaatggcgtgaacctgggaggtggagcttgccttgagccgagatcctgccactgcactccagcctgggcgacagagcgagactccgtctcaaaaaaaaaaaagcatttctctatgtaatatcttatatctactcatattttaaatgtacttagagctgaaaaataaaaaaagtcctaatgagttgaaatgaagctgatttaaaatgctttccccataaaaacagtctttttttttttttttttttgaaacggagttttgctcttgttgcccaggctggagtgcaatggcgcgatcttggctcactgcaacctctgcctcccaggttcaagcgattctcccgcctcagcctcccgagtagctgggattacaggcatgtgccacaccaggcccagctaattttgtatttttagtagagacagggtttctccatgttggtcaggctggtctcaaactcccgacctcaagtgatctgcctgccttggcctcccaaagtgctgggattacaggcgtgagacaccacggccggcccttaaaaacattcttaaagggcagcttttaattaactgttttggtgtggagaagggagaaagtttttctctgtcactcaggctagagtgcagtagtgatcgtagttcactgcagcctcaaactcctggattccagtgaccctcccaagtagctaggactacatgcacaccaccatacccagctaatttttataatttttttttttttttgagacggagtctcactcttttgcccaggccggagtgcagtggcgcgatcttggctcactgcaagctccacctcctgggtttacgccattctcctgcctcagcctcccgagtagctggaactacaggcgccagccaccgtgcccggctaattttttgtatttttagtagagatggggtttcaccgtgttagccaggatggtctcgatctcctgacctcgtgatccgcccgccttggcctcccaaagtgctgggattataggtgcgcaccaccgcgcccagccttaatttttataatttttttgtagggatgaggtcttgctatgttgcccaggctggtcttgaactcctggtctcaagcaatcctcctgccttggcttcccacagcactgggattacaggcataagctaccatatcaatccccagcttttaacttaaaagtactataaaaccatattcaatctactcttcatcaactttttcttttttttgagacagagatctcactttgttgcccaggctggagtgcactggctgttcacaaatgggataatagtgcactgcaacctggaactcctgggctgaagtgatcctcaggccttggcttctcaaggtgggacttcaggtacatgccacagtgtccagctttcagtcaattattaatgttctacctgaatagtgtccctactaaagtttttgaaagtatttttccatgaataaggggactgaaaatatgaatcaaatataaagcaatttaaacttggacaagtcacttagattctctgtgcctaaaatttgtttgtaaaacagtggagcctggattatttgacctctcggatctcttctaccaactccacagaatttattaaccttataaacttgaggcagaatcacagtgtagtatactatgttttcatgttttgctttattttaatgagaatcataagcgaaagagggctggatgtgatatattggaagagtagcacaaggcagcaactatgacctaggttctcatactttatcatttcacctttatttgtatattatctgtaaaactggtaaataaaaatctgccatagttcctatggttgtggagattaaatgaaagaaaatttgatgtaaatggtgaatcactatatgaatgggatcaattttttttttttttttttttttttgtggagacaaagtctcactctgttgcccagtctggagtgcaatggtgtgatcttggctcactgcaacctctgcctcctgggttcaagcaattctcctgccttagcctcccaaatcgctgggcttaaaggcgtgcgccaccacgctcagctaaatttatttatttttttttgtgagaaggagttttgctcttgttgcccaggctggagggcaatggtgcaatctcagctcaccgcaacctccgccttctgggttcaagccattctcttgcctcagactcccgagtagctgtgattacaggcatgcaccaccatgcctggctaattgtgtatttttagtagagatggggtttctccatgttagtcaggttggtctcgaactcccaacctcaggtgatccgcccgcctcggcctcccaaagtgctggaattacaagcgtgagccaccgtgcctagcctaatttttgtatttttagtagagatggggtttcaccatgatggccaggctggttttggactcctgacctcaagtgatccacctgcctcggcttcccaaagtgttgggattacaggtgtgagccactgcgcctggccaaatggaatcaatttttatcactattttattttattttttgagatggagttttgctctgtcacctaagctggagtgcagtggcgcagtcgcagctcattgtaacctctgcgtcccaggttcaagtgattcccctgcctcagcttccagagtagctgggactacaggtgcctgccaacacacctggctaatttttgtgtttttagtagaaatggggtttcaccatgttggccaggctgttcccaaactcctgacctctgatgatccgcctacctcagctttccaaagtgctgggactacagtcgtgagccaccatgcctcaccaaattttattattttcttttttgcaggtttacctcaatgtatgatcttccagaaacagttctgaaacctacaggttaatgaccttgtattagcataatatggtttgctaatattcacttaatactcataagtttgtagttggcaaagctggaaatagaactcaggttcactgagtgtcatcaatgttattctcatcagatcttgctgtttattctttttgaaactgcttattaatttgctttaaatattaacaacacagatactggataatagtaaatcataagaattttaaaattttgatggtatctcaactgatcagcttttcttaaattttctaggtttcctcagcacaggggaaagctttataggtggaaggtggaggccctgtgacttgcgcagaaaagtaccactgtaatttacttttatgggcacctaagcaggttgcccagggcaacttgtagattttgttgttgttgttgttaatactatctccttcagtcactgagaactcttttttatttttttattttttgagatggagttttgctcttgttgcctaggctggagtgcagtggcgtgatcttggctcactgcaacctccgcctcccggattcaagcgattctcttgcctcagccacccgagtagctgggattataggcatgcgtcaccacgcccggctaattttgtgtttttagtagagatagtgtttctccatgttggtcaggctggtctcgaactcttgaactcaggcgattcgcctgcctcggcctcccagagtactgggccttaaatgctggaattataggcatgagccaccgcgcccagctgagaactcttcttgttatcaaatgaccctctttactactggttctagaatttcgttcagctttggctcaaaacataatgcagaaaacgaaatctagtaaaaacagaagacaaattagctgataaactttgttggcataattagtaccataaaatctggaaaagctaaatcttaaattaaaaattttttagatttccaggataattcacaaatgtttatagattcagaaacaaaaggcccattgctttatactttacatcatagacaaccactgcagttttctaatatgggtttcaccttcttcaaacctgatattcttaaaatgtggagttcaaactgactatagttaagaacgaaacaaatagccaatacaaagaataataaaaggatgagttcaaattatctgccacatgtcatcaacttttattaaatgataaaaaggttaattaaaattgtaaatgatttttcagaagaaattacatcttaaaattggcctgtgaaagtggcttgaaaggtataaaaatctaccagtagctggtattagctttcttagtaatttaattttcagttagagaaagccagaccactttgacctttcgaagtcctttggtatagatacatatacatttaaaaagataaatgaaaacaagccattgattaataatgcccatcgcagaagctgtaattataaaattaagattttttgatgtcactgttgatgttgaatatagttaatagaaaagcaaaaataaaaaataaaaaaggtctaattttgaggcactcttttgtctctgctcaggcccaccgtcttccttgctaatgtttacgtttattattaatttttccatttatttatttacttttaccacaattaggggacagagaatgaaacctaaactttttattgcttctgtaaagagtgaatataaatgtaagattttttttttttgagacggagttttgctcttgttgcccaggctgcagttcagtggcgcaatctcggctcactgcaacctctgcctcccaggttcaagcaattctgctgtctcagcctcccaagtagctgggattacaggcccgcgccacctctcctggctaattttttgtatttagtagagacggagtttcaccatgtaggtcaggctggtctcgaactcctgacctcaggtgatccacccgcttcggcctcccaaattgctgggattacaggcgttgagccccggcgcccggccaccaaatcctttttcaaaacaactcccttctttgacacagtgcaatttaaataagtatacaattaacaaagtacgtttttcttgttcaaaaccatcactgaacagtttgcaacagtagggtatgaatgcatacaatctcgatggtctttacaccttcagaggctattcggacttaaggaaacgtgcatttacaagtgtaaatgtaaaagctcagtagttgccttgtaaagtgcttttcggggttgtggggttgggggtggtaggagtaggtggtgcctcaaattatactagcgaataccaacattcccaaacatctagccctctgcctaaactcacccggttgcggtctgtcattttcgctcttctttgttaattttttcggcaaagtcagttttcatgcagcagatggcaagaaagccggtgaacgcctagggacgtggccttttaaccgcacccaattaaagcagcaaacagaagatgaatagctgggtggatcagtatgtgtaaacctatccgtttaatccggggagctgttttcccgggtgaaaccacgaattctttctggaggttgcaactcgtaaccatagcaactggaagtggtcgccggctcccggatgttgtggggatctgcggccgcctggcccagcttcccgcagccgcccggcggcggcctgcgctccacttcgggagtggtagttcttctcttcaccgctgccgggcaggaggcgcaggcgggactacgcgtcacggcatgcactgcggcgcccagccggtcaccgcctgccggctgcagacgcctgcgagcaggttgtttttataagaggcgtcattggcgcccgagctgtgaccgccgccactggggcagccagcacaatcgggcggaggtggcgctgccccttcaggtactgtactaggcgggcttagaccccgggagggggtttgtgccgactgtctgagtccctggccgacacgctcggctcagtagaggagcagtggcggggtccgcctcctaggctggggctgctcgggcggggacttgacgcctggtgtcagcggccgcacgggcgacctcctcgggccgtgcgcgagtgcacagctccggaggcccgagccgaccctggggcgtccggtccggtggtcttgcagcctcmaaaccccgagtgctataccgaactgcgcgccaagggtgggagagctgacggcctgggccacccttcttccttcactgggcaggctttgaggtgcttgtcggtctggactgatgaaaatccatatggtaagatgttatgtgcgtcaccctgccgggtttaatgccagcctgtcttttgatgacatttgagcccccgtgatgtcaggaatagaaagattaaatattaaataatgcccggagacttccgctagcacgccagcctgatgatgatcaaatacctctccatatccttctccagttccagtggcctcctttagctttggtctccctaatcgatttgtcctcattagcagctgtcccatgcagtgccttgtacgcgttgtttatgtttagcactattgggagcgccaagtaaggtattttattgagtggtgaagtttgcactgttctgctctacttttattgaaaaacacagttgggcattcttgtagttagaatagctaactatatagtactatgaattttagatttgtctcctccaatctacaggatagtgcttgaaatatcgctattactgcatcgtatcttttaagattagaatcatattgggtcccacacgtctcaggggatatttatcacacacatccagtgtgaatggtttacttttattttctgagttcaggtcatatagcagaagatggagatggtgagggtattattttaattcatatttttttttttttttgagagagggtttcgctcttgttgcccaggctggagtgcagtggcgcgatctcggctcactgcaacctctgccttccagtttcaaacgattctcctgcctcagcctcccgagtatctgggattacaggcgcccgccaccacgcccagctaaattttgtatttttagtagagacggcggggcggtggggggggtctcaccgtgtcggccaggctggtctcggactcctgacctcgtgatccgcccacttcggcctcccagagtgctgggattacaggcgtgacccaccgcgcgggcgttaattcataatttttaaccttttacgctgagggcggaatttcagtcaaaaaagctgattaaaaatcagcccaaatacaatttaaaggtgtgggaaatactccttcttagatgaaaacagtttagaaaatagtgtaattgcaattttgtaaaccatggaacaaaaagtgaacataacttcttttagaaatgacttaaagggtccagagcggtggctcaggcttgtaatcccagcactttgggaggcccatgcaggtggatcacctgaggtcaggagttcgagaccagcctggccgacacggtgaaaccccgtctctactaaaaatacaaaaattagcctgtaatcccagctacttgggaggctgaagcaggagaattacttgaacccgggaggcggaggttgcagtgagccacaagatctggccaccgcactccaacctgggtgacagagtgagattatctcaaaaaaacaaaaaaaaaaaaacaaaaaaaaaaaaagagaaaaagaaagaaaagaaataaaggatattcacagttataaaagtgtagatagtgaaactagaaatgatttttcttgtactttcctgtatttttcaagttttctgtagaaaaaacttttaaaaaaggatgcaagtattaacagcactttgagagtttctatatcatttttttcactttctagtggaaagccccacccttatgcaaaaaaaaaaaaaaagcagcaattccagttatggactctatgaacattactttaaaaagaaaataaaggcctagagcagtggctcatgcctgtaatcccaggactttgggaagccaaggcaggcggatcacttgaggtcaggacttcaaggccagcctggccaacgtggcaaaaccccgtctctactaaaaatacaaaaattagctgggcatggtggcggatgcctgttatctcagctattcaggaggctgaggcaggagaatcgcttgaacccgggaggcagaagttgcagtgagccgagatcatgccactgtactctagcctgggtgacagagtgagactgtctcaaaaacaccaaataagcaacaacagtaaaaaacacaggcaaagtccctgttgctgcatctgtagactatatgaatttaagtgtaaattatttggagagtagggacaataaatgaaatagttggactcgaagaaaataacagatccgacaatttgtagcatttgtagatctcattttattttttggagatgatgtcttgctctgtcacctagtctggagtgcagtggcctggacacgacttactgcagcctcctgggctcaagtgatcccaacacagcctcccacatagctggggctacaggcacatgtcaccaggcctaggcctggctattactttttttgagacagagtcttgctctattgtatggtggttcagtctcggctcactgcaacctctgcttcctagtagctgggattacagtgtgattcaagctgagttcaagtgtgattctcctgcctcagcctcccagtagctgtcacatgtcacagacatgtgacaccatgccccactaaatttttttttgagacggagtttcgctcttgttgcctagactggagtgctatggcaagatctcagctcaccacaacctccgcctcctggtttcaagtggttctcccgcctcaccctcccgagtagctgggattacaggcatgtgccaccatgcccggctaattttgcattttttagtagagacagagttttttccatgttggtcaggctggtctcaaactcccgacctcaggtggtccgcctgcctcagccttctaaagtgctgggattacagacgtgacccactgcccctgacctaatttttgtatttttagtagagactgggttttgccatgttagccgggctggtcatgaactcctggcctcaagtgatctgtccgccttggcctcccaaagtgctgggattacaggcacgtagctgggattacaggcacacaccaccatgcccggctaatttttgtatttttagtagagatggggtttcaccataatggccaggatggtctcgatctcctgaatgcgtgatccggttgcctgggcctcccgaagtgctggcattacaggcgtgagccaccgcgcctggccctaattttaaaattttatgtagaggcagggtctcgctatgtttcccaggctggtctctttgaactcctgggttcaagcgattttcctgccttagcctcccagagtgctggatacaggcatgagagctccatgtctggcctgtacatcccatcttttgatctggtttcttttcactttgtacagttaaatcagaggtgaaagtacttagcttttcttcacttaagcctggaaaatcttaaacttgtcaacattgaatcacgttcagaaccatgttttatatgtctgatattttggcttatgtctatttttgtttttattttttgttatggttatgttggatatggactggtaagtagtataatcaatcattagcccacattttgctttctgttgtaaagggctacattgttcttccacagtaatatacagtacatttttcttttttttggctactatcagcccttaaaaattaagggggtttaccttaacaccaagtgtccattaacactggataaaatatctattctaaagtgttttacaaaaaacactggtaacacgttgtttttcaggttgtggtgttcatactttattttcttaggttgtcttctttggagcttgcctactccaaatgtcaatttcttttcaatattttttaccttataattttgtatattctgtgtactgagttggctcaatatgttattaggctttgggtctattcacagggcataagaaaaattcataattgattaacatgtctgatttactaactcattccacagtattattgtatgggttgtataattatattcttatgcaagttaaagaaagacttttaaaaattaggtgcatatgaactgctaaaatcatggaagtagtagtttttgaacatgttaagaacatgaacacagcagcaaggcctgttaagtccaaggtactttaaacaaaaaatgcagactcatctaacagtgcagaactgctggaggctgaattatgtttgtgtttctttgtggtgaagatgaggaagttgcagtattgtaagtgataaaggattacattttcacaaatttccttcctgacagttccataattgtaactagactaaaacacttggtttcaaaggtcatttgcaatgtattgcatcagataaacttggccatattttctctcaatttgagttctaagatgaaattcagccctatgatatgggaaggattgtaattaagtgataaataaagggattttttcccccaaagggtatttaatgtgtggaaacctctttaagggtctatagaattacctgaggaagtattagaaaataagaagtgggagttaagtatttttttctgtcatcacaggaagcctgaaatctttttttttttttaagtacttatccaaatcactattcttttaaaatcttacaaaatcttacttctggttcatattgccagcatgttgaaatgtaaaaagagcattaggttggaaatcagaggatttttaatgatgttgaggaagttattatttataattttctgttcgttttcatttggaatttgtaaataatagcaagctgcctttatgggggtatttgtgaagattaaatcagatatgaaaatgaaattgctttgtaagtggtggagttatctactcatatgaagtattattgtactaagtgcatttacataaagcacttatatgtttgaagtgtgatgccttgatgtgataaatactttttgactgggaagtttgatgaagaaaaaaagtcaaatgggttattcatttgatttcttggtagagattggtggctttttccagactgaaggaaacctggctcctctcctgactgtgactttgcactctgttgcatcaaatgtcctgaaactgcagtgtacttctgtggttgagcttttaattttggttttgatttgttttaatctcacttctataagtgtaagaatggtcatcagtctagtttgacaataggaagtagctattgtttttaatattctcaaatggatctttaagttatttcatgaacaatgagactacattgaatgtgaaatctcaggtcctctgagaaatacatttcatgtttaaagcattagtctttgagccaaagaaataatggagtttagatttttccttctggggaagttayctctggctatgagaggatctgacccttgagattaacttcaagttaggttgatatatagaatatttacgataaagaaaaagtattttagaaacaagtacatattggctgggtgtggtggctcatgcctgtaatcccagcactttggaaggtcgaggagagtggatcacctgaggtcaggagtttgagaccagtctggcccaacatggtgaaaccccgtctctactaaaaatacaaaaattagcctgacttggtggtgtgtacctgtagtcccaattactcaggaggctgaggtgggaggatcgcttgagccaaggagtttgaggttacagtgagctgtgatggtgccactgtactcccgcctgggtgagtgacagagcgagatcctgtctctaaaaataaagctataataaagacattaacaaataaaattggagctatttatcaaaactttgaacttaatactaattaataaagtagctcaaggaaaaaagtaagtagtgtaagctaccattaggcaaattatgctgagaagtatagtaagtgctatagattcaggggaaaatgaaatctgtatgtcagaaacagtgatctaggaaaatttcatgggagaagacagctttaaatacagaaatcagaatgaaggaagaaaagcatttcaggaagtgaagacatggagttagggttgtccattttgtgttcagaagacagcaattaaattacttcagccatatgacgaggaaagctaatcagattagttgcaaattaggtgagaaccagatagtgggagtttttcagtgtcacactaaggagtgtgtctttattgtacagaatacttactcttaaagttgggcagactctgagtgggaagaaaaatattttagcactgggtataagtgtatgtaacctgcagtctctttcatctttgcctctatgtttatagggtagtagtggtttttttttttttttgagacggagtttcattcttacgcccaggctggagtgaaatggcgtggtctcggctcactgcaacctccacctcctggttcaagtgattctcctgcctcagcctcccgaatagctgggattacaggcatgggccaccatgcctggctaatttttgtatttttagtagagacggagtttcgccatattggccaggctagtcttgaactcctgacctcaggtgattcacccgcctcggcctcccaaaatgctgggattataggcatgagccactgcgcccagcagtagtgtgtttttagggagggacagggaaggttgaaaaatggcactgtagaaagccatcagtaccatagcaattaaaccagcgttgtagtggttcaggaatagaaaatagatcagtggaacagaatagagaacacagaaatggattaataaatgtgtgggactttatatgacaaaaggtggcatttcaaattatagaaaaagtgtggaatattcaatatttggtttaatttccacttcacaccaaaagaaaaaaaatccaaatgcatgaattaaacagctaaatgtaaaagccaaaaactgtggaagtattagtagaaaatacaggagaataattttatagtcttgggagcaggaaaaactttctaaaacaagatacagaatctagatactataaaggacaccctgttttccagcctctacattgactgtataaaatttgaaacataataaagatactttaaaaatgtttgaggcatgctagaacattaattcatgacccaacttataaggaactacaaatcagtaatgacaatctaataggaaagtgaacatatgaatatagatgcttcacagaaaaggagatgaggatagccagtaaacacaagatgcacagccccactgaagtcttcctggaagtgcagattaaggaatttattattttgctcatgagatgagcggaaattaaagatggttgttactctgttggtgggattgtggagaaataggtactttcatatgttgttggcagcaactttgtactacctttgggagagcaatttagcaatatctataattttttttgtttgttttgttttgtttttgtttttttgagatggagtttcactggagtgtgcctggcctttttaatttatttttgagatggagtctggctctgtaacccaggccttagtgcagtggtgtgatctcggctcactgcaacccccacctcctgggctcaagcgattcttctgcctcagcctcccaagtagctgggattacaggcacgcaccatcatgcctggctaatttttgtattttagtacaggtggggtttcaccatgttgaccaggctggtctcgaactcatgacctcgtgatccgcccactttggcctcccaaagtgctgggattacaggtgtgactcaccacccctggcctttttttttttttttttttttttttgaggtagagtatcttgtccaggctggagtgcagtggtattatctcggctcagtgcaacctccacttcctgggttcaagcagcaattcttgtgcctcagcctcccgagtagctgggattaaaggctcctgccactatgtgggcctagctaatttttttgtatttttagtagagatggggttttgccacgggccaggctggtctcaagtgatcctcccaaagtgctgggattataggtgtgagccaccacgccctactaatttgttgtatttttagtagagatgggtcttcaccatgttgcccaggctggtctcaaactcgtgagttcaagcgatttgcctgccttggcctcccaaagtattggaattacagacgtgagccaacgggcccggcctgtggcttttcgtggagttcttagaacgtaagttttctgtgctgttgtgccttctactttctctaccttttggaatgtcttcactttccagtcccttttacctagataatttgaattactctctgaaggctcaacctacttttcatgagttacagatatttgcttcttaaggatctttttttatcagtttcattttgatattttagatgtgaattcaatttggttgacagagtcttgctctgtcacccaggctggagtgcagtggcacaatcttggctcactttaatctctgcctcctggattcaagccattcttctgcctcagcctcccaagtagctgggactacaggtgcccaccaccatgccyggctagttttttttttttttttttttttgtatttttagtggagatgaggtttgcaccatgttggccaggctaatctggaactgtacccgacctgacagttgatctttttaatatttagcttagcttatctctaggtgtttcatccatagaactaaatctcagttgtgttcaggtacaaaaaagatggaaaactactcattcattcttcagaactgttttcaggacttcaaggaggccttccctaaccaccctatttaacattccagttcttgcaccatccccacccctactctgccctcacttttttctccatggcactgggcaccagctggctaactctgtcttcaaaaagtacttttctttgggggaggtttttcttttgtttttgttttctttctttcagtcctgtatcttcagcacttagaagagttcatggcacacagtaggtactcaataagcatatgttgaaagaatgaatgcagtttcatgttccggatgaggataggctcatttaaaatattttcatatgtttattagacaaaaagtagccttcaaaaaagttttcatgctgggcgcagtggctcacacctgtaatcccagcactttgggaggccaaggcaggcggatcatgaggtcaagagatcgagaccatcctggccaacatggtgaaaccgcatctctactaaaaatacaaaaattagctcggcatggtggtgcgcacctgtaatcccagttacttgggaggctgaggcaggagaatctcttgaacccggaaagcagaggttgcagtgagccgagatcgcgccactgctctccagcctggagacagagtgagactctgtctcaaaaaaaaaaaagttttcattagttgggatcttgtatcctcttccctttctcaagtgatgtgttttaaagcagacattttcatatcctttggcggaggtgaaagacccagaccttttgaaaagtattttacaaatacgttcttgaaagcactccagactgactcgcttatctttggtcacatgacagtacagctgcactttgaggcctttgcctatagcctattggttgccttacttcggaattgtagacgtgtgggagaataatgctcccattcttctccatcttgtctagttctagaagatataatggtaatggaaacctcacctttttcatagtaaaatgtagctacccaggaatgatgaggggcaccatcatatcaggtaatattcattccagttatattttatgaggtaaaattgatactgttgttgtgttgttcttacagattttgacaggctccaccaaagtgtttttaaatgacttatttagcctctaactctcccctgaattcagtctccagacgcctactttatgtttcctcttggatgtgataataactatctcagatttaaaatgccccaaaccaatttgctggtttccttttcttcttcttctttttttttcttgagatggagtcttgttctgtctcccaggctggagtgccgtggcatagtctcggctcactgcaacctccacctcccgagttcaggcgattctcctgcctcagcctcccgagtagctgggactacaggcatccaccagaccacctggccaatttttgtatttttaatagagacagggtttcaccatgttggtcaggctggtcatgaactccttacgtcaagtgatctgcccacctcggcctcccaaagtgctgggattacaggtgtgagccaccatgcccggcccaatttactgattttcttctcataacctgctctttttgaagtctttctgcctcagtagctattccattctagtactcggtgaggccaggagtcatcctttataccccatattcaatacatcaggaagtcctgttggctgctgtacctttgaaatccgtgtataatctgtccatttctcactgtcttcactgccaccattctagtccaaaccaccatcatgtctcacctggattatcatagtagccatgcaaatgaacttcttgattctgcctttgctcccccacaatgctgtcccagtaggtagccagagtgatcttttattccttttctcaaaacgcttctgtgacttttagttctcagagtgtaaagctaaaacgctttttaaaaggagtcttaggatctgtaagccctactcagtctgtccccttgccaccactctgtttattatcttgtgggtttttttttttgtttgtttktttttgagayggagtctcgctctgtcgcccaggctggagtgcagtggcgccatctcggctcactgcaagctccgcctcccgggttcacgccattctactgcctcagcgtccgaagtagctggaactacaggcgcccrcyaccacgcccggctaatcgcccggctaattttttgtgtttttttgtagagacagagtttcactgtgttagccaggatggtctcgatctcctgacctcgtgatccgcccacctcggcctggagtgctgggattacaggcgtgagccaccgcgcccggcttatcttgtgtttaatcttttcctcctctctcctgctaggcgatccacacaggcctccttgctgtttctcagaggtagagctctgatctcagctttatagctactatttcttaaatgctcttcctccagttaactgtatataatggtgcctcactcattcaaatctttgctcacatatacttcagcaatgaagcttgccctgaccatcgtttttagagttaagcttctctatcccagcataaatctatcccagaataaatctcctcaaatattttacagggtttgactgtttttgtcgacataagtctaaggtttttgacctgaatgtgtggtgactcttgcttgtaatggctgtattgtttttggctactgcaattctgtgagttagcagaaataggagcagcaggaagatgatttcagtattgtagctgttgtgtgttaaacacttgagaaacctgcaaggggacatcaaaagcaattggaaatatatgactagagatcgagttaaagaaactactctgaggaataaaaggaagcctgagcctaaacagagcttcaagtttattgtcttcacaaagtattcttctttttataaccgtatgatttcttagcctttgtaactgtcctgtaaattctgcttatttctaaattactattagtaaagctcttaaaatggggagggtttatacatttaccaatggtcagattaatgggagaggaagctcatggatttctccagaattttgagttcttttttttttttttttggaggtggagtcttgctctgttgcccaggctggagtgcagtggtgcgatcttggctcactgcaacctccacctcctggtttcaagcaattctcctgactcaggctcctgagtagctgagactacaggcgcacgccagcatgcccgactaatttttgtatttttagtagagatggggtttcactatgttggccaggttggtctttaactcctgacctcctgatctgcctgccttggcctcccaaagtgctgggattacaggtgtgagccaccgcacccagcctaattttgagttctgtaaagaacaattaactgcactatcacccagacgtggttacctttcttgtttattgattgcttaatatgtatttagcattcattcaatrtgtgttgggaatacattataggctggtaaacaagcaattacagcacaatattctatattaagtgccagatgsagaaaataataagagtcttagggatggggtcaagggatggttctcaaaggaaatgaaccgttagctgagacaagcagaggagtttgggtggaggtaaaggggatgggcaactgatcagaataygtaaagccctggagtaaagacaaagccaagcattttgaggggaactgagaaggttgggcaaagcgggaatgaattaaaagagatgagagctagagataaaatacttgatattcaaggctttggggcattatcttgaagaaaatcttaacattttaaaggaattacataatgagattatcatttgaagatctctagctataatggggaggttcaaactgccagggggctttcatattcactgtgtctaggatagggcttaaaaagttacttttttttttttcctttgattgtagtacacgcccaacattttgagaacagttgaattaatagggttctttagtaagcctgttagttttgcttatccaaattgtcatggtggtgttagggccagcgggaaatctttttctcttttgggctggatggtgttaccaaaacaccaggggtttggtctaggtcctgctgcttgccgcacagaaagccaatcacagagacgggtattgccagggaagaaggctttaattgggtgctgcagccaaggasatgggagatcagtctcaaatccatctcagtctcaaatccatctctgactgactaaaattagaggtctatatagcagagaagaaatgtaaccatgtgtgggcaaacaggaattagagaggggtgaggaagagaagttggtcaacaggcagcaggtggtcagttaagcaatcatgcaggctctggcttctcattgtccagttgcagtgatctgttaagtaagtttcagcttcttaatactatctaggaggcctgatggtttgtttcctaagaaaggagcttagataacacaaatagaactttctcaagttttaagactgtgaggatcaatttctgtatttattcagagaaaccataaagatcagwtctgtgggataattggctggtttcaatgttatctttccttgaaggaagtaaacaaagcattaaactggggcctgattaaagtgggcttattgatttgagaaattcaagtatggtaagttgtcccaagtcagtaatgtattttacttttttttgtaatctgttagaagatgggagcaggcaaagggaaggagggaagctttcacacagtggagaaagaatgctttttaggcttcagccagtttttcttatcacaaagccctcacctacttcttgtttcatatagaattcttccagttacccagtcacttaaaccagaaacctgtgagctatcctacactttctcccttatatagttggttattcagtcctttaataaaataatctttaggctgtgtacagtggctcacacctgtaatcccagcactttgggaggccgaggtgggtggatcacttgagcccagaagtttgagaccagcctaccaaactagcaagaccccgactcttaaaaagaaattagctgggcagggtggcacatacctgtatagtcctagctacttgggaggctgagatgggagcatctacttgaacctgggagtttgaggctgtgttactggtggagggtgtccaggttcttggcatcttgaacaaagaactggacaaaacacacagacaaagcaaggaagggatgaagtcagagatttattgaaaatgaaagtacactccacagtgtggtggcgggccctagcgtaggggctcaagggcaccgttatagaatttgtgggggtttcaataccctctagaggcttccattggttacttggtgtataccctatgtgaatggagaggtgaagtaaagttacaaagtcatttacttggtgtatgccctatggagaggatatttcctgtcatagctgaagtgtgaatcggcctaatgttccctgcctccagaccctattttcccatctcagcaagccgtgttcatactactgtactccagcctgagtgacagagtgagaccttgcatccaaataatgataaaaataataaaataacctttcatgtcttctcagatctcttcaaaacccttcccgctatcttctaaaccctttccctcatcaacactggttaagttcagatgctcatatttttcatggaatattatgttgcttccttgcatcccacaggtctagggttgttgagttgcttccctatcttgaaaaaaaacatttttttgagacagggtcttgctctgttacccaggctggagtgcagtcatgcagtcatagctcactgcaactttgaactcctgagctcaaatgatcctcctgcctcggcttcccaagtagctaggacaacaggtgtgggccaccgtgtcctgctgattaaaaaattttttttggtagagatggggagtctcactatgttgcccagcctggtcttgaacgcctggcctcaagtgatcctcccacctcagcctccgaaagtgctgtyacaggtgcaagcygccactcttggccctgccatcttaatatatgctatttaatttaattaattaatttatttattttgagacggagtttccctcttgttgcccaggctggagtgcaatggcgccatcttggctcaccgcaacatccgcctcctgggttcaagcaattctcctgcctcagcctctcgagtagctgggattacaggtgcttgccacyatgcccggctaattttttgtatttttagtagagacagggtttcatcatctttgccaggctggtgttgaactcctgcccttatgatctacccgccttggcctcccaaagtgctgggattataggcgtgagccactgcacctggccaaatctgaccagatacaaccgcttatgcctgtcatcctagtactttgagaggccaagaaaggtggatcacttgagctcaggagtgtgaaaccaacctgggcaacatggcaaaaccctgtctttacaaaaaatacaaatattaggcatggtggcgcacacctgtagttccagctactcaggaggctgaggtgggagggtagcttgagcctgggaggtcaaggctgcaatgaactgtgttcatgtcactgccctccagcctgggtgacaaagcgaaatcctgtctcaaaaattaaaaaaaaaatcatggccaggtgcggtggcttcatgcttgtaatcccagcactttgggaggctgagttgggtggatcatgatgtcaggagatggagaatctcctggcctttagtagagatggtgaaaccccgtctctactaaaagtacaaaaattagctgggcatggtggcgcgtgcctgtaatccccgctactcgggaggctgaggcaggagaatcgcttgaaccagggagtcagaggttgtggtgagccgagatgacgccactgcactccagcctggtgacagagtgagactccgtctcaaaaaaaaaaaaaaaaaatcaaatctgatcttttaaactatatttgtactagattgtcttttttattttttatttttttaaagaactttcatattcttttacatttttctgcctttgtttttcctgtgtgatgctttttcctttttcactgggacatctttccttgtcatcagatcttttgattttttttttttttttttaggaatcagaaatcgttttgtttgttttttgcaatgttgcccaggctgatcttgaactcttggacttgagcggtccttccgtcttggcctctccgtgttggggttacagacgtgagctaccacacctagccccccccccccctttttttttttttttaaagagtcaaggtttcactgtattacccagtctggagtgcaatggcagttcacaggcatgatcattatggctcttaacagccttgaactcctggcctcaagggatcttccttcctcagtctcccaggtagctgggattaataggcactctccactgcttccggctccagaaatcttcattttaatgtagtatctcaatttttaaattttgacaactgttaatttactttaaaaaatgctatcaaatttgcagcctcatttatagagatttccttgatcattctcctttccccctgcaaatttaattgctcagtctttgtgtatttctgtcattgcataattttcaagctattataaacatgattctcatacaaatagacattgatacatatcataaacttttttgaaagtcctgaaaaatagtggaatgagaaattgggatttatatagtcagtttaggccaggtgcagtggctcacgcctgtaatcccagcgctttgggaagctgaggagggcggattgcttgaggccaggccttccagaccagcctggccaacatggccaaacgttgtctctacaaaaaatacaaaaaattagctgggcatagtggcacatgcccacctacttatggggctgaggcaggaggatcgattgagcttgggaggtcagggttgtggtgagccatgattacgccattgcactcaagcctgtatgacagaacgggaccctgtcacactcaaaataaagaaaagaaatatagtcagtttaataaagaatgctgaaataaaattgctaagatataaacgtggttaatatcctacagggtatttaaactgtagctttttggataacctctactgactggacagaaaaaatttattttaccgtagtagttttctgtaagtttacttttaaatttgtagagttataaaatgcctgggccttaattgaaattagaaataaaacaattagatgacctcaggtgagcctattacaaaatgctcttgtcataacattaaaagtcatacaattgataccttatttcaggttttgaataattcatttgaaacatgttaatttttatactattagcgaccaacctttttgtatcctctctttttgaaatattaatgtacaggagttttcagaataattaacagattatatagatctgacttgaggctaggagtttgagaccagcctggccaacattcgcaacgagtgaaacctcgtctctactaaaaataccaaaaaacaaaacaaaacccccaaaaacagattatatagatctgtatttttgccctgttctcatttgagcactagttccatattgtcttcagtagagttctattagaacttggatctaatgtgttcacagtatatgtccaataacagaagcataagacacatgtagaataaatcaggagtactatttgctttactaagttgggttttgaagtttaaaggagtttcagatacaaaaagaaaaaaccaggtggagtgaccattgtatgctggcttagggcttgagtccaggttgttgccagtgaccagatgtttgtaaccaacctctggtgtcttcccccctgccccaactttaacacaactgaagtattgctgacacagttattttcataaaaacagtttgattgccgggcgcagtggttcacgcctgtaatcccagcactttgggaggctgaggcaggcggatcacgaggtcaggagttcgcgaccagcctggccaacatagtgaaaccccgtctctactaaaaatacaaaaattagtggggcgtggtggcacgcgcctgtagtcccagctactcgggaggctgaggcaggagaatcacttgaacccgggaggcggaggttgcagcaagtcgagatcgtgccaccgcactccaaccggtcgacagctcgagactccgtctcaaaacagtttcatcatgtttcttctatgtttgaaaatgtaaattacttcatgttgccaacatacagacttcattttcttggcataggagcttttcagtttccctgtgcttctcagtttctgcagtcatgtttttcacaccttactgttcattgaaaatagagtcctttactgttgctgcctgctccccattcacgattatccttttccttcacctctgtctggccaaatgctacattttcttttagacataactttctccttcattccaacaatataactgttgagactgttctagtccaggagggtctccttatcttagaagtttgcttctatctgttcatacaggtatgcagtcctgtsatgttctgtatggtaaatctatgggtggcttgtctctgtttcacctggaagacagtaaaccacttttcaaacttagtgtcacatatagtgcttcctatagaattaaaaaaaatgtgtctcatgagtcaatatgtttttrtatttgtagacctgaaagatgtctgaaaattccagtgacagtgattcatcttgtggttggactgtcatcagtcatgaggtatgatatttaatactttttataaggtaatttgtaatattaatgttaccagtgatgtaaactgtgttctttgaagatcagtctttttctacctttaagcaaaaagttccaatggacattttccctctcatattaaacttcactgctgaaaacgcttcatgagccagcatcttctacattattgtacatagctttgagacattaggcaaatatttattgaaggtttgttattgttcaggccctgtgctttactttcattttcatataattttgtctttttttttttttttttttttgagacagagtctcactctgttgcccaggctggagtgcagtggcgtgatctcagctcactgcaacctccgccccactggactgaaatgattctcctgcctcagcctcctgagtagctggaattacaggtgcctgctaccatgcccagctaatttttgtattttcagtagagacgagtttcaccatcttggccaggctgatcgtaaactcctgacctcgtgatccatctgcctcggcttcccaacatgctgggcttacagatgtgagccactgtgcctggccaattttgtctttttttttttttaaagggacaggatcttgctctgttgcccaggctagagtgcagtggctgttcacatgtgcaatcatagtaccatgtaacctttaactccttgggctcaagtgatcctcccaagtagctgggactataggcatatgccaccataccctgttcttaaataattttgaatatttcactgtgatacatactgttttcattcttattttatagttgagaaaactaaagcttagagaggttaagtaatttggtcaagattatgcagctagaaaatagatcctggatttgaacagatcagaaaggagaatggagaacatgtgttccatttacgttatagcagaacttcacagggaaaaggccagaaccctatcacaaaatgaattttataatagaagattgatatacatacaacaagtatacataacttgtacattttgtttattttttcataccagtaatatatgttcactgtagaaaaatggcagtatattgataaacagaaatatacttactccaggttttactccaggttttaatggacatctataattttcccatttgtttttagggtattgtaagcctcacttgttttctttttttcttttttgagatggagttttgctcttgttgtccaggctgtcgctcttgttgtcttgtacagtgacgcaatctcggctcacagcaaccttcgcctcctgggttcaagccattctcctgcctcagcctctggagtagctgggattacaggcatgtgccaccacgcccgactaattttgtatttttagtagagacggggtttctccatgttggtcaggctggtctcgaactcccgacgccaggtgatccgcccgcctcggcctcccaaagtactgggattacaggcgtgagccaccgtgcccggccacttgtttttttaataaaaattataggccgggcgtggtgctcacgcctgtaattccagcactttgggaggccgaggtcggggcagatcactgaggtcgggagttcgacaccagcctgaccaacatggaagaaacccggtctctactaaaaatacaaaattagccaggcgtggtcgcacatgcctgtaatcccagctatttgggaggttgaggcaggacaatcgcttgaacctgggaggcggaggttgcggtgagcagagttcgtgccattgcactccagcctgggcaacaagagtgaaactgtctcaaaaaaagaaaaaaaaaattaaaaaatttttgttttttaaactattagttaaggttcaggtagttatgtttagaaaacattaacagaaaaaaacaagattgccttttctgcattaaaatttcaaaatttaaaagcatctatcatttgagattgagatgattcttctttttaaaatcttcagtgacttttctatttttagcttgttttcttcaaaggattagatcaactcccatagcaacttctccttcaaggataattaacaatataggagcaaggcagctatgggagtcttacctgttagtctgcagggtggagtatgacagcagacctctgtctggcactcagtcaagtgtgtcattagggtgttctgtactggatgttatgtcccagattgaatcatatttgtacttttatctctcttcttctatatctgctttccaggttctactctttcttgctaatttctcttacatgtgtctccttttcctctcccattactgccattctcatttgggccagaattggtttccccagcaattcctaatacataaccttgctttagcctctaccattctcctgccactatagacaacctcggagtcttgcattccgaattctcattagggctcaacttaaacgctacttttttctttactttttttttttttgagatggagtcttgctctgtcgcccaggctggagtgcagtggcaggatctctgctcactgcaagctccgccccatcggttcacgccattctcctgcctcagcctctggagtagctgggactacaggcgcccgccaccacgctcggctattttttttttgtatttttagtagagatggggtttcaccgtgttagccaggatggtctcgatctcctgacctcgtgatccgcccgcctcaggctcccaaggtgctgggattacaggcgtgagccactgccccggccctacttttttcatgaattcttttaatttttgctgtcttgagttatgtatacgcaagagaatgcagacctttcgattccatgtgtcagcagactatagtggggacatagggaaagacggaatcaccttagtggttaactttgttttacaattaagacacaaagaaaaattgtatgatccgctattattaatgaaaagacagtctgacatcaaagtaggaaagataacctcagaataaaaagatagtctaaaattgtgtgaggagagtattcattaaccctataggtttatttaatccatgtcattaaagctttagccatttttagtttatagtgccataataagtagttatttgcatatgggtgtttctctgaatatgttgtaaaattgaattttggatttcattttttttttttttttttgagacggaattttgctttttttgtgatccaccggcctcagcctcccaaagtgctgggattacaggcgtgagccaccrtgcccagccagatttgaattttttatatcccacagcatctagcgaagtgccttgtctagagtagttccataaatgttaagtagaaacaaattattatagaaataaccaaatttagacccttattctctggaattcaaatttattgcttgagctcataaaatagagcattccacttttgggctgacctgacttagaatttaaacctgagactccattgtgccattttcctgccataggcctttgtggactaaattgaacaaaagcttgtctaattagatactgttcctttggagtatggcagcatctgagacttttaataatggaagaagcatttacatgtagtcaaatctagctttgaggagctaataggcaaataactgaaagattatcacttttccttaggggtcagatatagaaatgttgaattctgtgacccccactgacagctgtgagcccgccccagaatgttcatctttagagcaagaggagcttcaagcattgcagatagagcaaggaggtaagttgttcacaaattctaattttttttttaatatgatatatgagtgatattatgagtcttgccttctttccaggtgggtggcctttctggctaatctaaggggtcgttggaggattagaacttcagtgtaggttgggcacagtagctcacacctgtaatcccagcattctgggaggctgaggtgggcggatcatttgaggtcaggagttcaagagcagtctggccaacatggtgaaaccctgtctctactaaaaatacaaaaaattagccgggtgtattggcaggtgcctgtaatcccagctactcagaaggctgaggcaggagaatcgcttgaacctgggaggcggagtttgcagtgagccgagattgtgccattgcactccagcctgggcaacagagtgagactccatttaaaacaaacaaacaaagaaaaacttcagtgtggatttggtgaaggcccacagaacccagagtcatcagcctgccccaggggtttatttgcagctgtagtatatttttgggttttcagatacactttgttgctacagaggtaaccagtgacaaaaaaagtgtttcatggtttaatctgaatttgtttggtagtttctatttccttgtcatttgtttggtagtttgtatttacttgtcattattaaagttaagaaaaaaattattcattgatcacaagagatttactaacctgttttccagttattatcatgttgatggagttacagacatgcctctcattttattctgctttgctttattgtacttcgcagatactacattttttacaaattgaaagtttgtggcaaccctgtgttgagcaagtctattaatgccatttttccgatagcatatgcccacttcatgtctctgtgtctcatttttataattataatatttcatttatttttattttattttattgaattgaattggcggagtttcgctcttgtttcccatgctggagtgcaatggtatgatcttggctcactgcagcctctgcctcttgggttcaagttatcctcctgcctcagcctctcagctgggattacaggcatgcgccaccgtgcccagctaattttgtgtttttaatagagacggagtatcatcatgttggttagcctggtctcgaactcctgacctcaggtgatccacctgtgtcaacctcccaaagtgctgggattacaggcgtgagccactgcgcctggcctgtaattgtcatatttcaaactttttcattattattacatcagttatggtgatctgtgatcagagatctttgattttactattgtaattcctttgggacaccatgaaccgtgcctatgaaagacagtgaacttaataaatgtgtgtgttctgactgctctactgacttgccattcccccatctctctccctctcctttggcctccctgttcctggagacaacaacaatattgaaatcaggccaattaataaccctacagtggcctccaggtgttcaggtgaaaggaagagttgtgtgtctctcacttcaaatcaaaagctaaaaatgattaagcttatttgaggaaggcatgtcaaaagctaagtctcttgggccagatagttagccaagttgtgaatgcaaaggaaaagttcttgaaggaaattaaaagtccttcttagtgaacacatgaatgataaggaagccatatagccttattgctgacatggagaaaattttagtggtcttggtagaagattgaaccagccacaaaattcccttaagccatagcctaatccagaacaagtccttcctaacttgcttcaagtctatgaaggctaagagtggttaagaagctgtagaaagaaaggcggaagctagctgaggttggttcatgaggtttaaggaaagaagctatgtccgtaacataaaagtgcaaggtgaagtagcaagtgctgatgtagaaggcgcaccaagttatccaggagatctaactgagataatggatgaaggtggctaccccaaccagcagattttcagtatagatgacacaactttctattggaagaagatgccatctaggactttcctaactacagagaagtcaatatctgcttctaggcttcaaagaacaagctcactttcttgttagaggcaaatgtagctggtgactttaagttgaagccagtgtttacttaccatgccttgagaaatcctaggacccttaaaaaatatgctacatctactctgcctgtgctctgtaaatggaacaacaaagcctaggtgacagccatgtgtttacaacatggtttactgaatattttaagctcagtgttgagacctgctgctcagaacaaaaagattcctttcaaaatactagacattgtatagcaatacctggtcaatcaccgaagggctctgatggagatgtacaaggagattcatgttactttgtttcctgctaacacaacatccagtctgtagtccatggatcaaagagtagttttgactttcaggttgtattatttaataaatacattttgtaaggctgtagctgctatagatagtgattgttctgatggatctgggcaatgtgtgtgaattgaaaatcttcaggaaaggattcaccattctagatgcctttaagaacaattgtgatttgtgggaaaaggtcaaaatatcaacattaacaggagtttggaagaagttgatttcaaccttcatgactttgagtggttcaagactttaatggaggaaggaactgcagatgtggtagaagtagcaagagaattagaattagaagtggatcctggtcgggtgcggtggctcatgcctataatcccagcactttgggaggctgaggtgggcggatcatgaggtcaggagatcgagaccatcctggctcacacggtgaaatcccatctctactaaaaatacaaacaattagctgggcgtggtggcaggcgcctgtagtcccagctactcgggaggctgaggcaggagaatggcgtgaacctgggaggcggagcttgcagtgagccaagatcgcgccactgcactctagcctgggcaacagagcgagactctgtctcaaaaaaaaaaaaaaaagaagtggatcctgaaaatgtgatccaattgttgtaatctcatgataaacttgaacagataaggagttgcttcttatggatgagcaaagaaagtagtttcttgagatgcaatctactcttggtgaagatgctgtgaatattattgaaatgacaacagaggatttagaatattacacaaacttagttaataaagcagtggcagggtttgagaagattgactccaattttgaaagttgttctactgtgggcaaagtgctatcaaacagcattgcatgctacagagaaatctttcatgaaaggagagtcaatccatgtgggaaacttcagtgttgtcatacttcaagaaattgccccagctactccacccttcagcagctaccacagtggtcagtcagcagccatcatctttgaagtaagactctccaccagcaaaaatattacaattcactgaaggctcagatgatcactagcactttttagcaataatgtatttttaaattaagatatgtacagttttttagacatgatgttattgcacacttaatagattacagcatagtgtaaacctaacttttacatggacagggaaaccaaaaaattcatgtgacttgctttattacattggtttggaactgaacttgcagatatctgagatatgcctgtactctggttccaatctggtaaaatggaatctgtattatgtatacttcacatgggatttgatgcacacattatttatatagagaaataggactcctgaacaattactgcatacacttatgttcrtatttaaattacttcattaactttttaaaaaaattacagtaaaatgcatacagaacatttcccctcaggagaaaaaagtggatgtgtcaaggccagaaatagaagagattatagctgttaatttttttaagcctacacgttgattattactactctcatttgaaaagtgattctcatcttttttgtgtcagagatccttttgagaatctgaaagctatggacagtttcttccaagaaatgcatttacttgcatatgttaaagaaaattttcttttttttctttttctttatgagacagagtctcgcactgttgcccaggctggagtgcagtggcrcaatgatctcagctcactgtaacctccgcctcccyggttcaagtctcagcctcctgtgtagcttggattacaggtgcctgccactatgcccagctattttttttttattttttatttttagtagagacgggggtttcaccatgttggccactctggtctcgaactcctgacctcctgatcagtctgcctcggcctcccaaagtgctgtgattacaagcatgagccactgtgcccggcctaatttttttgttttttgagatggtgtcttgctctgttgcccaggctggagtgcagtggcgggatctcggctcgctgcaagctccgcctcccgggttcacgccattctcctgcctcagcctcccaagtagctgggactacaggtgcccaccaccacgctcggctaattttttgtatttttagtagagacggggtttcactgtgttagccaggatggtcttgatctcctgacctcgtggtctgtccgccttggcctcccaaagtgctgagattacaggcgtgagccgccgcgcccggccattttaatagcgacgggatttcactatgttggtcaggctggtcttgaactcctgacctcgtggtctgcctgcctcagccgctcaaagtgctgggattacaggcatgagtcaccgcgcctggccccagcaccccggccgagtactgtggcggaatctcacctctaaattaattaattttctgttagagggtatataatgctgaaaaatatttttttttccctgttctttgcaggacttaaattacataagaaatgcatgatcgaccgggcgcggtagctcatgcctataatcccagcactttgggtggccgaggcgggcggcttacggggtcaggagatcaagaccatcctggctaacacggtgaaaccccgtctgtactaaaaatacaaaaaattagccgggcgtggtggtgggcgcctgtagtcccagctacttgggagcctgaggcaggaggatggcgtgaacccgggaggcggagcttgcagtgagccgagacggcgccactgcactccagcctgggcgacagagggggactccgtctcaaaacaaaacaaaacaaaaaaaaaacaaaaagaaatgcatgttcatgatagggaaaaaaaaatagtaagcaaaagaaatttaaaatggtctataattcttttatctagaaataattactgttgatatttggtgtactttgctcataaatttatatgttatattatttttaacttttcttaatattttatgctcttttctttttttttttttttaagacagagtttcactcttgttgcccaagctgtagtgcaatggcatgatctcggctcactgcaaccttcgcctcctgggttcaagcaattctcctgcctcagcctctggagtagctgggattacaggcgcgcaccaccacacctggctaattttttgtatttttagtagaaacggggtttcaccgtgttagccaggctggtctcaaactcctgacctcaggtgattcacctgcattggcctcccaaactgctgggattacaggtttgagccactgtgcccggcctttatgctctttttcattaaaaatatattgtgaagtcatcattctgtttgtacacattttctttgaggaggttcttataaaatatatcttctgtagtgacatttagtttttctgtgttttgagttctttcttttttaaaaaaaattattggtagaactggtctcgctatgttgcctaggctggttttgaactcctggctttaagtgattctcacacattggcctaccaaagtcctgggattacaagcatgagccactgtgcctggactgccctctctctgacttttttttgagacatagtcacactctcttgtccaggctggagtgcagtggcatgatcatggctcactgcagcctcaactcctaggctcaagtaatcctcctgcctcagctttctgagtagctagtactataggcacataccaccatgcccaaataattttttaatttttatttttgtagagacagggtcttgctgtgttgcccaggctggtcttgaacttgtagcgtcaagcagtcctccagccttggcctcccaaaagtgctagggtgacaggtatgagtcactgcaccccgcctgagtccttgttttttatagtttatgttttcttataaggcatttagacacacacacacacacacacacacacacacacgtacatatacatacatactttcataaatcatagtttgaagccacggtttttattcttacggtaccaggcattgacagccattagaatggtctttagaaacttcgaataaacttttaagaattcaggaaatgtatcactaggtatctaatgatagattttttcatattaggtattaatgaacatactggatcaagtaatttggtaatgtaaggtagaggttttatttacttagtcaaggtagctttgagttcttaataaatcttgtggctgggcacgatggctcatacctgtaatcccagcactttgggaggccaaggtgggcggatcgcttgaagtcaggagttcgagaccagcctgggcaacatggtaaaaccctatctctagtagaaatacaaaaattagccgtggcgtatgtctgtaatcccagttgcttaggaggctgaggcaggagaatcacttgaacccaggaggcagaggttgcagcgagccaagatagtgccactgcactccagcctgggcaacagagcaagactccatctccaaaaaaaaaaaaaatcttaaatgattgcattttcttatccaaaattatcacctgacagtttcaaataaatgaagttcattagcaacagtggagtgacttctataattgtatgtgacatttcattaaatctatcctaacatattaggaagagatttttatctacccagattatatgttggctgcagaaagtcaacagagagttttaaattaagaaataattatattgatctttgctttatatcagaaagcagccaaaatggcacagtgcttatggaagaaactgcttatccagctttggaggaaaccagctcaacaattgaggtaaacttgtattttacactgtggatatatgttaaatagtatccttagaatactatttaaagcctctaattctatttatgcattctattcctattttgaattataagcaattttgacttctaagttagatgtcttagaggacatctaagcaaagtattttattggtattgtgttaaagatctatcttttcacctctaatataattctttttggaagtagattgcattcttgaattatattgaaaaattaaactgttaggtttcatgtctaaaatggtggttcattttaaaatttggtaacaacctgagacttatgctttggggttttacttgacttctgtataaaactagatagctagatgatcattttacatggtgttttagtctgtactgatctgacaaaatacctgatactgggtgatttataacaaacagaaatttatttctcacarttatagaggctgggaagtttaagatcaaagtgtggacaagttcagtgtttgctgatgacatgctgtcttgtttccaaatggcattttgttgctacatctttaagaggagatgggcaaaaaaaggctggatgctgcatgaagcctgttttataaagaccttaatcatattcctaggggaggatcccttataactcagtcacctcctaaaggtcccacttcttagtactatcacattggcgattacattccagcgtagaaatttktggggacaccttcagatacattcagtacaagatacagctgttgaagtttattacgtacataacctaaaaagttcagtgagtcttttttgggcttccacactacagagttgtgctcgaatagaaccatggaactcgtgagagaagtgagctcttttttctgtggttattgagggggcaaagatgggcttctcagcttctgcagcccactaggagaatgcagtggtytgayctaattctgagagttgtcaagggatctgatggtgttctcaagctatatgatgagcctgctattgcataattctttactaatagtaggaatcatatcttttattttaactcagatgactataatacttactactgttgtattctaagaaaatgtaagacccttraatgattgttgaacttaccatctctaaaattatgattcttcaggcagaggaacaaaagatacccgaagacagtatctatattggaactgccagtgatgattctgatattgttacccttgagccacctaagttagaagaaattggaaatcaagaagttgtcattgttgaagaagcacagagttcagaagactttaacatgggctcttcctctagcagccagtayactttctgtcagccagaaactggtaagaatacmctgataagagacttaaagacatgtacgaccacattttatataaaggcttgttttstacccctaataatttagtctctagttttgaatatgtttgggtaaaactcaagacaagactatttttgtgtgtgaaatctattaatacctagtgtttcgctagactgttctggagcatagcaatcttttactgtaacagtaaccatcttttgccattaaatagaagacaaaattgcttcagtgagatttgttaaaatcacaaatgctccaaaattcttttggtgctttttagatctttaagagtgggagattggggatgttaatatttttgcttgcagtagtgtacattttgtaatatagaaatagtgaaaaaaattgttattaaagtctcttcagatatattcaattattaatcatgcaacaaacatttattgagtacctaccatatgtgaaacagagttcaaggtgctatcaatacagctagtcttccaaagctcgtgaccttcagatcttttgttttagattctgttatgaaaatgtcactagtgtaagccacatttttaatgcaatcaatgcccgttgtacagacagactcattcagagattaaagtgtgagttgcttgatttctttctgctatgcttcagctcagttttagcagtatgtataacatcttttaatgtgatgtaagtatgtaggtataaagttcctggatatatcagttattaasccacaattataactaagcgtgagttatggcagagacaacttgaaacactgctagtgattctaaaaatttcctaatttgacgaagaaacaggaaacaggtagtatctattttagataatttttttagattttaccattctttaatatttacatttgccaaccagaatcagacaatagaatttctgtcattccagtttaagctaataaaatgtcaagtagaggttcttggctgggcatagtggctcatgccagtaattccagcactttgtaaagctgaggcaggtggattacctgaacccaggatttcgagaccagcctgggcaacatagcgagacctcatctctacaaataataaaaagccaggcatgatggcgtgcgcatgtggtcccagccacttgggaggctgaggtgggaggattgcttgagcctgggaggttgaggctgtagtgagctgagattgcgccactgcacccagattgccaacctgggtgacagagcaggatcctgtctcaaaaaaaaaaaaaaaaagtagagattcttggctatctcatttaatgagaagttattttcagttagtatatcagtggtttgcctataaacatgaacgtgaaaacactttttccagctatttgaatattcatgtgacattcttgatgttcagaggaaaacttcaggctttgttagaatagcattcatagtatctttatttatggaggggtattgtaattgattttagaatccttgttagtcatcaaattttattattatttttttaaactccaggatttgtgttgtattcaggtagtttccccacccccgcttcctttcctgcctctggtttaattagagaatattcatggcccagaaaagtcaaattgaagccagagtattatagaatggtcagatatataagaaactgacatagacgtaaaaggaactacatactgttgctgggcgtggtggctcacgcctgtaatcccagcaccatctcaaaaaaagaaagaaattacatattaacttttttcaggaagttgtatagttctaagaccattcttctaatatttatcttctttctgaattctgacttcttgagatttttgtggactaagaggaatatttgattaactgtatttttacccattgttattcctcctaaagatattgtttcaataaaccaaatgtttaaagacgaaattttggactatactgaaaacactgcatataaaccagttgccaaaagtttttgttttggggccgggcactttggctcatgcctgtaatccctgcactttgggagactgaggcaggcagattacctgaggtaaggagtttgagaccagcctgaccaacacggcaaaaacccttctctactgaaaatacaaaatttagccaggtgcctgtaatcccagctacttgggattagctgcctgtggtagcgcaggcctgtaatcccagctactctggaggctgaggcaggagaatctcttgaacccaggaggcggaggttgcagtgagccaagattgcgccactgcactccagcctgggcaatagagggagaccccgtctcaaaaaaataaaaaagatggtttttgtttttcccttttagtttgttaattttgtgctagccattgcttaattttgttttttcctttccctttcttcatccttaaggatttcaacttcaattttttcttctcctgacttatattcttgtggcagtgtacgttttgttgggttaagaacactgcctgcttcctctttatgaactctcttccctgacaaaaagcaaagttggtagtgtagagaagtttgtattgtgtgtttttaagaaggcatggttattacgttttaattttgtacggataacaatgttaagtgataattaagtatttttaattcttttttttctttttagtctttataatatagctttatgcctctttttttcctgtttattcacaaaagaaaggtggtgggagaagctgtggaagattcctgagtgcatatggggatgggatgatcagctgaaacaccatgttcctagccaactcgctttccaaggtggtgtgactaaatctgaccagcttctctagagctgagtgtgcctagtcacatttactatttaccgagtgctttaaagatacctgttgtcatccgcaatactctaaacaggtgttcagaatctcttgtaaaggagctggccaagcttattgcatgcctttgcattgcttgcatctatgggccaaattaagcttttttaaaagaagttaaaaatcaaaatatttcagctattatatgtatgggttaaaaaagttggaagcattagataaggacatgaatatattaatgtgggttaggctgttttgttagaatatataatgaaggtaatgttaatgtagaattgaacaattatttaaataagttttacaaatggtttgtttttacatttacctatcttaattttatgtcagaaagcctgacttaaatactctaaccatgatcatgaatgcctttgtattatgtaatgctttgtttaagtcttcctttctttctctttgtccaagaaatataatctcacacctgaggcgacggcatctttgaaaaactagtgatcaagaataaccagataaacatgatgggcataagggtcatgaccaaaaagatctctcagtggcatctgtatcactaaatattaggaatattcattcatttcagtagtgccttctgtctttgtgtttattgttgtaagtgtgaaagtgaactgaatactccatgatccatctctgaaaaatattgcctaacctaaatcaccagctttcctgtggcatggatatcctgtcttctgaagaactgtttttgcttttctggagcatgaatgtttgttgttttagagctctttgtattcgagttcatattttatccttatttttagtgcttttcctctaagtagcttgtggaaattatttctgagtaattgaagcttctgtgtcaacataatagtttgttgacataagaaacagtgttaagaaattatgcatttggaaaaaactgaaggtgattttttccagggaatttgtttcctggacttgggatttcttgtgcaaattttccccactagtttgtttttctctactattattttcataaaggagcagcaccagaatagtccttaatatcggagatagctgttgtgtcacttcctcatgctgacatatttactagagggtaaaattaataaccttctagtaagagtggcagtcgaagggaagggctcatctgacttctggaaacctatgttaaaatacagtgctttgaaccttgatcatgggctaattaggttggaaatgaaactagagaccagatacacccaaggaaacttttggtagttattttactttataagtcacaggaaatgcttgtgtactttcctgtgttccttaaatagttgcacttaaattacctctttgaaactgaatgaagagacagagagtattttttttctttccagaaataatacttgtttatacctgtaatagcaatgaaattttgtttcttttgagacagagttttgctctgtctcccagtctggagtatagtggcaggatctcagctcactgcaacctccacctcccaggttcaagtgattctcctgcctcagcctcccaagtagctgggactataggtgcactaccatgcccggctaatttttgtatttttagtagagaaggggtttcgccatgttggccaggctgatctcgaactcctgacctcaggtgatctgcccgcctcggcctcccaaagtgctgggattacaggygtgagccactgctcctggccagcartgaaacttgaggctatgcgaatgaaggattgttctaagagtgtaaactataaggcgaggaggattaaataaaaaaacagagataggctctcaaagcaccaaatagtatgattaacagattcttgtgtatcacatttgaaatgctttatgttttggctttatgttgatgagttgaaaacccgtgtttttgtttatgttgtttggtttttgtttttggctatcttatgtagaaaggcatgtaagggatggcattgattattctaaataatttttactgggaaagcttttccaagattttgaatagctaaatgtcaacttttttcttaatagtattttcatctcagcctagtgaygatgaatcaagtagtgatgaaaccagtaatcagcccagtcctgcctttagacgacgccgtgctaggaagaagaccrtttctgcttcagaatctgaagaccggctagttgctgaacaagaaactgaaccttctaaggagttgagtaaacgtcagttcagtagtggtctcaataagtgtgttatacttgctttggtgattgcaatcagcatgggatttggccatttctatggtaagtactcaaaaatgtgttatacataacctgatgggatagtgtagaggaacttaagagtgaggactcttgggatctgttttcagtgccattattaaatgtgtggccttgaaaacttgaagcctgtttgagcctcagttttctcattcrggaagtgggtgctgcctatctcacaaagctttttatttaaataaggtagtagttattaagaaatgtaaggataataaccatatatgtttgtgactcttttaaagttaaaagattggaagattaaaaatctgaaatgctcaccatgaggcaaatcatttacatttagaatcacacttaaactaagttgaagtgtgactttattaggaagattatttaaatcccagttgaaatagttacatttgaaatgtgtaaataataagtgttcattatttctactttgaggtttcatgtaagtatcatactttgtaactttcattgttgcttctgtgattcacatgaattgagagtttgtcatctttgttcttatactttgctctttattatgattgatactgtttatatatgttgattatcttatcaattcaaagcttttaaatgccttttgggtgagaagaggaaggtattctattggtgttactttactttttcatttaggagcctcacccattgactctctcctttgttttttggagacggagtcccactctgtcrcccaggctggagtgcagtggcacaatctcagctcaatgcaaactccacycccagggttctagcaattctcctacctcagcctccggagtaactgggataacaggcgcccgccaccatgcctggctaatttttttatatttgtagtagagacggggttttgccatgttggccaggctggtctcgaagtctttttttttttttttttctttttttttgagacggagtctcactctgtcgcccaggctggagtccagtggtgcgaccttggctcaatgcagcctctgcctctgggttcaagtgattctcctgcctcagcctcctgagtagctgggactacaggcgcctgccaccacgcccagctaatttttttgtatttttagtagagacggggtttcaccatcttggccaggctggtctcaatctcctgaccttgtgatccacccgcctcggcctcccaaagtgttgggattacaggcgtgagccaccgcacccagccagtcttgaactcttgacctaaggtgatccaccccactcagcctcccagagtgctgggattataggcatgagccaccgtgcctggcctgagtctcttatttaaggtatgtgtttgtacaatgactggagtatttgaaacctgaactttgactctctttgctatattggaatttggggtagagacactttaaaaggaaatgtcttagatcttgtcaacttcccaaattttagcttgctttacattaactacttttagatttttttgcctgcataatccacagtcttaacttttcgttttgctagttcattcgaaaaatgtatttcttatgcaaagattgaagaattacatgtaccctatgtggatttgtggaaaaggtatattattcaacatagcgtaatgttagaataaacttaatgaagacaatacctgtttaaagtcagagcttgcaagatgtttcttgtatttatattaataaaaatatgtatttagatttctgatggatacctgcttgaatttaatactgagatactattatttgtatcctttcttgaaatttgttgtaataagatttgatttgaaatatatatttacctttatagactatctagctgaaacaatcaataagtatttgagtatgattttccctccacaagtaaacatgagggtaacaatggagaagatcttatcttaatctttttttcttacttcaaaaaaaattggatagtgatttaaagtgttaatccaaattgcattaaaacttcaccatttacatgacctttgaatattttgtagaaaaataattttacagaagtgctttcaaaatgagaagttacttctctgttatgtaggattttggttattagtaaaatttaccttaatagttaattaataaaacattgtcctttacttgatattagccttttcaggctatgaaaagcctggataacatattatgaagtaggcctacatagtaatgagattagttgaattaacatacaagacctgacctaaatgacttttccaagtcactacttaaaagacatcacttttttttttttttgagacagagttttgctcttgttgcccaggctggagtgcagtgcgtgatctcggctcaccgcaaccttcgcctcccgggttcaagcaattctcctgcctcagcctccygagtatctaggattacaggcatgcaccaccatgtccagctaattttgtatttttagtagagatggggtttctccatgttggtcaggctggtctcgaactcctgacctcaggtgatctgtccacctcggcctcccaaagtgctgggattacaggcgtgagccaccgcacctggcaagacatcacattttttaatttcagcactgatctcaacattctttggagttgatttcagagccgttttgaattttctattcaccgtaaagtcggtcattgcatcccatagtcattcattcactttataattttatttttttttgagacagagtcttgctctgttccccaggctggagtgcagtggtatgatcttggctcactgccacctccgtctcccaggttcaagcgatccttctgtctcaccctcctgagtagctaggattacaggcatccgccagcacgcctggctactttttgtatttttagaagagatgaggtttcgccctgttggccaggttggtctcgaactcctgaccttaagtgatccgcctgcctcggcctcccaaagtgctgggattataggcgtgagccaccgtgcctggcccgctttataataatttaacaataccatattactaattgaatcattctgcgtttgccagccctggtgccatacagatttgaattggcagatctatactgcagggaagagaaagctagcatgactaaggatagtgaggcagtgtactccaggtatttggttctgaaaatgcttccagaagttttattaaaaagtttcatgagaaagcagtctttcttattcttacatttgcttgtgactatcaacattccaaatcatcaatggagttcaattgatttggttttctcctcgagttgctttaagtattgatagactacccggctcttcggcagactattatataacaagatatctagatgctaagttatagagcacagaatgaattacagctcaaagggtacacttactgaattatcctggaggtggtaagatttaagttgtgtctaatcatagtaagtttatgatagactcaagggaaggtggaacattccagcgacagagaatctgataacctgaggaagacgtaatcttgggtttgggagcagtgaaaagactgcttggactacagcagagtgtaggtatttagaaataatggaataggtggggtgctattatagtcatcccttgatatacatgagggatgggttccaggatgcacccccataccaaaatccatacgtactaaagtcccttgactgcggacctcacatatatgaaaagtcacctctccatatacctggattttgcatcctgccatgtagttcaaactcatgttgctcaagggtcaactgtgtattgtaaaacgtcttggaatctagataggaaagtttgatttattgagtaacctgctatcaggttagagaaaaaagtgccggaactttttgctggtgtggaaaaggtggtatggaaaaatgtagaatagtcagtcagttaagagttctgtaatctggatatttggtgaggaggaccttgacaattggaataacagtgggaatggaataagggacattgaaggaataatggaaaataatggcaatttattaaattgtagaaaatgtgctagctgcttcacttttggagttggggttactggggaagttttgccagatgataaatagatggtaagcacagtttggtttggttttacccaaatttgttctagacaaatttggtttggggcaggtgttgaggtttgatttttttttttttccaccctacaaacaggccccctacacagctggatgtgttggctagaagctctgatgagaagttaggacaagatctgtagcttggaattcttaataggagtgatagcaaaatctgacagcgctgcaacatggtaaaataggcagcatttgtagacatgactaggccaaagattgtatcttgaggataagactttaggtagctgaaggtgcaggaaaaacccccaagtgattagtcagtaatattgtaaaaggccacattaagacagtaatcaagcatatgctatattatactatcttgaattcagacctcaacacagttttagattattttccagtgggcaaaggaattaatctcagcagtttgaaatagaaattgcagaagttttctgttactctgggaactatagataaatttcaacatttgaaaaaaatctgggattctgctgagtaattttgaaacaagcttgccgtgcttctataaattgagaaatctaaagagaggaaatgaattctaacacagaatatcatagctagactatgtaacagttacctgtaaattggcaaaagttgtttttggtgtttttcaagatgtattgaagacatttaaaataatttttatagcagtaagggaagaaatagtgatcactgcatcctttctttgtaaaattctatagtatctatactcagtagatgtaatgttaaggttgctaactgcattttgccttatttttgatttcgtggttttttccccccatacatgacgcatgtgaatagcatgtctgagtaaagtaacattttgatttttaggatgaaaatatgaagaatcctagttggtttaagattctttttttgagacggagtttcgctcttgttgcccaggctggagtgcagtggcgcgatcttggctcaccacaacctccacctcccgggtttaagcgattctcctgccgcagcctcccgagtagctgggattacaggcacatgccaccactccctggctaatattgtatttttagtagagacagggtttctccatgttggtcaggctggtctcgaactcctgacctcaggtgatccatctgctttggcctcccaaagtgctgggattacaggcgtgagctactgtgcctgtccaattcttttatcactgttgggataaggacagtgctactccagtacagatttaaccattgcagaattcttaacaaatttggccttgagaatggtgcacaatcaccattagccaattattttctgtgctgtactttttgggctttgttgtatccttaaggcaaaataktaaaaaaaaaaaaaattttcatttttccttattgacttacgacctgtgaaaaaataccagggtttgttcatttctctgtataagggaggctgaaacactttttgtacttaaaagataaccccaaaacaacaaagctgagtgccttcaatatagtaagataagaacattacataaattgttctcttggttagagccatatgggctggcctgtgtgttttaatacaaaagatagtgaactgcttaaatgttcctgggtgtatgtaaataaatgtttttaagaactagcctacttggccttacttatattacgttaacgttcaccaccatttgatgaatgattgatcatgggctttcatttacttttctttttttattttattttatttttatttttagtagagacagggtttcaccatgttggccaggctggtcttgaactcctgacctcaaatgatctacctgccttggcctcccaatgtgctgggattacaggcgtgagccactgtgcccagcctcagttacttattctctatttatgtaatcagaatttttaaagaacggtgaaatgctgatactctgaatgaaatgattgtcaagattacataggttatggccaggcacagtggctcacacatgtaatcccagcactctgagaagccaaggtgggtggatcacttgaggccgggagtttgagaccagcctggccaacatggcaaaaccctgtctctataaaaaattagttgggcctggtggcgcttccctgtagtcccagacactcgggaagctgagtcacgagaattgcttgaaccagggaggcagaggttgcagtgagctgagatcataccagcctgggcaatggagcaagactcttctcaaaaaacaaaaaaaaaacaaaaaaaaaaaacaaaaaaaagactacatagcttatatgcagattaccaatattaaaaaatacataaaacatttaatgataatatttttgttacatacctttaataaaaatatttattttaggcacaattcagattcagaagcgtcaacagttagtcagaaagatacatgaagatgaattgaatgatatgaaggattatctttcccagtgtcaacaggaacaagaatcttttatagattataaggtatgtaccactaacagtatttaaaataattgttagtaattattttgcttattagttagagcttattgtgcttattagtgcagattagtaaatcagtaataatgctgatcattgttgaattgagtacgggtatttagtgtgtcctagtcattgtcatgagtgtaccatatagagtatttctcttattctcacaatatgtgaattaagcaattactaacttttataggtggaaaagaggtttagaaaagttaagtgactttctcaaggtagcaactggcagagctagtttgtttttgtttgtttgtttatttatttgagatggagtctcgctctgttgcccaggctggagtgcagtggtgcaacctcaggttgctgcaacttccacctcctgggttcaagcgattcttgtgcctcagcctcccaagtagctgggattacaggtgtgcacctctatgcccggcaaatttttttgtatttttagtagagacggggtttcactatgttggccacgctggtcttgaactcctgacctccgtctacccacctcagtctcctaaagtgctgggattacaggtgtcagccaccatgctcggccatggcctttttttgttttgttttgttttgtttgggagagctaattaattgattctaaggatttgacttaagaactcttatccctagctgctattttatagttaacatcttttataagtgacattttatatgtgtatatagacatttttattaacattattttcacagagcgaagcaaacattttcagttggcaggagggaaagaggagagttttggttttatagcctctctaagatcttctcttgatcaggggacatagctattcctttccattgtttttttttattctgatggaagggagagcatgttatctttttctgcctataactcacctagatctcgtctcacaggactgtactgtccattctgtcattacctaacacctctgtgggtttatgaggatcagcaaaatagctggtctcttatctagttttttcctaagaaggttgtagagagaaatgcagggtagaaaaataagctatgtctgggtgtggtggcaacctcycaaattcccaaagttggtaaccttgggaagccaaggtaggtggattgcttgagcccaggagttcaagaccagcctggccaatatggtgaaaccttgtctctactaaaaatacaaaaatcagcckggtgtggtggcacatacctgtaatcccagctttttgggaggcttaggcacaagaattgcttcaatctaggaggcagaggttatagtaagctgagatcacactattgcactccggcctgggccacagaggaagactgtctcaaaaaaaaaaaaaaaaaaaaaaaaggaaaaggaaagaaaagtaagctattgttttttccttcatttttccacccccaattctcacacttaatttatgtatgcttcccttacaggttatatttcttgaaaagacaaaaatactactttgtaactaaattgtatctttcagggaggtacttctcccatccaagtactaaccaggccagaccctgcctagcttctgccatcagaggagactggcggcatttagggtgttatggctgtagacacagggaggtacttctgaagttaattataaatagttcagtttttcctacctgtattagaagatgccattttcttcttcaccacagtgttttctggttccataggataacattggcttttggaaaactcaccacgcattaacctctagagagagtttgtagtttggtttgggtttgggttttttttttgttttgtttgttttttttctgagatggagcctcgctctgttgcccaggctggagtgcagtggcatgatctcagctcactggaacctctgcctcctgggttcaagtgattctcctgcctcagtctcccaagtagctgggattacaggctccctccaccatgcccggttcattttttgcattttcagtagagatggggtttcactatgttggccagggtggtcttgaactcctgacctcaggtaatctgcctgcctcggcctcccaaagtgctgggattacaggcgtgagtcactgcgcctggcctgttttttttgtttttgttttttaagagacagggtttcattcttattgcccaggctggagtgcagtggtgtgatcatggctcactgctgccttaacttctgggctcaagcaatcctcctggcttagcctctcaagtagctgcgaccacaagcacacgccaccatgtccaacttggtttttaaatttttcatagagatggggtctcactatgttgcccaggctattctggaacttctgggttcaagtgatcctcccaccttggcctcaaaatactgggattaaaggattgagccactgtgcccagctagagagtcagtttttacagatctcttatttctggctgttaagtgtggatcagatagattttgaagctctttggaagacctggtcaggatctgcttatcaatcacttatgtcaacatcatatttactgcacgaggaatgctgtactcttctttcatcctgtggcttcctgggcttgtgcatttcaagattatgccacaccagtgcatcagtctcttctactccacagtccactgctgttgggtagaagaaatttcttttctctcatacaggtagagcagatgaaatgactgtgattaaattttaaatctttatttgttctctgaagattaatgagccagaacgtgaagcagtcatttcagatagttatttttcaagtgtatattagtgtcattctcttaaaggacttgtatttttttttccttttttttttttcttatttctgaatccaggtaattgactgctctgactcaaatggggtaaccataacgtttgtgataaattaagccaaatttaagtatcattttgcagatttatacataggatatttttaactcgatgtataatgctttaagaacctgttgaaccatattgtttaagttttgactgtttttggttagattttgttactaatgcatatgtgtaaaagaaaattcaaatcagtcaaggatacccttattgaagcagtaaaattctataagccgaattgaccatgatttctaccacgggtgctgactttcagttatagtaatctatagattaatcttcagagttatattaatctgtacagattacagaacttcaaaaatttaccataaaattggataagttagttataaatgttcaagattcagtctgtcttctaacatggttatagaatttatggcttatctgtacttacttagaaatgttaattgcataggactaaaatgtttcaaataggactaagattgttagaatttcatcctttgaagggtacactgagtacaaacaatttttgaagccgtaagtcagctctcgatgtaattttacttttattttttatttgttttttttttgagacagagtctcgctctgtcgccaggctggagtgcagtggtgcgatctcggctcactgcaacattcgcctcccgggttcaagcgattcccctgcctcatcctcccaagtagctgggactacaggtgcatgccaccatgcccagctaatttttgtatttttagtagagatggggtttcaccacgtaggccaggatggtcttgatctcttgatctcgtgatccacccacctcagcctcccaaagtgctgggattacaggcatgagccaccgcgcccagctaataattttaccttttataaaaggtaatctcttttcctgattcagaaaagcctttagtcctgcaagctctagctaactttctgtcttttaaattcttccagccaggcgcggtggttcatgcctataatgccagcactttgggaggctggagagtcgcttgaactcaagaggcagaggttatagtgagccgagattgcgccactgcactctagtctggacgacagagtgagactccatctcaaaaaaaaaaaaattcttacaccatgctgtagttctcaatttgatgtagctctctgctctgcgttttcttgcatatgaaccttgtatttcccaatgtttatactattgaaaatactacccggggggttgtatctgtagaagtaaagacacaaaagcttatggggtattatatcttgaagatttaaattcagcttttaaagcayttgacattttatttcttctctttcaaaaaaaaatgtagtcattgaaagaaaatcttgcaaggtgttggacacttactgaagcagagaagatgtcctttgaaactcagaaaacgaaccttgctacagaaaatcagtatttaagagtatccytggagaaggaagaaaaagccttatcctcattacaggaagagttaaacaaactaagagaacagattagaatattggaagataaagggacaagtactgaattagttaaagaaaatcagaaacttaagcagcatttggaagaggaaaagcagaaaaaacacagctttcttagtcaaagggagactctgytgacagaagcaaagatgctaaagagagaactggagagagaacgactagtaactacggctttaaggggggaactccagcagttaagtggtagtcagttacatggcaagtcagattctcccaatgtayatactgaaaaaaaggaaatagcaatcttacgggaaagactcactgagctggaacggaagctaaccttcgaacagcagcgttctgatttgtgggaaagattgtatgttgaggcaaaagatcaaaatggaaaacaaggaacagatggaaaaaagaaagggggcagaggaagccacagggytaaaaataagtcaaaggaaacatttttgggttcagttaaggaaacatttgatgccatgaagaattctaccaaggagtttgtaaggcatcataaagagaaaattaagcaggctaaagaagmtgtgaaggaaaatctgaaaaaattctcagattcagttaaatccactttcagacactttaaagataccaccaagaatatctttgatgaaaagggtaataaaagatttrrtgctacaaaagaagcagctgaaaaaccaagaacagtttttagtgactatttacatccacagtataaggcacctacagaaaaccatcataatagaggccctactatgcaaaawgatggaaggaaagaaaagccagttcactttaaagaattcagaaaaaatacaaattcaaagaaatgcagtcctgggcatgattgtagagaaaattctcattctttcagaaaggcttgttctggtgtatttgattgtgctcaacaagagtccatgagcctttttaacacagtggtgaatcctataaggatggatgaatttagacagataattcaaaggtacatgttaaaagaactggatactttttgtcrctggaacgaacttgatcagttcatcaataagtttttcctaaacggtgtctttatacatgatcagaagctcttcactgactttgttaatgatgttaaagattatcttagaaacatgaaggaatatgaagtagataatgatggagtatttgagaagttggatgaatatatatatagacacttctttggtcacactttttcccctccatatggacccaggtcggtttacataaaaccgtgtcattacagtagtttgtaacatttgtagattggatagcatttttatgatttgatgagtttcttgtaaggttaccgtttctaagagttgtgctttatggccactgagagaattcagaataaattgaaagatggagtctaaaaattattagctgttacaaatggaacatttcattataacgtgatcactttgacttgagcaaatggtttaatttttatcttaaaaatcagttaagaatatataaaatcctactttggccaagtttgtttcttttcattatagtttatatgaaaagatcaccttaagtgaaattattttcctttaatcttttatgtatttattcacttytggaagctaggaatgagcaacacaaattttactctgaagtcagaagagctcatatataataattctaatgtcccacctattttcacttgtccattccatgtaccagcttagttatgatacttagtcacataattatctttgataaaggtagaggcacaaagaggcaaactaagcaagtcaaattctaatgtgtgtacttcataataattttttatccattttcatctttatattctgtaacatgaaacttacctaatcttcaaatgttagcttcattttttacctttgaaatacttaatctttctgaataaatataatgtgtctataaaataatgagactgattctggtgtctttagtcattaagctggtatctagtcctataatgaacaaaggtgaagctgccttgaggagacaagtgaaaaatttttgcttcaaaggagctcacaagctaagtaaataaatgaaattaaggtatggggcatggtggcctcaggctgtctggaggtgtttggaaaggcttcttgagtgaggtggcctttgaactgaacttagtttttaaagtagcttttggaagagaaatgaggatttgctatgcagacagggaagggaatttcacttaaaaggaaggtcatttggagatgtgaagatacactgctttaaggaagcagggtagagctggaggataagagatgcagaccatgaagggccccattttatgctaaaggttttgtcctgtaggacatggagaacttctgaagaattttcaaggcgggtgggataagattatattgtattttagattacagtagtccccccttatcttcaggatatatgttccaagacccccagtggatgctggaaaccagggatagaacataattctatatatactatgcatgaatttctttttccttctttacaatctcacacataggtttgttcttactatagatcttaccaatctcagcatacttttatttctcttgagaaccttcaccctttcacttaaaggaggcgctttatagcttctctttggcatatccaaatgccagcatcactgttgtattttggggtcattattaagttacttaatcatccttaatccttatcttagggatacttgaacacaaacactgtggtaggataacagtatatctgattaacagactgctactaggtgattaatgggtgggtagtgtaaatacacaagaaaaggatgattcacatcccatgtgggatggagcagaactgcattatttcattacattactcagaacaggcatataattgaaaacttatgaattatttttttttaattatttgagatggaatcttgctttgtcagccaggctggagtgcagtgacacgatctcagctcactgcaacctctgtctcctgggttcaggtgattctcctccctagtctcccaagtagctgggactataggcacgtgccaccacacccggctaattttcatatttttagtagagatggggtttcaccatgttggccaggctgttcttgaaatcctgacctcaagtgatccacacatgtctacctcccaaagtgctgggattacagtcgtgagccactgtaccccgcctaaaactgatgaattatttctgaaattttctatttaacattttcagaccacagttgaccacaggtaacggaaacctcaatcacagaaagtaaagccgtggatacggtgggactaatgtattggtagcagcctagaggattgatgggaaaggtatgaagctagaaggtggtcaatataatacagacatgagctgatgaacatctaaactgggactatactagtaggagaggaaaggaaaaaacatttggaaaatagtaacattgatatttcttgtgaaggagaagtagaaagtaacagtgacttctagatttctgggttgggtcatctgttgttggatagtagtaccactgagatagggaattcaaggtttggggcaagggtaattggagatgagaattgtgtttggaggtaactactgacattcaagtggagagggttagttggcagttagttctatggtcatctcttttgccgagactgtatatttatcagactcctgggagaacaccaacatccatggggttgtagggaaggctaaggacargagtggggagtggtaccttgaaaatccaaaagccatctcaagtaaaaggaataaatgtgtcatgctttttaaaaagttgatgtgcggaaaatgttttcttggcttggaaactgggcggccaggggatgacagtatggacttccagtgaagtagtgacggaagcctgatcatagacattaaggaaagcggtgtaggtgttgtgagcttttgctgtaagaaaaagttgagacttttgttttgctttgtttgtgagagatgtgtrtgtatttctgctgagtgataaagccagcggggagggactgatttttataggaaaggaggaaaaataatggaaacacatctcattattttattgtcacatttcttttctttgttatcttttgagtgtttcccttttttgccagtagagttattgtctattttttctttctataggacaaaaaaactaatacagactcctttatttttatatggatatactaggattgtaattcagatatttaatatcttttatcagtgttcagatcatagattaatggagaaaacatttaaaattgttttaaatttaaatacattgaactctaacatagatgaaaaatgtgtttactgctttcagtcgacctgataaaaagcaacgtatggtaaatattgaaaactccaggcatcgaaaacaagagcagaagcaccttcagccacagccttataaaagggaaggtaaatggcataaatatggtcgcactaatggaagacaaatggcaaatcttgaaatagaattggggcaattaccttttgatcctcaatactgattcacaattgagttaaattagacaactgtaagagaaaaatttatgctttgtataatgtttggtattgaaactaatgaaattaccaagatgacaatgtcttttcttttgtttctaagtatcagtttgataactttatattattcctcagaagcattagttaaaagtctactaacctgcattttcctgtagtttagcttcgttgaattttttttgacactggaaatgttcaactgtagttttattaaggaagccaggcatgcaacagattttgtgcatgaaatgagacttcctttcagtgtaagagcttaaagcaagctcagtcatacatgacaaagtgtaattaacactgatgtttgtgttaaatttgcagcagagcttgagaaaagtacattgttctggaatttcatcattaacattttataatcttacactcacttcttgtctttttgtgggttcaagagccctctgacttgtgaagaatttgctgccctcttaagagcttgctgacttgttttcttgtgaaattttttgcacatctgaatatcgtggaagaaacaataaaactacaccatgaggaaaactaaaggtctttatttaaaatctggcattgtattaacatgtaattttatactatgtggtattttatacatttcctcagtagtgatatttggtaaagcagttcatacagcttttttctaagttccatgaatcttacccagtgtttaccgaagtatttaagcagcatctgaatatttccacccagcaatgttaatttatctaggaaagttcagaatttcatcttcatgttgaatttcccttttaacttccgttcatagacatatatgtgacttccaattcgaccctctggcaagtgagtgtggaagaaaacagcagttcttttataattgcttgaaattaggaaagcgcttatttcctagaagcaaataaatgtttaagtaaataaaggctacattttgctgagtactgtttcagtcaattttagaattgcctattctaattgctgtctacaactttttgcttaataaaagaattaacttataggaagtaaaatactttgatagttacagaactggggctaattttgactggagaaaagactaattatgaaatgtgggttgaaacagaccataaaaaggttatattatctatttacctgagggtttcctaaacctggggtaaaattaaaatactgagttttcctctttttcatgtttacttacctcttccaaaatgctgaaggtgatcaagtgagtaggcaatgatgcatcatcatgaaactctctatgtaaccagtttaagggatttaggtaaaatacatctgcttcatcaagataatgactttttccagtcaggtctggcgggcactggagaaatctcatgggaagtgggcagtgaacatggctatgaaaagaaaagttaccataataaatacaagtaaaacatgaaagttttcattagtcttaagatatgtcatttatacttagcaaaatgtgaaatctgaatctgtaaactgtgttgcagttaagtgaagaagcaagcctttaactcattttctcaaagataaaaaaaacatgattcttataccatgtacctatgcagcagcagcagtataacctataagcccaaactagtgcatagaagtccatttcaaggagggaagtaggtcagtagggggactcaacattctgtagcattggtattctgttccggaaacataaatggtcctcaggaccaggtaagttaacttgttaataggagagtaattctccataggtgtatttgataaagtaggaaactgtgatcataatcagaaaggattctttctctcttccctttctgctctgataggggatggatcacatacttatatggcaagttttttttttttgaagacaagagtttcgctctcgtcacccaggctggagtgcaatggcgcaatctcagctcactgcaacctccacctcccagcaattctcctgtctcagcctcccaagtagctgggattacaggcgcccgccaaccacgcctggctgatttttgtatttttttagtagagatggggtttcaccatgttggccaggctggtcctgaactcctaacctcaggtgatccacccgcctcagccttccaaagtgctgggattacaggtgtgagccaccacgcccagccacatggcaagtttgaagtgttttttttttttatttaagatgattgagaagtagagagcaacatatgtccactgattaacatccaaataagtaatggttttattgtggcatagaaagactagagtaggccgggtgcagtggcttatgcctgtaatcccagaactttgggaggccaaggcatgtggatcactggaggtcaggagttcaagaccagcctggccaacatggtgaaaccctgtatctactaaaagtacaaaaattagccgggcatggtggtatgtgcctgtagttccagctactcaagaggctgaggcaggacaatttcttgaacccagaagacggaggttgcagtgagctgagatcatatgccactgcactccagcctgggcgacagagcaagagtctgtctcaaaacaaaaaaaagattagagtataaaaaagatggattcatttctaataccagttatgacaatttaagccagttacttaggtcatgcaaaaagccatgtttataattgccttaggaaaaattaaacctcactgatacaaacatttaaaatttccagttagaaatggagttagtaattatgcaggaggtttatttatgaaatgcataaaaattaaatgtacacaagacctaatagtgatttatttattggaaatgaaggtcttgtttcaaagggaagcagaaattcctcagaaaaagctgccggcctactctagtctttctatgccacagtaaagccattacttatttggatgttaatcaagggacagatgttgctctctacttccaagtctgatgcaaaataggcatcagactttcctctcttgtgtgctttgaaaaggtgtggagaacttggtgaactattcaaagcctaagacatcaactgactacagttaagtataaagaacatcttggtacatctaggattcctgttctcctcagtattatccctaatgtgagcacggagagtgaatgtccctttttcagccacatatacatatagtagggaatcctcaagttgaaaggatacttgatgtcttccttttagcctgtggtttttgctaggatctccatttttctaaactgtatattaattactggcattaatgattagttaaataggagtattccaagtgttaaattcccctaaaatgataaccactgtaattaaattaattgaacgtgcataggagacattaactccagattgtttaaagccagactgagttaaatagttatagattttatgtatttatttatttatttttaggttgagtctcgctctgtcgcccaggttggagtgcaatggtatgacctcagctcactgcaacctccgcctcccgagtagctaggactacaggcatgcgccacaacacctggccaattttttttgtattttagtagagtcaggggttcaccatgtggcccaggctagtctcaaactcctgagctcaggcagtctgcccgcctcggcctcacaaagtgctaggattacaggcgtgagccacaacgcccagcctggtatataattttctgtaggaaatccggctcctttgcccctataccattactgggtaattagtaactaatacagcttcctgaaataaagcacaggaacaaatggatgtctttttaaaggccatacatagttgaggcaattttagtatatttcccagaaacacttaattcaagcattagaatatcatctagtcgcattccctaattttttacaggtgagacaactgatgtccaaagagattaaaaatctagtttaaggccgggtgcggtggctcacgcctgtaatcccagcgctttggggaggctgaggtgggcggatcacctgaggtcgggagttcgagatcagcctgaccaacatggagaaaccctgtctccaataaaaatacaaaattagccgggcatggtggcacattcctgtaatcttagctactcaggaggctgaggcaggagaatcgcttgaacccgggaggcagaggttgtagtgagccaagatcacgccattgcactccagcctgggcaacaagagcaaaactccatctaaaaaaaaaaaaaaagaagtctagtttaagatgagggcaataatccagtagtaaatctggactaaaatccatgttttttttttttttttttttggagacagagtcttgctctgttgcccaggctggagtgcactggtgcaatctcggctcactgcaaactccgcctcctgggttcatgccattctcctgcctcagcctcccgagtagctggaactacaggcacctgccaccacgcccggctaattctttgtatttttagtagagacggggtttcacccagcttagccaggatggtctcgatcttctgaccttgtgatccacccgcctcggcctcccaaagtactgggattacaggcgtgagccacggcgcccggcctaaaatccatgttttaagattaattcaaattgtgtaaagatgtatcacagagatttgtagtaaggtaagtaatacatgagtttctttactaagaagactatcagatacctacaaattgttttatactgatttaaatcagaattaggtgtaagtaaattgtttttaaagaataataaagtttacggccgagcacggtggctcacacctgtaatccccgcactttgggaggccagggcaggcagatcacgaggtcaggagatcgagactaccctggctaacacggtgaaaccccatctctactaaaaatagaaaaaattagccgggcatggtggcaggcacctgtggtcccagctactcgggaggctgaggcaggagaatggcgtgaacctgggaggcggagcttgcagtgagccgagatcgcgccactgcactccagcctgggcaatagaacagactccgtctcaaaaaaaaaaaaaaaagaaaaaaagtttatttaaaacattttctttgacacagttcaagtggtttttaaaatccatcagtgaataaatatgtgggagtttaaaatttatcatttgatcagtgaccaattaattcaaatccaggaatctgaaagggaattttaaagtagtcagtttcagtttcttaacagcatatagtggaacatcttttattacctgtaataaggagtagagtggcaaggcatcattataaatattgaagctgaagatttattgggattgttgtaacaaactttttgaatatgactcatgacatcaagagtacctcgttgatgaactaaaccagtataaagggcgaggaacaaatttgataaaaacaggaaacttagagctggtttcttccatgttttcaggtgggttaatgagtatcctatatgaagatagacatattgaaccttaacactgacaatcttttgttatgttaactgcaaatacatctgtaatttttaatggaaatagcaaaaactgtaatactgttatagacaaataagaaataagcaataagtcatatctctgaccattcaccattcactactgtcatctaggtcttgactttttctagtaaaaggtattgaggtatagtggaaagatgatggttatggagtccaacaggtccagatttgaattccagttctagcacaagtcgttttactttgctggtcattgggataatagtaccttattcaagtgttagaaaaaatgtccagtgactgccctggtacatagtagttgctaaataaataggacttttaattattccatttacctacctctttaatctcccaagcactaataattggtattttagtgtgtaatacgagtttcaataatgtgtcctcttaggaaaataagccattgggcacctgggagattttccgtaagtatatgagtggaagaaaaggtgctatgtcttacattttttttcccacaacagtgggaaattttgttttcccactacagtcaggcaatttggagatgctgaacaatttttcttttttgatttatgaaagggattattctgtggggcaaaacaaaacaaaaaaccaaaggaaaaaaccaagtagaatgaatagacgggtataaaaggataagtaaaagtctctctcccctctgatagtccttttcttcagcaacagccactattaatggacatattaggatctactgagaatacaaagaacaggcctttccactggaaaagattaagcttattagtaagcatgacattttgttcataatttacatacactctttttatagaactagataatagttctttttgaacttgggtattcttcatccaaaccttggtttgcccaaaatgttagtacaatactgaatgggaccaaggcagtgttttttattttgttcctcctatgaatatgttaatatcatccacagttcatacctcatgagttggaatat

SEQ ID NO: 98139 - DNA, 31352 bp, Homo sapiens
  misc_feature (1)...(31352): n = A,T,C or G
aagggcagtcccacctctcccttttctttcatcttccaaatggccaaaatatagacacaatgatgggccatactggattttgtgggccacagcaccacccaaaagggagtggagaaataagagagagcaagcttcagacctatactgctacctggacttccatctggtttatgatactgatttgttttttttgttttttttttttaatctgcagcaacggctaatttttttttttttttttttttttttttgagatggagtctcgcgctgttgcccaggctggagtgcagtggcgcaatcttggctcgctgcaacctctgcctcccaggttcaagcgattctcctgcctcagcctcctgagtagctgggattacaagtgcgtgccaccacgcccggctaatttttggtctccaactctgacctcatatctgcccgcttcggcctcccaaaatgctggggttacaggcgtgagccaccgtgcccagctaacagccggatttatatcctaaccaacacaccaactggccaaaagaataaccagctcccccaacccgctgtcttccccaacctaattattatatcggattgtcttgttacctggctgttcctcctccttcccacccttaaatatggttgaccccctctcccactgggtctctccttgaatctggtctctctatgctttctcccttagaaatctcatccactctcatgacgacttaacatgcttctaatcctaactcatttctgagcaccaggtctgcttattggacttctcattgatcaatttccagtacctcaaactctgcatgtttaaaataaaattcactttcctctctctcacacacacacacaaacacacacacacacactcaccatggggttaagtaggcaacctgttctcgatttccttatttaggtaaatgaaataaatgacacccccatcctgccaagaacccaggcttaaaactacagcagaggccacaaattcaaatgcttagagaccaggcaagaggcaagggacaagtggtaactgtggggagccaaagagctgctgaccaatcttaaaaaagcagccacaacttactgatttctggcatgtaggaatattagcctagtgctgtcgggtcttctgatcttccaagagaagtaaaaaatctagattttatgttttatgtgatctctctagattttacaaacaaaacaagaagtcatcttgaactggtcaatatgtaaatcaaaaatttaaaaacatatctcctatttctaaataaatatcataaaatgacaatgtaacttgcagcaaaaataatttgacagatctttctagtatgtctaaatcatttcttggtttttggaagttatgaatcttttgatacagttgtcactagattttgcccctgtatggagtgatgatttgacataggaagcaacatcaaattgttccaacaacttcctcattaaatggataatcattaaatgaattaagcagagaatttccttaacatcaatgatactgtttttagtgttgaatcctcagtttcttattaatagcaattaaatttaaacattttatagactataataaagtctaagaacatacagaactgattcaatatctgttattgactaagtcacacaaatcacttattgaaatatcttttaacttactggcttattcactatgttctgttcactctcaattcacggagcttcacaaaccagggggctttatttcaagattcaaaaaattgaaagggcttaaaagtttattacatttttcacttttgtcaccaaatacattgatttattagaaaagccaataatttttctcttggaattgatacttcactttttttttcaaacaggatacctattttttcttatccataataacttccacttgtttcaaacttccctttgtttacatatgtccaactgctttacagtttattgaaataatgtcagctctaatagctaaaatatgttttcttataaagctaaaataaatactgctgggcacggtggctcacgcctataatcccagcactttgggaggcagaagtgggcagatcacttgaggtcagaagtttgagaccagcctggccaacatggcaaaactccatctctactaaaaatacaaaaattagccaggtgtggtggcgcacgcctgtaattccagctacttggaaggctgaggcaggagaatcacttaaactcaggagatggaggttgcagtgagctgagatcgcgccactgcactccagcctgggcaacagagcgagacttcatctcaaaacaaaacaaaaaaactctaaatactgacatctccattaaaatatcatttattaaggcccaaactctttaaaatatatttttcaaacagccactgcatttgtttccattacagtgaacatacagaacttactgacttccaccacagcgggtatatagctcaggggtagagcatttgaatgcagaacttaccgacttccacattgcttttgcagatctagcactgcaggcttgtccatcaaggttcaatttgcattacttaatgtagttatttctgctacttggtgtgtggtagtaaatatagtttatcaagaaaagcatgagttccctgacttgtattggtttatccaaaattaaatttgataatttagtgccaaattaaaacatccacatttttcctaaacttttggctgaaactccatactctctctagaattacattagcattttttgtataaaatccaatgacaattttcttatttggtacaatattccaattacatctttatggaactatatctcaaatgtaattctttcttgtgtactcataataaagacaatacagtgtactaaatgtttcccagtgtcataagatcaacaaaaaccattatattcaaaaacctttaaatttgcattttaattattaaaacacattcacataaaaaaatgaagcttcttagatgatgattttaaatacacctctttgatttacatatttttcaaaaagctgttttctcatttgggtacatctggtttttaacaggtgggtccagaatacaatggcgtgttcatatcaatattaatccttttgaagttctagtaaatgtgtgtgaaatgctcaattatacttaactatatagtagtgctaaaaattctgacagtaccttctaaatctttttttttttttttttttttttttttgagacagagtctcgctctgttgcccaggctggagtgcagtgatgagatctcggtttactgcaacctccaccccgcagggttctagccattctcatgtctcagcctcctgagtagttgggactacaggcacgcaccaccatgctcagctaattttttatttttagtagaggcgagatttcaccatgttggccaggctggtctcgaactcctggcctcaagtgatctgcccaccttggcttcccaaagtgctgggatttcatgagccaccaagcttggccctaaatctttttgattgctttatcctcactctgataacctttttgggagttctaagttttcaaatacttaatttatgaaactgattatattcttttaagttcttttctcatcgataatcacaatttttcttcacttgcacaagctttaagagcattctgatgaatatatgtttaacactttgatcttttaacaatagaacttctgagcactcagtacccaacatttctgtcactagcaatgtcaaatttttggttgaaaaaaattattttttcactacaaaactatagattttatgtaataaagtttatcttataaattataaattttattttgtgctgattcttaaacagtatcaaaagaagttccaggcggggattcattattattacaaatttcttgtttattcttctgcagatatcaagatttacatttatcatacttaaaagtattgaaaattcatccagatttttgtggtctctttcattctaggtggatgtttctaatatcctataataaaatcttaaatgtataaatataaaacactgcatacctattttccgaagaattaatgtatgtgcttacaatagaaatattttattattttttgagacagagtctcactctgtcgtcacccaggctgaagtgcagtggtgagatctcagctcactgcagcctcgacctcccaggctcaagggatcctcccacctcagcctttccagtagctgggactacaggcatgcgccaccatgcctagctaatttttttctgtatttttttctagagacagggttttgccatgttgcccaggctggtcttgcactcctgggctcaagtgatcctcttgccttggcctcccgaagtgctgggattactggtgtgagccactgcacccagtccaataaaaatattttaaactagtgattctcctaaagcaatcagtgatttaacacacgtaacttggctgcagtccctgcagtgacacaggccagattgtgtcataatgtggaaacaacaggaggcctgttatcaatggtactgacatcctacaactattagcacaaaccaatgagtttatattaaaatttctattaactaattgtaatatttattgtaattactatactatttaccctcgaaatatttcaacattttaaccatcaatatggtgcagggtgcataatggctaaatatcggatctagtctatatgctgaacttagtccaggggctgccagttttagcttcaggccaaaactccagaagagatcatcagtgggtcctggaagtgaagatgggttgcatttcagactctgaataaagagtcaatgtcttctttttcccctttttggtgggggatggatatcaagtgatgtcacacctagaccacttcactgaagttacctgcctgttcccagtagtcctttgaattttccaccagtgggtttgtattccaaaaaagacttcctgtcctgtccaactttctgagccaagaatgtacaaaacctgattatctgctagaaatgggtgagaatggaaaaatccaaatagttgacacctaaattaaaagcaaaaaagcatcttgccacatatgtaccctcaacttctacctgtcctggtcaaggtttagctccatgaaaccttgcctgatcccacaaggcgtgcccacctcctccctgctaaatgctcacagcattaagtctgtttctcttagatgacatcatacctactgactacagatgcctgaaagtaaattccaacccccagccccagcatcccttgccctacccgttatccccctttcccacaccgatcttaggcaatcacaccgccatgctttgcccacaacagtctcctcaacctgttccctcattccttctcgccagaatctatcaaggctcggcacaaaggtactctcccaggaggccttcctgaattcttctgtgaggcagactacttcccgagctgccccggcccttctccggccaagtctctccagaaactcatcccattcgttctcagatggaaggggacccacacccacgacaagcctccgggtttgcttaatgactcagacagcgagggtgctcggtaagccccaccagcccgcgccctactcagcaggtaatgacggagacctactaggtgacgggcgccgcggtagacgctgggataaggtccctgctccagggagcttacggtctattcactaacgtcaaagagcagtgagtgctgttacgtgtatgggagccaccagggtctccgcctgcctgcagggccacgcgcgcactcgacgcttcgcgcctgcctcagtttctccgtgaggccgcacagccccagtctcgggaggcgtgacacaccctccccgcgcgctctcgcgttaccaagtctgcgcagccgcacacccccagtcccggcgggccccgcgcgccaggccccttcccgacaggccccaggagccccgctgcatgccggggcttgaggtctcggcgaagcggcgcggcgcggcgaagcgcggcggccggcgggcgcgcgtggcaggaagcggaagcgatccgaggcccggccccggccccgccccgcgccgcgccgcgccgcttgccgccgggctagcactgacgtgtctctcggcggagctgctgtgcagtggaacgcgctgggccgcgggcagcgtcgcctcacgcggagcagagctgagctgaagcgggacccggagcccgagcagccgccgccatggcaagtgagtcctgtagggaagccctattgaggccgggacggaacagatcccccttccccacacccgtgcggtcgggcgcccgccggccaaccctgaccggccccctgcagaacgcggcccgtgcccccggcccttctcgagtatccccacgcgtccggggtgcggccggctcccctggcccctgctctcactcgtcgtgggcagaaggcgtccctgggtagcgcggaaggttacttctctgtgtcccaactcttcctgttttgtttctcccatcaaagtcaaatttctggaagtcatcaagcccttctgtgtcatcctgccggaaattcagaagccagagaggaaggtaagtaccccaaatcgccaacaaagaaggtttcaggaaactgtctggactctggaagtttacagtatgattaaaaatggcttcagcacggcaatggaaactctcccttctcttcccttggagtgtagttgtgctctgttattccggagagctgtcgaaaggtgacctggttgtgtggaaatttccactgaaatcactgtgctttatttggagcatctttggtggatgttgctccgagaacaaagcctccggttgccctgtcccaaaaatggatccgggccatgaatgaataaggcctcagttaggatagcagattgagttaccctccctttttcacctccaacgggagcagatcacgggttggttttttttcccaggagatgccctttgtatccagctgctaaagggaagggctgtcactttagtatttacaaatgattttgtaccttttatgtaggctgtcacaatagggggaataaaggctattcttttgtgaagtctgctgcttttcacagacggtgtattaaaacaaggaaagattaaatttagagctgtgctgaatcagaaattgtgtggagtgagtgttgccagtgtaactacagctgtcaacgaaaaaaagtttcattaggttcctaggttagagagtggggaataaaatgtttgtgtcctcacattatttttcaaactgttgttaaagcattcacatggacacttgggtgcttggaatccactttcatttttttacgtaaaatagtttcatataaatgcccatgtgctgcttttaatggackaatttgtaaagctttaccccctcaattccagtgtagcgaaggggcatggctctggaggcaggcaagcctaggtcccaccctttacatagcaccttaatagctatgtgaccttggccttgtaactcagtgtggtagacggaacaagggaaatacgtgcaaggtatagcagtggctcaggaagggattaactctgggagacatgatgtcttatggtggttttgaaggagaaatagaagtctccttgaaggracggaaargaattccaaataaaaggagtatatagtttgcaaaggcattggtgacaagagtgtagcatgtttggatgggaggttattagatgtagttgctattgatagaacataattgtaggtggggaacattaggagatgaataacaagggccagacatgagaatgtcactttggaagaaaaggagaggactagagttggtttagaggcttttcacatcagaggatgaactgtggtactgagcaagaatggatttaggggctactaagaagcagaggagacaggacttggataaagagcttttggggttttgatgttaaatttgattgtaaccaggagagaggacttggtgattagaaagggagttttgaaaaaattgtctgctctttgtttcccatcaagattcatttcagacaggttactctgaaatggcgttgccttctcttggccactttctaatttcttagtgtggtgggatggtaggtgggaagaggaccattctcaagagaagaagagtcctgtgaatgcccccagctttggatggagtatctgaacactgattcacccactgttgtgtggccgtatgactgtgtcctactttgcctgcatgtatagttagaggactgtgactccagttctggccagagggccaggaatgctgactcagtgcctgcctagaagtgtttttaaagaacacagttttgtcacttaatactgtcagtctctcacaaggtatttcaacctcagaatcttccgtctgtacaataattaatgtttgttaagccctctaaagccattaatgtagtgtaggcagcaggtattagtgaagacactcagtttcasaggcagaaaacctggaagagttcccactctactctttagtgacagaggytttgggtgggaggttttctaatgatacttaatacttaatagtcatctttacagtgattcttgtcacctatgcaacctatgtacctgagaagatgtgaaaatccttaaacaaatgttactagtaggttaaacatgcaactctcctgcccttccccaatatggtttattacactgttttacccttaattcatagaaaatacactattgagcaattccaaattacttgactctagaataacaaggttttgtgactgaaactcaaatgaaaagtggttgctcgtgtgttttacaagtcatgttctattgtgacattctttgttcttgagtcttaactgttaatgctaatggttaaaagcacagtttgggactcaaactcactttagcattggggtttggtacaaattatttagctcttctaaggctcagttgtaaaataaaggtaatgctctgtggtgtgaggtgagctggggtgatgcctgtaggtccttgcattgtgctctgtgcagaggaagttacgcagtacatggtacttatgtttggtacatggtttggcttctctgctgaacagagaaaagagtctggttggagtccatttttagagaaaggggtctgattggagtccatttttattaatttgcttttcaaagtaactccctgcttcaattcattctctcctactctagattcagtttaaggagaaagtgctgtggaccgctatcaccctctttatcttcttagtgtgctgccaggtaagctcaggcttgtatttcgtattggggagggggataagagtggctggaaacaggagtgctgactgttttgctctttgcctgttcccagattcccctgtttgggatcatgtcttcagattcagctgaccctttctattggatgagagtgattctagcctctaacagaggtaggactctggctctgtcttttctctgtagagtgtaggcttacctagcttcacttagttaaattaataggctttggctttatatggaacttagagagtgacttggaaaatagagtgaagaatgttarmgtgctgtgttgaatagccttattaaatgmtgagttcagcaccaaggcataccatcatatttggaattgtatttgaatgcagtacaaaacctgtaatgagaagataagtctatgctatagagagaataaaaaacatggaaaaactagaatactttttgaatacctgaaatgatgacatttccattgataacattcttcagaatatgtaatttgtttttcagctgtatctttttcatatstataggttacatatagtgtcaaaaaatatgtaacagtgttttatatcctctaaccagttacttatgggactggggaggattctgaatgtgtaggttgatactgcatttgattaactcatttaaaaaatatagttcaattaaattccaaatcagttggaagtgtagctcattttaacataatgggaagtagaggcttattcacaactagatacaattgtacaggctccttttccagactctggaaattatttgaatgttatcctttttttattaactgatgaagagacgaacatttcttatctctaaaaccagaatgaatctgtttatggtgaatttaaatgcagcagtctgtttagacaccatgtgacttcctaaacagaataagctgttgcctggcaggctgaacagaatgaattgaattatatactaatcgttgatattttggggttctaaattaaacacagctaggaaactgaaacacattggttttatataaggggtacccagtcaaattttgcktattcatttttaaaataaygtactacgtttccaagctgatattgactgttttgcttccccgtttcctcaaggcacattgatggagctagggatctctcctattgtcacgtctggccttataatgcaactcttggctggcgccaagataattgaagttggtgacaccccaaaagaccgagctctcttcaacggagcccaaaagtgtaagaaagattgtgaataatctgatgtctatagttggaaaatttgaatttgctataagattttggtatcagtttttctttttttatttattttttatttttttatttttttttgagatggagtcttactctgttgcccaggctggagtgcagtgacgcagtcttggctcactgcaacctccacctcccaggttcaagcaattctgcctcagcttcccgagtagctgggattacaggcacgtgccaccacacccagctaatttttgtatttttagtggagacgggatttcactacataggccatgctggtcttgaactcctgatcttgtgatccacccgcctcggcctcccaaagtgctgggattataggcgtgagccaccatgcccagcccaaacagtattttcttttgtgctgcaacctccttggcctgccaaccctgcaggagctccatgccctgtgttagcgtgagagagcacttctggtagagcagaggtggtgggtgctggggatgggctgggcaaggcaggggagagtgtctggagtgcccctgaggccatgtaatggaggagaaggatcagagcttggaggtcttagcacccttggccaccatttcattattgcttaaaaggaagtaatggctacttcagagctgtcataaggattaaataatcactgtcacaatgcctggcacatagtagttatttggcaagtgttttataaaagaatttaactgactggggggcggtggctcacgcctgtaacccccagcactttgggaggctgaggcgggcggatcatctgaggtcaggagtttgagaccaacctggccaacatggtgaaaccccatctctactaaaaaaatacaaaaattagccaggcgtggtgacaagtgccttaatcccagctacttgagaggcagaggcaggagaattgtttgaacccaggaggcagaggttgcagtgagccgagataaagccattgcactcaaacatgggggacaagagcaagacttctctcaaaaaaaaaaaagaatttaactgaagaaaaggtgatcctgtcagtccagctgtataatttaccagctctgtgatctggggaaaagttagatgatagctcttatgtttcactttcttcatctgtaaaaatggggataataatggtatttgcctcatatctaataagtgttactagtaacaattactagtcatcaaaattagccatatttagcctctgtttgctgaaaaacattaattaggaaatgatatttacagtctcctatccagtcatcttttcgcctacaccagcatgttttacaggtcttaaattagtatggtggataattgaatgagaaatacatctatttttttttttttttttttttttttgagacggagtctcactctgtcgcccaggctggggtgcagtggcgtgatcttggttcactgcaagctccgcttcctgggttcaagccattctcctgcctcagcctcccaagtagctgggactacaggtgcccgccaccacgcccagctaattttttgtatttttagtaaagacggggtttcactgtgttagtcaggatggtctcagtctcgatctcctgacttcgtgatccgcccgcctcaggctcccaaagtgctgggattacaggcgtgagccacagcgcccagccaagaaatacatctatttaaacttgtcagttttagataaaaattaggattctaaaatacacacatgtggctgggagcggtggctcatacttgtatcccagcactttgggaggccaaggcaggatgattgcttgaggccaggagttcgtgactagcctgggtaacacagtgagagagaccccatctctacaaaacaacaacaacaaattagccaagtgtggtgatgcacctgtagttctagctactagggaggctgaggtgggaggatcacttaagcccaggagtttgaggctgctagtgcaccactgcactcctgcccgggcaacagagcctgtctcttaaaacaaaacaaaaaacactaagaaaacaaaaaaagtacaagcacaaattggctgttttctctttggtcttcacaatgttttgaatgttttcctgcattaagaactaattgttgtggagcactttttaaaaagtcaaatagggactgtatttgatggccactttggagtaaaattaattttacatgacagattaaataggaaagctgaaactgaaggtcagactgtacttagaggacccatctagtactgtggaacttgtcaaatgtgtccattcccttgtgcctaacagtgaaatagagtgagttgtaagaaatgaagacaccctacaaaaaggaaagcttttgccaggcgtggctcaygtctgtaatcccagcactttgggaggctgaggtgggtggatcacgaggtcaggagttggagaccatcctggctaacacagtgaaaccctgtctacactaaaaatacaaaaaattagctggctgtggtggcacgtgcctgtaatcctagctactccagaggctgaggcaggaaaatcgcttgaacctgggaggtggaggttgcagtgagccaagatcatgccaccgtactccagcctgggcgacagagactccgtctcaaaaaaaaaaaaaaggaaagcttctattagaccaaaatagcttggtacctaagggaatgggaagagcagccaaatcaatggtacgtggggttttccttttaaaagcacattaaataaaaacttgagaagggatcactttaccccagagctaataattctgtcctctggacccagacctggatggtgagcctagagaggtggcccaaatctgtagttcagctcttgagccatcgagaccccaagtgcctgacattgagtttgggtgctgcaggtgtgacatctccagattgtgtctccggatgctgtcaggagtaggttctactccctgattttctttgaatagaacaaattttccaagtttcacttttactcctcccatgactaaaaagcaagtgaatctaggaaaaggtaaaactaaagaagaagtgtgcttttgttaaaaggcttttgattcatcatgtactttgctgatgtgatggtttagcgcgttctcagccgagccccttggaggtagtatcactgctcttcatctttgttctcccccgtgcctggcgttgaattggtgtttcttaattgtttcttttgttctgtgtagtgacccacttggaaaacacttctttctttcaattctagtatttggcatgatcattactatcggccagtctatcgtgtatgtgatgaccgggatgtatggggacccttctgaaatgggtgctggaatttgcctgctaatcaccattcaggtaattattatgctaacatctccctttgagtagcccctcacacttacctacaattctcacataacgaatctcaagcacacctaaaaggaactcctactgaaaggaagcagaagcctaagactctgggttagccctctgaattcagcagagaaaggctttactgacygctctctggggctgaggatgtgatctcattccgtcttcagcgtttatatcagagaacccaattactgaaggacggaaccatgtccrtggggagcagtaacacatagtcttgtatttttgaatttttacagctctttgttgctggcttaattgtcctacttttggatgaactcctgcaaaaaggatatggccttggctctggtatttctctcttcattgcaactaacatctgtgaaaccatcgtatggaaggcattcagccccactactgtcaacactggccgaggtaagggccctgtgctcccctggtggcgacagctttyagcaaaaacaattgagcaatgcaaagcagaagacaaaaatccccccattccacagaaaaataatgtcagttttaggtttatctcttctggtktttgggtccatctgcaaagttttaaaaacacaaataggcttgtaattatgatgatacctmacttgcacttttcatataaaaatatctcctggacgtttggcacgtcagaatacacaatcctgcctcacttttcttagcacagtataagcttatattgcaacgataaagcaacgttaagtcatttccaggtttttttatcgttaacattgaaaccatgactgtcctcatatgttcatctttgtatattttggcagctgctctcagtgaataagtttctaaaaatgaaattcctaaaccaaagcacttggtcrtgcaaggggcagctttctgaaaaaggcctgaacttggagcttagcacctgcgttcaaatcctggctgttcctgttagtcatacatacgtggctttgggcagattcctgcaccactgaatcttggttaccaggatgcartgagaagcaacatgaaattacatgatgcctggctcctggtagatgtgtatcaaacattggcatgctgtgctacatccaccaagtgccgtggaaatcttgtaacagcatgtttttaataaaaagttcaaaacatacaagggaagccttagagagtgtgacttattagggaaaggaaataaacattttttggcactaaatatcttcttcactgaggagcattccaggagaaataatcatgcatatttgagagttttcttttaattgaatgttggaaacagagtccttggcctccagagaccatattatctcattaatgagatggaaaactggtccccaaacaagtgaaggctgcatgtgcctaacaggttacaaaggagagtggagcttgagrtagggagccatagagaagagtgggcaagatcacatttgatgcttccttgagtactttgtataaatttaggaaatccaaggtaaattgggagaagcaggtccagaaggcaaagtttgacaggatgtgaaaaggcaagagggggatggcattgtaggagttcaggtatttgtcaagaccatcatggtgactggcttttggggagtgcctgagtgggaaggaagtaaagtcagaggggagcccctggtggcttagcagcccagtagtagccgccagaggctcatgttccattctgcagcagggcattgagtaatgggagccagagtttggaagaagtgatttgctctgcactgaaaggcagagagagcagctaggtgcgtgcagcagtaatccagccccarttaagccatcctacaggagagcactgtgtgagggcatttggaggaagcaagttgagagaggggaccagagaggcactttcaaggtgggggaaaactaagaagcaaaggtggatttgtctggccttgaagtcagtgtgtctacatgtcagttgctcatgtttgggacctggctgacacgagatgcattcaggaagggctgtgccccatggcctgcatgtgggcagtgagtggtgctagagggagagcctagggaggggcagggagagccacacagagggcacagctgggacggcagctttgcagctgtgcctggagatgttgcagcttggcttgggacaggggaggctgttgaatgagattctacaggcagagacagtaatcactgctgcttccctgggcagcaggaacaatgcagaactgggaattagtcccaaatttgaaaccgtggggaaacaggccagccttgtcacacaggaccaaaaggtggaaaggatgggaattgacgaaagaccgccacagggtgagatgaggacatgatggccagttaggatatggtgtctctttcacagaagccacagcagaggaggtcagtggtcatattggttagatggtctgcctgacatgtcatctcggaatggtccaggaagatgtagcaggtggtcctagctatcacgtgttagaaacttgggaacagtgcttttgagttctttagtttcaccttttcctagattcacttgctttttagtcatgggaggagtaaaagtgaaagttggaagatttgttctatgaaaggaaaatcagggagcagaacctactcctgacagcatccagagacacaatctggagatgtcacacctgcagcaccsaaactcaatgtcaggcacttggggtctggatggctcctgagctgaactacagatttgggccacctctctaggctcaccatccagatctgggtccagaggacagaattattacctttgggttaaagtgatcccttctcaagtttttatttaatgtgcttttaaaaggcaaaccccacataccatcagtttggttactcttcccattccctcagctaccaagttattttggttgaatagaagctttcctttttgtagggtgtcttcatttcttacatctcactctatttcactgttaggcacaagggaatggacacatttgacaagttccacagtactagatgggtcctctaagtacagtctgaccttcagtttcagctttcctatttaatctgtcatgtaaaattaattgtactccaaagtggccatcaaatacagtccctatttgactttttgttgttgttgagacggagtcttgctctgtcacccaggctggagtgcattggcgccatctcggctcactgcaacctccgcctcccgggttcaagcagttctctgcctcagcctcctgagtatgggattacaggcgcccgccaccatgttcggctaatttttttgtattattagtagagacagggtttcaccatcttggccaggctggtcttgaactcctgaccttgtgatccgcccgcctcagtctcccaaagtgctgggattacaggcgtgagccaccacgcccgactcctatttgacttttttaaaagtgctcctcagagtacygataccatgaccccacactgcccacagagaccctgtctctggaagtaatgccagcttcctgccagtagaagcagcgtgagttgccaggcttccattatgggatggttatgctgtcctggaacggcagaggttatcacttgtttctttytttcgctttttagttttttaacgtaagtaaatttcttgctgatgtctaaaacttaggccttaataatgcaccacactccccgccttcctctcacttgttactctgttgtctggttcttagattgggtccctttcctatatccctcagtccctcagtaagctcactccacccctaggcctgcctccctcaggagcatctcctggcagggtgtcatttggatgggaccacatggtggacgcaagcatatcctctgtacttgtatccttggtgtgagaagcagagagctggagcctccccactcaccagccaagggcagcctgcacttcatagctgttgaatgggtacttgtacttctcaagattgtccaggaaagtagatttgccagctctgagccccctcttcagtggatgacccctttcagctagagttcagcagagtctgcttttatttttataaattatcatcgttccacacctctggtggccactgactcatgtgcmtaagaaatgagaccaattaattttaaaaagtggaatagtggttgggtgctgtggctcacacctgtaatcccaacactttgggagggtgaggcgggaggattgcttgaggtcaggagttcgagaccagactgggtaacatagtgagaccccaactgtacaaaaataaaaaataaaaaattagccaggcgtggtagcatgcctatagtcccagctattcggaagtctgagataggatcacttgagcccaggaggagaaggttgaggctgcagtgagctgcgaccacaccactgcactctagcctaggcagccgagagagagggaccctgtctaaaaaaaatcaaaaacaaaccagaatagcccgtttctgtagtttgaattctctacagaagagaagggagggatgagaataatacatgctgtatccctgtggctatgggcaccatgagtctaataacttaagtttgttttcctctttttatttgtctgctaagaaggctagaagcaaattgagttgcctgttcgttccttcatatwtgtctcctcctctgccaacaggaatggaatttgaaggtgctatcatcgcacttttccatctgctggccacacgcacagacaaggtccgagcccttcgggaggcgttctaccgccagaatcttcccaacctcatgaatctcatcgccaccatctttgtctttgcagtggtcatctatttccaggtgtgtccagatccaaccccagggagtttccatggtctggatttaagtttcagaatgccttgtgtgcagtcccccactctgtggggtgcactgtcatcatattgtgttgaaacgatgagatggtatttgaaggcagcaggtttccagatgagctggacaagcatgttcattgagtcatgggacctgccattaacgaaacaaaattaaggcagttctaacgtaagtgaaatcatgttcytctgggttgggcctatcgacagrtaagatacatttttaagttcttagttcaagagaagcaaaaagtactctagctctgaaacctcattgctctcttatagaaagtttgtatgatatttataggtaacttctgcatctcggaaayggcctatcttcttaagctgtcttacctttaaaagtattccatctcttaaacttgcttctgagtaagagacctgaactgctattgttttcctgtaattggattgatctttgtattttttgatggtccactttgtattttggtgtttatttaaaagaagggacagagatgaaaggcagtttgatgtttgtgaaaggtatttatacgagctacatgcttttcccattccttctgctgagactaagccacattcytgcttaataaaaagctatctctttaggggctttgccagaatttgcagtcagatcattaagaattttttttttttttttttttttgagacggagtcttgstctgttgcccaggctggagtgcagtggcgcgatctcgactcgactcactgcaacctccgcctcccaggttcaagcgattctcctgcctcagcctcccgagtagatgggattacaggtgcctgtcaccacgcccggctaatttttttttatttttagtatagacagggtttcaccgtgttagccaggatggtctcgatctcctgacctcgtgatccgcccgcctccacattacaaagcgctgggattacaggcgtgagccaccgcacccggccttaagtatttaatttttaaatcctctgtattccgagccctgttctaggtactgggagctcataaaaataaaccctttctagtctccaggggtttcagagggagaagttgtattcctagaaaagtttagcttttctgtttatgattaaaaacactgtaaggaactattataaggtgtgaggccactgctgtagtggccctgcctcagagccagtgtaaaagcttaggaaacatcaccagctagagagaagcgcccttgggatttgggtgtgtggcctccaggcttttctccatattccacacagatgtggatgtaatgtgataggctctgtcttttggaaaaaaaaaaagtgggggtggggatcattccaccgtgcttgcttccatgttttgttttgtgtgagacagggtctcgttgtgttgcttaggctggaatgcagtggcatgatctcggctcactgcagcctagacctcccaggctcaagtgattgtcccacctcagcctcctgagtagctgggactacaggcgcgcaccaccacacccggccagttttgtttattttttgtagagacggagtctgactgtgttgcccaggctggtatcgaacttctgggctcaagcaattctcccacctcggcctcccaaagtgctgggattacaggtgtaagtcaccacgcctagccttcagtgtatttttaaaccagcttttctgggcccyttctggatgtgccaagtgcaggagtgcagtggtgggtaaggagtgggcacaagctctcggaactgggagccccagaaccagcacacaggatttcctcccttgtggcccactggacagtccccggccgggctgtgtttctgtgcagcaggctgaaatgaggcagtgaaggggatttggttctgtttggcttctcagggcttccgagtggacctgccaatcaagtcggcccgctaccgtggccagtacaacacctatcccatcaagctcttctatacgtccaacatccccatcatcctgcagtctgccctggtgtccaacctttatgtcatctcccaaatgctctcagctcgcttcagtggcaacttgctggtcagcctgctgggcacctggtcggtaagtaggctctttgaagatgagctagcaatgcagctaagttgcagtggtttctatcagtgtcttgctcatgaacagatatttcatccaaagatattttccattgtgccttttacaaattcagcacattaaattatcttttcagtaaaaaaattgtactgtgggcaccgagtaaaattgcattctttcatctgctcagaactatttttgccttgatgctaaagtaaaatgaaggagcactcacatgcgtttggtttcttcttccccaggacacgtcttctgggggcccagcacgtgcttatccagttggtggcctttgctattacctgtcccctccagaatcttttggctccgtgttagaagacccggtccatgcagttgtatacatagtgttcatgctgggctcctgtgcattcttctccaaaacgtggattgaggtctcaggttcctctgccaaagatgtaagtagaagcaaaactttctggaagggtgatgaaagtgtgactggtataaggggtgtggacttgtcacctcatcataaataatggtctgtgacrtgtgcagatagatcgtcgtcctttagggggcagttcagaagctttaagggctgacagatggagtccagcagtagatcagctgtgggtatgagaatctgaatccacactgtaaagttagactttktcatatgacttccttgcggcagttttaaagttctctgtatgaatattgtcagtgctcgaagaggcgatctgtaactgttcagtaccacttggaatgcctatttccccttcagcctccaattccaacttctcccctgtgggcaccctrcaggttgcaaagcagctgaaggagcagcagatggtgatgagaggccaccgagagacctccatggtccatgaactcaaccggtgagtggtggccccaggtccccaacctcccgtctgtggacatgtgttgtttctttccatgcagggcatcctgataggccctagcacttactgggtcactaaatcttatccttgggttacaggacagaattaaatgttatatatttataaacttgctaagtgctggacactggagacgtaaaaataaacacttacagcccctttcctccagagggagccactgggtaaggagatggaagcatgtggccaggcggrtaggagacagtgcagtaagggtcctgagagcaacagctgtgactggcagcgggaccctcaccctggctcatgccggtggggtgctgaagagagcgccctggaggagggtcactctgagctcagagcaggcaggtcctggcatctgagcgcattttggggcctgtggtggcattaaggctagagaggctggcagtggctgggcacggaaggggttgatgtgcatctgaagcagggcagaagggatggagcctgcagtctcttaggaaggtcagtgctaatacatgaaaccacgctagagagggagagggggaggccacatacctgccaggctgtggtgagagtttgggccagaggtgatggtgccagatacagctgtacccttggagatggagcagttaggtaaggaagggcaaagtccaggtgaccttagatgctgccacagcactcttcagtctgcacagtcctcagtacaactactcatctcttccatcgtcactcagaagcagccacagacagacaacagacaaatgagcatggccgtgttcctacaaagctggctacaaagtcagctgcagaccaggttgtcctatgggccttacctaaaggaagcaaccacaggaaaagccagaattgcaaacttcagatcattttctaatccctagcagggatggtaggcaatttagttcattctcttaatattaagctgctggatttacagcactgtgcagtagaagtagaattcaagtcacatgtagtttttaaaatttctagaagtcacattaaaaaagtaaaaagaaacaggtgaaattaattttaatatatttaacctagtatatccaaagtatcatttcaacattataattaatgttaagaaaaaccatgatgaaatattttacatccttgtcttcaaatctccaaaatcttatgtgacatctcagtttggtctagtcacagtcccctggccacgtgtggccagtgtggccactgcctggacagcagcgccttggcctagagcgctagcatgttagtagatgactttctaggagacagcagaggggcctttgaggcattaggtcccaaagtctcaggtgagcctgttggccgcctggctcacggggagctctgtgggtgtccaggagctgactgtgtcccctcccccaggtacatccccacagccgcggcctttggtgggctgtgcatcggggccctctcggtcctggctgacttcctaggcgccattgggtctggaaccgggatcctgctcgcagtcacaatcatctaccagtactttgagatcttcgttaaggagcaaagygaggttggcagcatgggggccctgctcttctgagcccgtctcccggacaggttgaggaagctgctccagaagcgcctcggaaggggagctctcatcatggcgcgtgctgctgcggcatatggacttttaataatgtttttgaatttcgtattctttcattccactgtgtaaagtgctagacattttccaatttaaaattttgctttttatcctggcactggcaaaaaraactgtgaaagtgaaattttattcagccgactgccagagaagtgggaatggtataggattgtccccaagtgtccatgtaacttttgttttaacctttgcaccttctcagtgctgtatgcggctgcagccgtctcacctgtttccccacaaagggaatttctcactctggttggaagcacaaacactgaaatgtctacgtttcattttggcagtarggtgtgaagctgggagcagatcatgtatttcccggagacrtgggaccttgctggcatgtctccttcacaatcaggcgtgggaatatctggcttaggactgtttctctctaagacaccattgttttcccttattttaaaagtgatttttttaaggacagaacttcttccaaaagagagggatggctttcccagaagacactcctggccatctgtggatttgtctgtgcacctattggctcttctagctgactcttctsgttgggcttagagtctgcctgtttctgctagctccgtgtttagtccacttgggtcatcagctctgccaagctgagcctggccaagctaggtggacagacccttgcagtgatgtccgtttgtccagattctgccagtcatcactggacacgtctcctcgcagctgccctagcaaggggagacattgtggtagctatcagacatggacagaaactgacttagtgctcacaagcccctacaccttctgggctgaagatcacccagctgtgttcagaattttcttactgtgcttaggactgcacgcaagtgagcagacaccaccgacttcctttctgcgtcaccagtgtcgtcagcagagagaggacagcacaggctcaaggttggtagtgaagtcaggttcggggtgcatgggctgtggtggtgktgatcagttgctccagtgtttgaaataagaagactcatgtttatgtctggaataagttctgtttgtgctgacaggtggcctaggtcctggagatgagcacyctctctctggcctttagggagtcccctcttaggacaggcactgcccagcagcaagggcagcagagttgggtgctaagatcctgaggagctcgaggtttcgagctggctttagacattggtgggaccaaggatgttttgcaggatgccctgatcctaagaagggggcctgggggtgcgtgcagcctgtcggggagaccccactctgacagtgggcacacggcagcctgcaaagcacagggccaccgccacagcccggcagaggggcacactctggagaccttgctggcagtgctagccaggaaacagagtgaccaagggacaagaagggacttgcctaaagccacccagcaactcagcagcagaaccaagatgggccccaggctcctccatatggcccagggcttaccaccctatcacacgtggccttgtctagacccagtcctgagcaggggagaggctcttgagacctgatgccctcctacccacatggttctcccactgccctgtctgctctgctgctacagaggggcagggcctcccccagcccacgcttrggaatgcttggcctctggcaggcaggcagskgtacccaagctggtgggcagggggctggaaggcaccaggcctcaggaggagccccatagtcccgcctgcagcctgtaaccatcggctgggccctgcaaggcccacactcacgccctgtgggtgatggtcacggtgggtgggtgggggctgaccccagcttccaggggactgtcactgtggacgccaaaatggcataactgagataaggtgaataagtgacaaataaagccagttttttacaaggtacttgatcatgttctcttaattttaaattagattttattcccaaaaaggccagtgaggcgcaaagcttggttgcagctttatgtgtgtcaaaggcttggctggggcactcaggcattttgcctggaaaagttcccttctgatggtcatgtcaacctggtgctcacatttgtgataaagtgatatgggtgctgggccacatgtggagctgctgcagggctctgcccgtgaggcagagtgcactggctgtcccgtgagaatgcagaggcctccgctgagccagggcgcctgccaccccgtggaagagtgggaaccttctagcaggagcctagggccccataactcgaagccctttgagcctcagctccagtacccagctggtgattggagaagtcttaacttggttgtgaggctggcctcagacccgacctgtagccaagccagaaggacccagtgttgtgtgggtgggagtggcaggcttgtggctgctcccttagaacgtgtctagaagtctttctgtttctacaccaagcccccagtggtaggccacatttccactctccccagtcctggacagggcctcaccccaaacctgccgccgtccccaccacctgggcctggtgcttcctcaggaacttgaggggcaggtgggtgggcaaccccagggcaggcctgaccagggctgtgggaggtcgttactccttagctgggctccagcctcagtatttccttgtagtcttagaccttgtcttggaaactgatttccaaggggagttgggtcagagcaggatggttcctctgagaccacctgatggacaggtgtgggcctggccttgcagaagccacacctcagcactgtgttttgagactgctaggacacatgtgcagccaggtctgccccgcgctccctctgcacctgctggcctcagggctcagggaggccctggacaggagcacagcacgtggcctcaggctccagaccagccaggcgctgtgaattgctgaggcaggcagggtgcttgccagtataaatatgttagaaaacctgctgccccagggaagcagtaggccatctctcgtgcctcaggtattcgtttgcacctgtggccgtggcccctcttgcctgagagcaaacggagcccacattccagcagccacgcacgcttcaagatggcaggccctggcgtctctccacctggctcctccccatgcacagggaactaatgcacagtgatgggggggtaaggcttactctgctttttcccttggggcaggcactgtcccagccacttcctacatgtgctctcacttcaccccactagaggcccaggaggaaacaagtccgtccattttacaggtgaagaaactgaggcccagggaaatagagtgtggccaaaagtcacttagctcccgagccaggacaaaaagcctaaggctcacttcctactccaagtccctgtctggctgctggtcctgcctgcaggtacttctgctagggacgtagctggggcaaggaatgaggagtctagggaaacaggccccacccccggagcttccccttgctgcccttggctcaggggcagcacccgcttcaactggcactccgctccatccatggtgctgctttaccactgcctccctggacctgctgatgccctaccccataccccgcccccagcctgctcctgctgaagccaggccagcatgaagtcctcaggaaggctgggatgagcctcccatctcatttctgaggggtctgagccccatggcctggggaagagcaacagattcctgatgagggccaggggatgggcatgtggcactgtccgagagtcagcaaaagccccaacctgagcttcagcacctaccaatgcctggttctggagagccaggtgtgcccctaagtggtagtgcccacctcactcccctgccccaatcccttctagggccacattacccactcctttccactcagcaaacattattgagcctcatggggaaatggaacagaaggtgcctctcctcttaaaagctcatgccccagcagtaagggttctgcagtgtctgtcaaacctgtgggccttgttccctttgctgtctgcctgacaagctcctgttcatccttcaaagcacagctcaataaggctagaaacatctaaatgcccatcggagggggctgaataaattacagcagctcctccctgtggaaaggaactaggaggacattctttatatgttgagttagaagaatctccaagatatgctgtcaaggaagaatacagaaagcaagaaacaatagcgtatgctaccatttgtgtttaaaaggggggtaggaagtgactaatagactaactacatcaggaaaaggtgtagcaatttcccataaaactagacatacacttaccctacacccagctattctactcctgggtattgaaacccaagatgaaaatatatgcctatacaaagacttgtacaagaatgttcataatagctgaaaaatagggaacagcctaggtggccatcaacaggcaaatggatacatgtggtggatccacagggtggcattttacccagcaataaaaaataaactatccatacacacaacattcaggagctcaaaagctaagtgaaagaaacaagtcatgttgtatgatgccatttacatgaaattctagagcaggaaaacctaatctattgcaaaaaaaaaaaaaattctaacagtggttgcctctagtgtgttagagattggcacaaggaactttctgggcaatagtaatatccttcactgggatttgggtttcattagtcagaactcatggagtgctccacttaggatttgtacatttcactgtatttttaacgtttaaaaataaccataagcagccgggcacagtggctcatgcctgtaattctggcactgtgggaggccaaagcaggtggatcacctgaggtcaggagttcaagaccagcctgaccaacatggagaaaccccatctctactaaaaacacaaaattagctgggtgtggtggcatgcgcttataatcccagctacttgggaggctgaggcaggagaatcacttgaacccgggaggcggtggttgcagtaagctgagatggcgccattgcattccagcctgggcaacaggagcgaaactccgtctcaaaaaaaaaaaaaaaaaaaaaaaaaaacttaaaaaaccataatcaagtactgaactctagataattatacacatgcttaactatttacagaggttgttgtatctgcaactcactttgaaatgcacagaagactgacaagactgactggcaggcagacagggggatgggcagtgcagtgcctagatgacagggatatgggggctcacctgcaatcctttttttttattcccccaaagggggtgcactattcctggaggtactgcaataccaggtggatgcatggagtggaaagagcaaggtcctattccatctccctgctccaaaaatccatttaacatactgtcctcagatagcagatattaaagtgataagaacactacacttgatcttagccaaaggctgagaggcgattgcctgtaattcttgcagttttccatgtgatatgtttcataatgagtgttgggaaggtcctgtgagtgtgtgctgcctcacccaggtcctggccatctctagaggaacacaccggtgtaaggcaggcgcttccggaaagggaacaggaggcagggggcaggtgtcgaggtaggttttcacggtacacgcctttggcaattttgcatcaaaaaactaagtgtatgcacattttttttaattgaaagcccaactcagccttcccccactgctccttccccgcatgcacggggggacacacgccttcctccctgcctgccgggacttcaacctcgnnnnnnnnnnnnnnnnnnnnnnnnnnnnnnnnnnnnnnnnnnnnnnnnnnnnnnnnnnnnnnnnnnnnnnnnnnnnnnnnnnnnnnnnnnnnnnnnnnnnnnnnnnnnnnnnnnnnnnnnnnnnnnnnnnnnnnnnnnnnnnnnnnnnnnnnnnnnnnnnnnnnnnnnnnnnnnnnnnnnnnnnnnnnnnnnnnnnnnnnnnnnnnnnnnnnnnnnnnnnnnnnnnnnnnnnnnnnnnnnnnnnnnnnnnnnnnnnnnnnnnnnnnnnnnnnnnnnnnnnnnnnnnnnnnnnnnnnnnnnnnnnnnnnnnnnnnnnnnnnnnnnnnnnnnnnnnnnnnnnnnnnnnnnnnnnnnnnnnnnnnnnnnnnnnnnnnnnnnnnnnnnnnnnnnnnnnnnnnnnnnnnnnnnnnnnnnnnnnnnnnnnnnnnnnnnnnnnnnnnnnnnnnnnnnnnnnnnnnnnnnnnnnnnnnnnnnnnnnnnnnnnnnnnnnnnnnnnnnnnnnnnnnnnnnnnnnnnnnnnnnnnnnnnnnnnnnnnnnnnnnnnnnnnnnnnnnnnnnnnnnnnnnnnnnnnnnnnnnnnnnnnnnnnnnnnnnnnnnnnnnnnnnnnnnnnnnnnnnnnnnnnnnnnnnnnnnnnnnnnnnnnnnnnnnnnnnnnnnnnnnnnnnnnnnnnnnnnnnnnnnnnnnnnnnnnnnnnnnnnnnnnnnnnnnnnnnnnnnnnnnnnnnnnnnnnnnnnnnnnnnnnnnnnnnnnnnnnnnnnnnnnnnnnnnnnnnnnnnnnnnnnnnnnnnnnnnnnnnnnnnnnnnnnnnnnnnnnnnnnnnnnnnnnnnnnnnnnnnnnnnnnnnnnnnnnnnnnnnnnnnnnnnnnnnnnnnnnnnnnnnnnnnnnnnnnnnnnnnnnnnnnnnnnnnnnnnnnnnnnnnnnnnnnnnnnnnnnnnnnnnnnnnnnnnnnnnnnnnnnnnnnnnnnnnnnnnnnnnnnnnnnnnnnnnnnnnnnnnnnnnnnnnnnnnnnnnnnnnnnnnnnnnnnnnnnnnnnnnnnnnnnnnnnnnnnnnnnnnnnnnnnnnnnnnnnnnnnnnnnnnnnnnnnnnnnnnnnnnnnnnnnnnnnnnnnnnnnnnnnnnnnnnnnnnnnnnnnnnnnnnnnnnnnnnnnnnnnnnnnnnnnnnnnnnnnnnnnnnnnnnnnnnnnnnnnnnnnnnnnnnnnnnnnnnnnnnnnnnnnnnnnnnnnnnnnnnnnnnnnnnnnnnnnnnnnnnnnnnnnnnnnnnnnnnnnnnnnnnnnnnnnnnnnnnnnnnnnnnnnnnnnnnnnnnnnnnnnnnnnnnnnnnnnnnnnnnnnnnnnnnnnnnnnnnnnnnnnnnnnnnnnnnnnnnnnnnnnnnnnnnnnnnnnnnnnnnnnnnnnnnnnnnnnnnnnnnnnnnnnnnnnnnnnnnnnnnnnnnnnnnnnnnnnnnnnnnnnnnnnnnnnnnnnnnnnnnnnnnnnnnnnnnnnnnnnnnnnnnnnnnnnnnnnnnnnnnnnnnnnnnnnnnnnnnnnnnnnnnnnnnnnnnnnnnnnnnnnnnnnnnnnnnnnnnnnnnnnnnnnnnnnnnnnnnnnnnnnnnnnnnnnnnnnnnnnnnnnnnnnnnnnnnnnnnnnnnnnnnnnnnnnnnnnnnnnnnnnnnnnnnnnnnnnnnnnnnnnnnnnnnnnnnnnnnnnnnnnnnnnnnnnnnnnnnnnnnnnnnnnnnnnnnnnnnnnnnnnnnnnnnnnnnnnnnnnnnnnnnnnnnnnnnnnnnnnnnnnnnnnnnnnnnnnnnnnnnnnnnnnnnnnnnnnnnnnnnnnnnnnnnnnnnnnnnnnnnnnnnnnnnnnnnnnnnnnnnnnnnnnnnnnnnnnnnnnnnnnnnnnnnnnnnnnnnnnnnnnnnnnnnnnnnnnnnnnnnnnnnnnnnnnnnnnnnnnnnnnnnnnnnnnnnnnnnnnnnnnnnnnnnnnnnnnnnnnnnnnnnnnnnnnnnnnnnnnnnnnnnnnnnnnnnnnnnnnnnnnnnnnnnnnnnnnnnnnnnnnnnnnnnnnnnnnnnnnnnnnnnnnnnnnnnnnnnnnnnnnnnnnnnnnnnnnnnnnn

SEQ ID NO: 98140 - DNA, 62745 bp, Homo sapiens
  misc_feature (1)...(62745): n = A,T,C or G
gggcggggagagttggcgacccgggcccatcaccgccccagtgccaccgccccagtgcctgaccagatggggtgcggtccctacgcccggcgtggccccgccgccgctcagatctgaagtccggctttcgctcgccctgcgcggcggaacctctgacccggagcagctctaggccgtgggcttcgtctcctcctcctggaaggaatgaatgggctccccgacacacacctctcagaaaactcacctttcacgctgaccttcaaaagaaaagaaagaaagaaaaagaaaaatccgctcgaagcgggaaaatgtccacgcccggatttggggtggacacgcgccccggcctggctggaggggccaacccagcggggcccgcctgcccgccggcctttctgtaactttctctctttaaacttccaatgaatgaacgtgcctcttcttacggatttgtttagattagggaatagattcctcgctgatagcgttgctttgcaaataagacctcctatattattcaaaccaaacgagtttgtgtctttaaaggactatagcagccccattctatgttaagggttggctattacaattattatatgcttagggaaaaaatgtaagccccgtagtttgtgcttttcttgatgtacagaaaggtttatcttaggtggataggttttgttttgtttcttaaatgggatttttttggttcgtgtctttgaagggctgtttcgcgacgtcattaatgaactaatcggttttcagatttcaagacggtgtgtaattgatgtaaccactgaggaatttcagtgcacaccagactaagactcttccagcgcaggggattccagatgcttcttgggccctctggaagccatggggatgtttccagaccgaaaggagggctttgctggggagcagatgtgctgcctctccccgacccaggattttgaggccatgtttccgttaagctggaccgagagccctctgggagagggaggcaggtcgtagggggcgggggtgagggggagcgagatgaggtcgtcgctggacgctgggctcccttgtcgttgtccttttccccagaatccatggtcaggcctagggagccacccctgggtgctcgagatgagtccccaccctcactgaaggtcggtcactggatgtttgtgtgcatcgtaaggggcccaccgaagtcccgaagccttctcagggaccagcgagaaagaggagcaggcttgggagacagggaaggaaaatgcaggggaaagggctcacccctcgaccccaggtaaaattagaaggaacgtgtggcaacccaggtgcagctttggtcgctcgctcaaggactttgctagtcactaccattaattaattaatcactatcattaactaccaaggacaccgtttttattcccctaaaagcgtcaccttgaggggaatggagaattgggcagcagctatgcaaatcctgggacaggagacactgcctgaggaccctctctcactcccaatcccagaacccgaagttatccccgacaaccaagtccaagcacatgaaccaagacgatcagcttcaggcagctccttacccccacaagcggcccaggaggtgggcattatcccccacccctgggatttctccatccctccctcttctctcctgcgggagagagagctgtggtcacccagttgggcgcgatggctctggactaatggggtctctagacccagggcacaaaggccaatctgccaggggttactgcatgtaatgagataatcagacatgttgaccaacctaaaagaaaagactctcccagggagtaactcccagtgaaataatttattaaaaaaagcaaaaaagagacataaatttctctctactacttgaggaaacagcaaacagaacgaattagggtcttggcctctgcaggaataaattatttccgacttggtctggatacctgtaattatttgtaagctgtgggtagtaatactgtaattgtcccccggtcctttctggaagtagcaatgaccccaaggacaattggtgacgtctccacagggtttacacatggaaaggagtgaaaaatcgaggaattctttcagatagcccagaccaaaaatcctcccagccatgaaaaggtcatatatgtgatgctgggccaagcggacttttctggagtaaccatatcataactgattgcggatgtagacaagagcgtataaaccaaataggcttgaatcaacgcagtcctggattttctgttgcctctgcttgctggggcagtggaagttcttaaactccacttcagaggttggaaattcttccccctcccccacctccttagtgacaaggtctctgatctcctgctgccactgcaatagcctctcccatcccgcggggaacggccggagttcttcccttgatctctcccgagtcggcttccgctggggatggatcgcaggtaggcgccggcgcggcctggggaagaacagttgcggagcatctgaagcggaaaatccaagcagatgtgaggcgatccgggcccgcctcgttcctcttggggcctgaatttcttccagataagtttcctaatggaacatttctaagaggtggggtacgaggcggcttgctcgcacgcgcagtgggacagactgcgggtggggacgtactgagaggtccggacctcaatgcgtccgacccgtctccacaccgcccttttccagcccccagtctcctttcattccctactcttcaggctcctttggggccagtgggtgaaccgccatttagaacggtgcctcggactcgggggtcgtgcgctccatctctgcctcccccctggggcccgcgaggctggtccgggctttctgagctgggcgttcggctttaggcccaatacctggaccaggaatttcttctccccgcgccagaagggaaagacataggaggtgtcccaatctgcggtcaccgccgatgctcctgaccactctagtgagcacctgcccggtacttttccattccaacagagcttccagcttcatactaactatcccacatacggcctgtgggtattagctctaagtgtccttttccgagggcccgaggctccccctccagcagggagagctccgggacggcccccaccaagggttgggtttcttccttcacaattccacagaggcatccctgtccttcctacctgggaaacctcgaggtgcggtgcccgtgtacttctggtactttgcgtggtgccatcagggaccccagagccacagctgcgtgtgtgtgtggatgtgtgtgtgtgtgtgcgcgcgcgcgcgtgtacggcgaaaggatgtgcttgggggagccgagtacacaacgtctgcttgggcagctgctgggcaggcgttgggcctggaggtatctcacacccacgtatcttccagtcttcaaacacggcattgctctgcctcccatagcgcgcttcgaacctgcctcgcggacacgtgaacagaggctgtccctgggaagataagtgcgctttcccgtaaaatccgggaaatttgccttgaggaaagtttccgttcttgttacttgtcgggtttctcccacttccacttagccatgtttctgcgatctgggtaatccctttcaagcccgggaggaattctcccgggtccataattgagggtcggaagccgtgggggtgagaaacgcattaaatcctcccgaagcccaggaggtgccagagcgggctcagggggccgcctgcggaagctgcggcaggggctgggtccgtagcctctaaccccttggagccccttctcccagaggcccggagccggcagctgtcagcgcagccaggagcgggatcctgggcgcggaggtgggtccgactcgccaggcttgggcattggagacccgcgccgctagcccatggccctctgctcaagccgctgcaacaggaaagcgctcctggatccgaaaccccaaaggaaagcgctgttactctgtgcgtccggctcgcgtggcgtcgcggtttcggagcaccaagcctgcgagccctggccacgatgtggactccgcaaggggctagggacaggcagggggagagcccgggtttgcgcacaccttccagcccctggagggagcctgctcggcttcgaacgccttcgaacttttgaccttcaaaggagtccctggaaaaggtcaggagcgcctgctgcaggcacggttgccgaaggccaggccttcctggcgcaggggagggccaggggagggaagcggatactcagtcgctgtccgacggcgagttttcggagcagcaggctcatgatcccgggccagtggcgagagcagtgacaccgagaacccaaatctccgcgcccccatccgcggcccggtgtcctcccggcccctgctgacctccaggtcacgcaccccactgctccacggctctgcagcctgtggcacacggccgagagtccccacatgatctcgacgccaaggtaaggaattgccctgcgtcctctgagcctgtctctggcctggggggccgggaaagctgcactcctggaagaggtggggttatgtgaccgccgctgcaggggtgcgcggaggactcctgggccgcacacccatttccaggctgcgggagccggacaggggagggcagaggggggacaaaaggactctttaggtccaaaatgaccctgaaggagagtccagaatgcccagtggccgcgtctgcaacggagtcttctttctccaattgccttctgccccatcaccatgggccccacctgcgccacctgcgcccaccctgtgaccctggctcagcgaccttggcccttaatcgcccaacgccgattcctcaaaattccggctgcgctgaatcgggctgcttttgccgccgccccggcagttgggccctgtttccgccggcgccctgggagaggcctcaccactcggctgggctccctggcccctcccttcccctggcctgagcgcccctgcggcctcccgctcctcctgagaaggcgacaatctctttgcaccttagtgtttcgaggacagaaagggcagaagggtcacttcggagccactcgcgccgttttcacgtgtgtgtgtaatggggggaggggggctcccggctttccccttttcagctcttggacctgcaacaccgggagggcgaggacgcgggaccagcgcaccctcggaaggctcgatcctccccggcagggcgcctggccaacgagtcgcgccgcctcctctcggccgcgcctgctggtgaccttcccgagagccacaggggcggcctcggcacccctccttccctcgccctccctgccgcccatcctagctccggggtccggcgaccggcgctcaggagcgggtccccgcggcgcgccgtgtgcactcaccgcgacttccccgaacccgggagcgcgcgggtctctcccgggagagtccctggaggcagcgacgcggaggcgcgcctgtgactccagggccgcggcggggtcggaggcaagattcgccgcccccgcccccgccgcggtccctcccccctcccgctcccccctccgggacccaggcggccagtgctccgcccgaaggcgggtctgccataaacaaacgcggctcggccgcacgtggacagcggaggtgctgcgcctagccacacatcgcgggctccggcgctgcgtctccaggcacagggagccgccaggaagggcaggagagcgcgcccgggccagggcccggccccagccgcctgcgactcgctcccctccgctgggctcccgctccatggctccgcggccaccgccgcccctgtcgccctccggtccggaggggccttgccgcagccggttcgaacactcgacgaaggagtaagcagcgcctccgcctccgcgccggccgcccccaccccccaggaaggccgaggcaggagaggcaggagggaggaaacaggagcgagcaggaacggggctccggttgctgcaggacggtccagcccggaggaggctgcgctccgggcagcggcgggcggcgccgccgggttgctcggagctcaggcccggcggctgcggggaggcgtctcggaaccccgggaggccccccgcacctgcccgcggcccactccgcggactcacctggctcccggctcccccttccccatccccgccgccgcagcccgagcggggctccgcgggcctggagcacggccgggtctaatatgcccggagccgaggcgcgatgaaggagaagtccaagaatgcggccaagaccaggagggagaaggaaaatggcgagttttacgagcttgccaagctgctcccgctgccgtcggccatcacttcgcagctggacaaagcgtccatcatccgcctcaccacgagctacctgaagatgcgcgccgtcttccccgaaggtgaggcctcaggtgggcggccggggacgctggggagcccggcggccccggcccaggcgggaagcgcaagccagcccgcccagaggggttgccgcggcctggcgtccagagctggggcgtctgagggaggttgcstgagggtcttcggcttcggcgctggcttggggcgaggggccagggccttggcggcccaggcgaccaaaccctctcctggtccagggctgggtgagggcgaattacgaattgttccaggggcaggcagtcccccagcccgcacggccagcgagttctttctggttttgttctttctccctttcctccttccttccttcgccagtgcattctggtttggtttggatttttttctctctttctttcctttctttctttctttctctttctttttctttctttcttcctctttctttcattctccccttccttccttccttggccccctctctccctccctccttccttccttcctttgccaatgcattggtttgttttctttccttttctgctttccttcctttctttggaagttcacyctggttttgctttctttctttccccatcccttcctttctttatccctccttcccttcctccttttctttctacgattccctttatttttccttcattcctccctctttttgtctcttctggaggaggtgaaggagggtcagcttcaggcgctgcgagtcagcggggatcacggtgaggcccaagcactgcaggctgaggccacagagcgaacacttgtgctgagccgggccctctcgtgaggctggggtgcgggaagtccgggcaggagagacccgcccccgccgttgctgagctgagacccggctgaaagagaggggtccgattaattcgaaaatggcagacagagctgagcgctgccgttcttttcaggattgaaaatgtgccagtgggccaggggcgctgggacccgcggtgcggaagactcggaacaggaagaaatagtggcgcgctgggtgggctgccccgccgcccacgccggttgccgctggtgacagtggctgcccggccaggcamctccgagcagcaggtctgagcgtttttggcgtcccaagcgttccgggccgcgtcttccagagcctctgctcccagcggggtcgctgcggcctggcccgaaggatttgactctttgctgggaggcgcgctgctcagggttctggtgggtcctctgggcccaggagctgggagggctgcgccggcctctggagccccgggagccagtgccgaggtagggagacaacttccgccgcagggcgccggacggtcggggcagagcaggcgacaggtgtccctaggccgcagggcgcttccatagcgccatccccaccaggcactctactcgaaatcggaaagctcgaccttttgcgttcgcctctgccaagcctgttatttgtgctggccgctgggtctggagctgcgcttctcrgcccctccccggtggagcgcagagggctggtctgcaagcgcggcctccagccccgcggctccccggcccaggagccaggcgcgggctgacccgggagcacccggcagcggagggggctggaagcggaccctaggcctctcctgtgccacccggccctaccgcgcggccgcggggcgctctcctctcgggcgcagcggtccttcagcccagggcaggttcctccctttcctactcggaacgtggcaaagataccccagtcccagcccctccagctgagagctgttgcccaaggtcgtcgctacttgtccgckcaatggtgaccccttggcagagaactagggatgattccactccggttgatgttttaggggaaattaaaagaacattcggttttmtgagtctccttccggggaggcgtggtggtaactggtttgctgggaagagccgttccttaaccgcatgcaacaaagcaggtgtggaatccggacgagagggcactcactgccttctgccccctttggaaatagaaaaagccttcgaagcarcaatccaaagatyaaatgatttgcggtcaatgatttcaattaaaccagaaattagtaagggagggccgagaagacacggctgctcagaagctgttcgctgtttgagggatttcccggagagcctgttaaaagatgcgaagtggtgggtgtaccgctcagccacctttaaaccggctctgtgcgttctggctctggaaagcaagtctccaggcatttgggctcagaattgctgggccccgagtttgggcgggggtggtccttctgggggtcaggccttgagcagcttgcactggtggcaggtttgggagcagttgaggggcttcctgtgtgtcttttggagggggtgaccctggaagttggcactctggaagggagctgtttggccctagagttttggaaagggccctgaacctgttcggtccccctcggaaagggaagggagcagtggcttagtccctccctcctccattcgtgcaatgcctggggtaggggtagacctggagccggtggactcatatccttggaattcgtcaggacagctgctccggggccttggccctcagtcagtctggggctgaggagtagggaagctgggaacttggggcagaggaagaagatgcgtttagaaagacctccattatgcaaactggagtccatttatgcaaactggtcacccttccagtagctccaaagagtggcagtggagtggcatcttgattgatttaacctcttctcaggggacctgggtctgcgagggaggatatggctgcggggttggaataggatctgtctgagctgccagggtcagggtggtggccctagggaggttttagggccagggtggtcccgggctgtggcaggggytctcagatcgcctcgggctctcagctgcaaggtgaaaaataccatgaggaattgatctgccaagggcggtcttgtctcaaagcaagtggattgctggggtaaagaatctagagaccagcttaggactctgggaggaaraaaaaaaaaaaaagaatagcatagtcctaaggaactgcaaggatcaccagattaacccttcatacctgggraaattaaggccagacatgacacaggcctttcccaaggctctgtagcaagggcaatagcaggccagttgctgccactgcggtcctgtggggcatgttctcactccactgcacccaggaggctgccagcctctgttccttttaacatagatctcctcagttgttaagacagaaagaggaactcagaggggtccctgtgtgcaaggcagagggagaccaccagaaccagggtaagcaccccacttggtagccagttcaaggacttggggatgttttcaacatttacagcgaggtttgaggccccattgtcatgcwgcgctactcggcctyggtctccttatctgtaaaatgggcccattagcaatgcacagggttgctgtgatgaagggtgagrtcccacaagcaaaagctgtgcagtgaggggggaatcctaagcattgttcctatgccattcaccccttcctgtgagctccccatattccctggctcaaaggagtcttgaatggcagggatggaggactcactgcctggactttgaagacccctgctttctgggtgaccaccttttcttccctttgacagtgaactaatacattggaggtagatagtgctgggaagaggacaggagascacggctgactttggacatgggctcgaaattgataacttgatgagtcttggagggtggttaagataagctcggggctggggcagcgctgaggtctgatggtcagccagccctccccaaagtgtggccctccgttctggagataggggctttggaaactgcaaaagcrtcctggcaggccagctctggttgctccctggccatagctgctctgactacaggcagcaggacgcaggtcggcctctgcccatcggaggtcagaggcagggcctccagcaccagactcagcagtgccactgcaaacctggcacaacaggctggtcccaggactcagctcagyagtgaagttggaaaccaaggttgagtctccccatctccctttccscaacccgaaagacccaagatgggtgtgggtgaaagagggagaaagaattgctactccagaaactgtcatttgcccacacgaaacgaggtggggttcaaggtctgaactcttccagtgcctgggtgcctttgggtttaaattcagctgcaggtgcccccatcaccacttccacctgagcacaccacgagaagccaggttatcttagaaactgtttcccggaatcaaagcgacttgatttggagagttgggtgaggagaaactcacccctatacccctcagggcgtcagagatgtgaggcaattctctacctccgctggaaaaaatgcagatttattaaaggtcgactgtttagcagaacaacgtagattttttacaacgctttccccgtctctgctttgaagcctgccaggctgcagctggggatccaggagggaaagcccgcaggcgcagaggggacaatccgggaagtggtaaaggggacacccgggcacagggcctgtgctttcgttgcaggcgaggaagtggagcgcgcgctgcagattcagcgcggggctagaggaggggacctggatccctgaaccccggggcggaaagggagcctccgggcggctgtgggtgccgcgctcctcggagccagcagctgctggggcggcgtccgaactccccaggtctgcgcacggcaatgggggcaccgggccttctgtctgtcctcagaatacgtaggatacccgcgggcgacaagccgggccaggctaggagcctccttccctgcccctccccatcggccgcgggaggctttcttggggcgtccccacgaccacccccttctcacccggtccccagtttggaaaaaggcgcaagaagcgggcttttcagggaccccggggagaacacgagggctccgacgcgggagaaggattgaagcgtgcagaggcgccccaaattgcgacaatttactgggatccttttgtggggaaaggaggcttagaggctcaagctataggctgtcctagagcaactaggcgagaacctggccccaaactccctccttacgccctggcacaggttcccggcgactggtgttcccaagggagccccctgagcctaccgcccttgcagggggtcgtgctgcggcttctgggtcrtaaacgccgaggtcgggggtggcggagctgtagaggctgcccgcgcagaaagctccaggatcccaatatgtgcttkcgtggagcagggagcggaagaggcagccggtcctcaccctcctctcccgccacgcacatatccttcttgacttcgaagtggtttgcaatccgaaagtgagaccttgagtcctcagatggccggcaacgcgccgaggtcacgctccccagaaacacccctctcccctcccctaccccagctccccctggggcgggtggtaattgggggaggagaggccgcmggcagggaaggggtgggaaagccagagagggaggcacaaagtgatggcagcccggcaaacactggggcttcgggctgggccgcgctcgtttaatcccacaaaaatcccattttggaggtgagaaatagaggttagaggtcgggcccttctggagatcagaccgaggagacgggcccagctggcgtcttaaagcaaggagggggagtcgggaggaggtgagacccctgcacccaggtggggctcccaaaccgttctggatttaccacactcccaggtccgattttccatggagggctggggttagggactggcaccttcttgttgttaaccgcatttgatattcacaagaaccctgtgaggagactttgtcaccgtttttagatgcctgaggttgccggaggggcagtgagagaatcgtctaacctggtgttcctaccacagtccaggccctgtgtcctgggctggacccacagcccctgccaccacccagaggaaggcgcgaasstggctgcctcctttacgggtctcccttaggtgccctcatgaagggggacggccacctcacagtgcaggaactatctccccgtttgctcccaaatagtcttcttggtgtggtgctgtctatggtctgtgacctgcatctggagttacccccaggaccagcttcggaagaggagggatcgcttggaggccgtgcagtgtgaggaacggcaggcagggtgtgggmccaacatgcacacactcgcaggtgctggggccagggaggaatgaggcgctggctccctttcyctccatttctccctgggggtcccagcaacctggccatccctgacttccaacagcacagcgtccccacaggtcctgcagtgctctgcaggggtgcagggagctcccctccccccagccgcaacctcaccttcctcacccccacccctccggcaggaaaccacaggctgggttggggacccctggtgctccaagagagcagtgagtgctgggagccgctaaccccgaggcgcctagcacagactcttctcaccccttatttctgaaataaagcccttccttaggtccagatgaggaccacgtgctcagtgcctcactttcgtgggagtgtatatcactttacagtatcaagacaattttctttcgttacaaatctttatttagtctctgcgtttagaccaaagtagatttttatgggctgagtgaaaaaacctcgcccgcattggtttctgatggaacagctggcagcgccacggccccgggtggggtggcctagaggcaggggtgcttgggaggaacatctagcacccgaccacctccaccaggtgggaaagggacgtttgcaccaaatctccgccggcaaagcagaggctttggggaattacagaaaaactataatgatctaaaagagaacaagttatcttgaactgtgcgggtatttgaatcatacagaaaattgtcctgtgtgcccaatgcacttttgcatgtagagccagggccttcgaggaagctttcaggagatcccgggcagcggagtctggtctggagtttcatttccgtaggtgcagatttctccccaagtcttcccgccatgggctttgcaagaagccagggcccagaggccacgctcaccgttaacactgcacagggcaaaggtggctccaggacaactgcccaaccccaggaacgacccagcagcagagaaaaggacagctgccagggtgcctttgtcgctttttggaaatcagaattcctgggtccttagttaagtcttacttcaccaaatcccaggaccttcacattttggttcttgccattgctaacagttgtaaatgctgccgccacgaggcctgggaggaaggacccgctggtgagagcacagggagtgctgctgtgatcacggtggtgatgcggggtgagcgcgatttcccgggattaaaaagccaccgctgcccccgtggtggaggctgggggcccccgaataatgagctgtgattgtattcccgggatcgtgtatgtggaaattagccacctcctcagccaggataagcccctaattccttgagcccaggaggagaaattaaaggtcatccctttttaaattgaggaatagtggttttttttaacttttttttttttaggtttttagttgccgaatagggaagggtttgcgaagccgctgccctgggccgaggtgcattttacgcttccagaggtcgaggcctccagagaccgcgatgcccagggcgttcccggggaggctgagagacccagggtgctctgggtgactgcacggcgactcctcgggaacccactcgtggctgcccgcttggaagggctttgcggccccgggaacgatctccaggatctccacggctggtcaggttccccgtccctcgtatcccgcgctgcccgggggctcctgcctttggttcagtgctcgcggcaccaccgcactcaggacggcagtggggggctggggctggggctgggcctggcccgcagttcctggggtggggagcgggcatcgtgggttggggcgggggacgcgccagcagcgcccgcagctcgcyccgcaggggtcgcagccaggggtcgggagctaggctcgtgggccgggagacgccgggcgcgttgtcctccggggaggttggggtgcaggcggtgcaccgaccctcgccatctggcgctgcagccaccagccacggcgcttagtggagggtctgcggccaggctcccggcggaaagattccggggagggctcgggggttgtcccagcccgcgctaagcgccgcagcctcgcccggctttcctgcttcctcggactgtgcaggggaagcctggggtctcgcggggcgcagcagtcaggtcgagggtgcagcaggaggggagtcctgacgggcaggtccctctttcccctggtgcgcaacactggttggtagcttttgcggaggtggtgaagaagggcaggaggcctgttgagcggaggagtcsggggatccctaattatgtgacaggagaccctttccagttcggcctgtggcccatccctctctcaccgccggcagattggagtctgctctcggggagcccccaggtaaacccctcacagggagaaggtttcggattggaaggaggaccgcgctcgtggggcgcctgtgagagctgggaagcccaaggggtagcgtgtagggggttttttatgcgggaggagctgcctcctgggcggcggggactttctgtctcagcctgtctgcctttgggaaaacaaggagttgccggagaagcagggaaagaaaggagggagggaaggagggtccttgggggaatatttgcgggtcaaatcgatatcccsgtttggccacgagaatggcgatttcaaagcagattagattactttgtggcatttcaaataaaacggcaatttcagggccatgagcacgtgggcgacccgcgggagctgtgggcctggcaggctcgcacaggcgcccgggctgccggccgctgcggggatttctcccccagccttttctttttaacagagggcaaaggggcgacggcgagagcacagatggcggctgcggagccggggaggcggcggggagacgcgcgggactcgtggggagggctggcagggtgcaggggttccgmgtgacctgcccggctcccaggcatcgggctgggcgctgcagtttaccgatttgctttcgtccctcgtccaggtttaggagacgcgtggggacagccgagccgcgccgggcccctggacggcgtcgccaaggagctgggatcgcacttgctgcaggtagagcggcckcgccgggggaggagsgcagccgccgcaggctcccttcccaccccgccaccccagcctccaggcgtcccttccccaggagcgccaggcagatccagaggctgccgggggctggggatggggtggtccccactgcggagggatggacgcttagcatgtcggatgcggcctgcggccaaccctaccctaaccctacgtctgcccccacaccccgccgaaggccccaggactccccaggccacctgagacctacgccaggggcgcctcccgagcgtggtcaagtgctttccaatctcacttccctcagcaggttccacccagcgcttgctctgtgccaggcgccagggctggagcagcagaaatgattgggctgctctgagctctgaagcattcggccgctgtgtgtgtgcaaggggcgcaaggacggagagacagcatcaataatacaatattaacaggagcacttgtccagagcttactgcaagccacattcagttccggaccttaytgacttccccctcccatctagagtggattctggtttttcaatttgttttgttttgttttttgtttgtttgtttgtttttgagacggagtctcactctgtggcccaggctagagtgcaatggcgcgatctcggctcactccaacctccgcctcccgggttcaagcgattctcccgcttcagcctcccgagtagccaggattgcaggcacccgccatcatgcctggctaatttttgtagagacagggtttcacccaggctggtctcgatctcctgacctccgatgatccgcccacctcagccttccaaagtgttgggattacaggcgtgagccaacgcgtcctgccttgattctgtttttaactccattttttagaggaggaaattgaggcacagagaggttaaataacatgtctaaggtcacacagcaaggggtggagcggagttagcccactggcctagctctagagcccacccggataaccagaacttggtgaggcctccgggctcttgcttggtttggagccaggtgcttagcgccccgagcccggggccattcaccctgcaggagctgcacgcgcccctgacctcggcttttccctggcagcagaggggctttgcgggtcggccgggtagccctgagcacagctcgccacttccaggtgggctgttggcgctggctggggacacatcccgatctttcaaatgccctttacagagcctcatcaacgacccgattcattccccyctcctgtcatttgtctctgccatcgaaaaatgcctaccgagagctgctctgcatttccgccctctattttgtgttttactttaaaataataataaaaaaaaatgttggctgcaggacgccatgacttaggtcagcgagtcagccgctagctctgcatttccaaaaagcagatcttttcacaactctcttgccccaagtgccctggtgtggtttattttttaaaatgcatgcctgcggaagagaagacccggggaatattcgaaaccccgagcttttacaacataaagcgcatggtgtggccgcggcgrgtaatggcgctctgggagccctgcccaggcggcctctgctcgccctcctccacttccagctccgagctgggtgtgttgcaagtttcatactcctacatattataagtgacactaatatcaggracaactaagtgctggggaacttcaatgaaaacctggctggtaaagtcaacacccccagacttctctgtgctacatttctttaattaattccggagtggtgtgtggacgggcgtctttgcagttattatacacgtaagtgaattaggccatttgaagctacgaagtcatacccaacattttccattaagaatattatttttttagctactgctggcaacttttagaatttaattatgataattttcctcttttcctcattatcccagatatggctggttgtgagatactttttcactaaatgtgtctytttaatgattttggaattaagcaagyatgccaaatgcgccaagacatttataactttagaaattgctgtatagtatatatttttggaacaccacaggtttagttgggaaaatattttgcagctgagttagaaacttgaaagttaggcttataatcaagatgctgattttcaaccttagcatcggggaaggtaatgatagtttagttggcaaagactttttgcagcaaactgtatttgagacagcagaatccaaggatatctttcaagattcacttatactacattctttttagccccctctctaggggtggagggggtggcttagaaaaaccaaaggtaatctggtttcaattacatgctgtaaaaatagaatttgtggccagaaattaatttggaatattttttatgggggcaacattgtgggttgtatgagtctttcaccaactttattgcttttctttggttctggatctaaaatatgaatgagtaaataaaatacagtttcctttttcaaaaataatttagtctttttatccttgacacataaatataatcattacctttttatttgtcttaattacctcttatagttttactttatttttgagggttagccaacttaggaaaaatcagaatttcatttgggtagttttcatttttcagaagttgatacttttcctccttgaattttgcaaaggttatttgatctcttgcaaawtctaaataattaattctgtagacatagtctggtaaaataaccaggtattttgttttattttctgggcagtggtagtgttcggaatttattattccaacggtacttagaggtaactagaaaattgtggcaaataaagcatatgtcctagtggtataaatgactgccaattatgacataaaatggtctatatagtggtagattttcccctaagtaccatagaactccggatttgtactaagtgctaaaataaccccaaacaataaagctactacgtttaacctgagcttgataggaattctcaaatgttttgcatgatttttgtgatgtggatgtatgattgtttctaaagtgctttaaaagcatttcagagcctggcctgggaactaaaccctgggtgctgtttcctacagtcctttttaagaccctgggcttcatttttgcatttagcaagtatgtgttgatggtcatatttgatgcatccctccatcccagtgactgtaccattrttagatttaactctaatgtagaatgatcatctcttattctgacactttatcttttacagactttggatggatttgtttttgtggtagcatctgatggcaaaatcatgtatatatccgagaccgcttctgtccatttaggcttatcccaggtgggtattgcctaattttatgtgcaaccaaaatattaaacgaagtgacagcagattttgacagcctcacccaacttgaaaatgagtctgtttaagtktttgcttttgtgtaagaacataaccctaaattgcaaaatcctcttctcaggacatcctgcaggggttttcttctccatattacgttttacttttttactttctttttcccttggggtttcatgaccagtgtgtcttcaccccgtcagccttgttccgagattctgccaaaacccggactatctgcttatgtagtaatgctagatgccctgaaaagagctccacaaagggacatgtttcagtccacacttgctggtctgcacgttacggtattatgagttgctataaagcaagaggtaagctgatgtggaacatggattttatgcagaatgttctttggggagagagaatggggaggggtagatttatgagtgttcgcatggaattcggggtcatttttcctgactttttccagttcagtggtcrtttcagcaaagcattttatatgcttgtgatagaaactcataaaactcagtttactactgttttgaacagcaaggtttctttagaacatctgaatattaccaatttttctggaaagatggaatcatcttcttaaaaaagtccaccgtttccttagaggaaagagggggactcagctttgtctctccctggcaagccaagggtttgatgggggatttgggggctccctgggcccattgaatgtctgaaaggggatagtgtaactgatcattctcattcacatgcctgacttaacaaatgyggatcatgattttaaaagtcacattttaaactacatatagggactaaatatttcttcacattgtgtactatcagagtgatttttcaccgtgactgaagacacactagaattaatgatagatacagaggatgggttccagagaggcccatattgaatttgaattacacctgcctcctaatgtagttaagccaaaataaaacatgccgattaatgtggcttcagtttgctcattgaaaaacaaaatgaccacatttggcaaactgcatctggtgtattccttttatttttctgccaatacttttttttataagcttgctatttatttacatccttctcttctgatgtatggatatccttatccagatccacatgggtttatgtaactctgtgtttctcaggcaaaaccctttaaaatgaattacatattaaaatgatatggaagtttttctcttcctcttctctgcttttatcaaaccaagtctcccaaatacagtttactaaggcttggcacttgtgcctatgtgactcrtgggattagtgtacttgtagaatgggaactactgttgggaacaggaaatttactattttccataattattaggttgatgcaaaagtaaatgcggtctttccattacttttaatggcaatgaccgcaattacctttgcaccaacctactattattattctctgaatttttatcttgccctatttagaatcatgcagggcccttaagttgtacccagactagtttctacttctgacttggcccaattacttaccttttttagtcatttagaaaacctttcatagtcttacagtaatgtcacaaacacaacaaaacatttcacacacttttaaagatgactgatcaaaaatcttttaaaataggtaaagtcactgttatcaaatattaaatttagatctgagctccctagcagtcaaagcaaaaagggaaatgtattcagttatagagtttttattgtctgatagggcaggttctttaacctacttgaaccatgtaacttaaatagtaaaatcatgcctgctctatctgtctttaaggatcgtggtgagaaagggatcaaaatgcctatttcatgtgatttacaaactacagggggcaacacaaaatccaggcatacccacagtttcatttgagcaaacttgctttcagtagagtcctttgggggctcctattagggctgcttggtcatttggaatgtcctggcccatcaggaggtactgtgcacatcccaagagatccggtgcattcagtcaggccgtccaagttagcctctctgtgttatttttctctttttatgtggaaaatagaattgattgattataaacacaataattaagaaggaccaaaatattggataggtgacaaatctgcctccggttcrtgatcggctccacggaaggaaatccaggcagcctcacaagttgaagtactctatttcctcatgatcataatgcagcaggaaaactttgcatcataattttgagagaggagaggggttaggcactaccattttctaagaaagttgtagagatacatacattgtctctttctctccagtagaagtgatagtttctaaaaagataagtcaaactgatcatttgcatagagcaactgattttttctgatttctctgcggggctgtgttagcatcagttcacagctacaaaaacactttagtgccaagtgccctctttgtcggtgtctagggagcgttccacggtgaactgtttaaataagcaacaacttttctctcaaatcttccccctgttcatgattaactccatagaaggaaatctaggcagaatcacaatgtgtatttttttctgtcttctttacttaaatagtaaaataaagtattgaataggatgtcaartacccaactggtcttttaaacatttttgcaccttttagattatttttwaaaagtcaggcaaatgtatcaagcatgagacctttattaaaatgggcttaaacattttttttaagtcatgagagataaaagtgttaataaaattttacccagtagtcagagtaaccttttaaaaaraatttctgatgaataacgatagtagtaatagctgatacatgctgctcttttgtgttccaaaaactttcaattaccttcaatgacattatcttattaagtaaagatgtctttcatgttgattcagtgttaaactttatgttaaaagatcatagagaatgtaagcccctagatctgctataattgtgtggaaattcactacaaagtgattttttgttttgttttgtttttggtctaacctctactaaatgactatccaaattctttatttgagggtatggaaatgattctttatgggttataagcccatccccattccaagtcttttattaagccttatttgaacaagtgttgaaataaatctgcttcgtatggcagagctaaaattttagttttttttttgtttacactagtaaacaagtgattgttgctgccaaactttggtactaaaacaatgacagagacaaccataaaatgccagttgtctcctcagcccagggtccaagtgttaggcagtagagaggcaggctttcagcctgaaaactcccgttggtgggcacactcgcacacgtgtccacacacaaagcatctagacaagtttctatctacgtggatgaggtagagttggggcagcaatgtttttccatgcgtgtttactaaatgatttagttccatgtgctgttttggttaatgcaattattttacttttatttagggaggaggaagaaaaatccccgtgtaaaaatgtagctgctgtatacatttttaagtatccttgggttaagtttcctcaccaacatttcacacagttatatagcatctaggtaactagtatacatgttcaaataaatatacgtatgtaagaaatagctatttatgagacacataaaagaatgtcttatttgagattgtggccagaaacaaccataaacatatcgatgatgttgtttggaggtacaagacctaatcctttcacttttgaaataaagacaaaagacaacataattatgtttgttgacataacttgaaccctgaaacccaaaccatcttgttttaaaatccttaatttaccatactcagcaaaacaccccagagtaacgtgcattttcagagtgccaarcaactctccccttccacacagaatatatgcatttagtgctgtatttatcatgtgtaggtttcttggcaagaagaaaagctattcagcaaaacataaaaaagctcttagtaggaaagctatccattttgtagttagcagggttttgcaaatactaaaatatcacrtggaaggtctgttttaataaggctgatgcatgagacccagggagttttatagcgacaaccataattttttttttttttgtgaggtagtcacatttctctcagtgttcaaaagcgtggatagatacgtaaatacaggaaacaccatgtcaaccataattttgacttaaggtcaggactgttttatcattccaaaatttgttctgtaaagacatttccgttatttgaaggctgtttcacttcctagacagctctggagttttcccgttcgttttgtcacagactcgagccttcagaaaaccaagcctttcatctgtgcaacctcacccttctcattcttcaaaagcatgtgttgagaacgggaactctgaaaacataagaacctactctgggattaaaacgcaaatctaacccttaataagcacagatggaaggtctttctgcaaggaggtaaagttgtttcccgaaaacacatcagttacttttttccagaaaagaacttcgagcaaaccagaattattctttttccctgaaaacatggggaagggagaaacgataggccaatataacatttctctattttgttattttttcatttttaaaataaactgttgaaattgtgagtcactatatattttcttttctttctttcttttctttttttttttttttgagacagagtcttgctctgtcgcccaggctggagtgcagtggtgcgatgtcggcttactgcaaactgcgcctcccgggttcagacgattctcctgcctcggcttcccttgtagctgggatcacagccgcatgccaccacgcccggctaatttttgtatttttagtatgacatgatttcaccacgttggccaggctggtcttgaactcctgacctcaggtgatccgcctgcctcggcctaccaaagtgtcaatatatattttcttaagccaactctcttagtttttagcttctgccactccgcacctggacaggccttcccagggcatagtcattgccaccctgaggaaaaaaggaaatggtcctgtcccaaatggctggcttacctgttgccagyttatttaaactttttaaggattaacaggaatgactcgaaagaagaatatttagttttattatttttcttaaatgaaatcctgtaataaacttttcagggaggcgaatgtccgtctgggagatctgttgagaaagtgccaggcttgggaagtgggtgttaagtagagggtagggaggattcctctaataggattctctctgttgctctgtttgcataatattggaaggaaacattccatgaataatgtaaaacatagaactgtgagagccgttttagggacaagatgacttagcaggccagaagtgtaacttattctgaataagaaagcaactcgctcttcttaacaaattggaagaactggctcagaggagtgcgataaatcacttcacccctccacgaccccttggtcccaagtaaaagctgatggcctagatgctaatctggaactgcaactcccagaacttctccattaagcagctggctgggttgtcctgttgcgtgaggtggcaccgtcaggatggccactttgcagataatcatgttgtctctcctctgatggagagccacaggctcccagcgacacctgcagcaagacacacctaaaaataacaagggggtggctcgggacaagacacaccatgagcctccttttgttatcttgagttaccctctctccttccggcagggtcaagaaggaattctccagacctacccaagatccttcgccacccaaggacggtttcccacatgctttgagtttcttctcaggctgggcactgggactccccttggtggtggaggaagtcctaccactgcccctgggcctcccctgaacaatgctggggtwcaccgactcactgtccttgtctgccaccctcagcactattgattatagctctaaaaataggatccacccaccactgctcagaaggctgctctgctagtcatttctagaacattctgtgccactgtccatcttaaggtgggtgggggcccaggtgttgagactctatcatatcctctcctggtgcttatgtttgagagaacattcgaaagattctcaagttcgggaatttgggcctccagggacctctgtgtaaaaattgtaactatgatgggtattttcctggggccatccattcctgcaaagtgacatggatgtgctgtcctctgtgggctgtgtctggaaataggtagcgtcggactgttgaggcagcaaccccaggacataatccccatataacgtggctctctggagcaggcccagaccctcccgcagggcacgcacagccccagccacacccctgggcgggagccacagaattagcacagtcatctcggactgggagggccagagactcattgctggyaatgtgagagaggcctggcagcgcctgaggggcacagctcagagtcgacgaagaaagggcctttgtctgagttcatgtcctcctcgggcgcagtggcgcccctgccgtggayggctggtcggcctcggagtggacaacacttccacagggagcactatgtggacaggacagctggccttctggccacccagtcccctcagatcgccagcaagggaaggacagagaccctggcctgggtctgtttcaagccctcttctgtatgaaggatgctgcccaggccagcagcgccgcccacctctggtgcccaccttttccaccctttgctttctggtccttcctgctaagggttctcttggctgcaagctcaagcctcagtgccatggcctttttagacagtgtgggagacagttcagagctctgagctctgttgagaaaagaaaactgtttctgcgtttggcaaaggtgtgggttgtcagcagagatcaaagttctgttcctggcagggtgmgcacctgtgacacaccttgcccctccccctgcrccaatcccagagaggcggtggcatttctgacccttcccttccacggcaggtggagctcacgggcaacagtatttatgaatacatccatccttctgaccaygatgagatgaccgctgtcctcacggcccaccagccgctgcaccaccacctgctccaaggtattccatccagagggaaaaaaaaaaacagactaaaagcaaggcgacattcttaaatggaactcagggctttgcttcccacatctgccaagtggctgggcatgactaggactgcccagcccaggtctctccaatacacacacagcacccaccacgtggggatttgcattgatacctgtgtcttttaagccaatattcatcaagctcctattgttggccagaacccgtgttgagtgctaggtagaggacaaaagtggtgcaagcctgctcccctcgtgctcttgggtcagaattccagggattacagcatcacgggtctagaccaagcttctccttaaccaagatgccgtgcctaaaactcgggggtcgggggtggtccatgacatttcatggggaaaattacatatgtgtttcctccagttgaaatttggcatttcctttgcttctgatgatagatgataaaccatctyggggtccctagtacctgtggctttgccaacaatagaaatcacagatgttttccatatcataggaaagttttgcaggtttaaacatatcgcttatgcccacatgcctacttcaaaatttcaggagttctaagacctgctactgaatcttcttatttatgtattaataaagcagcacatttatatccgtatcactgtgttgaaatattttgataattattttccaatacagttgcttttttggtaatcttatatattttattttatgtatttaaaaatgttactccaagtagggatctgtaggttttgtgctgtggcacaaatcattaagaagccctggtcattacacaaatgactccttaaatttcaattgygatgagtgctaggaagatacagaaggacttattccaggggccctggccttttaactccctccaaccatccagtgaggccaacaggcctcttgacaaatgggtcttrtgtgtgctttggactatggcacccagcttggccagaataccccagtggaacaaaatgcaaaagaagaggctttaagggtgatgagaatggggtagctggctgcaggaaaaacatgagttgcattcttattgctgtcttctgggggttggtggggagaggtcattctcgggctgggaagagagaatacaaaatagcacacacagttgtaaaatcccttgcagacagttctgtggcccgcaagttccagctccagaaatagtcactggagtctaattattccttaccaaggagagagcctggcatgttggtttctgaaatgagatggggcacctagttgtagctaaggtctgattcttggatatgatatgtctgcagacatcaacatgaatcatggctctgaagaggtaatttctaaaaaatgagggctaggctagaacatcgcacctgaatcgaattctttcactgtggggttgtttaaagctggacaaagacaacaggtgtcagagaattgcagaacatagtgctgttactgtttttgaaaattgcacagtacggttttttgttttgttttgttttttggagttggagtttcattcttgttacccaggcaaggagtgcagtggtgtgatctcggctcactgcaacctccaccacctgggttcaagcgattctcctgcctcagccctcccaagtagctgggattacaggtgcctgccaccacgcctggctaatttttttgtatttttattagagacagggttttgccatgctggtcagactggtctcgaacctcaggcgatctgcccacctcagcctcccaaagtgctgggattacaggcgtgagccaccgtgcctggcctgaaaattgcacagtatgttaactgtatgggactgggctttctccccctacycccggtttcattttaccctgcctgggtcataacctcccaaagagggattataaatgagagcaaatgagtcttgggaatatcatgagaccctttcatgccctgtttctgtagcctttgagtctgaagcaacaagggctggaagcattgaggccgcacctgactcatttccacagccggccgaggggtgcaggggttgagattcccaagtgctcgattttctccccagctgctccattttctccccagctgctcccttgctgactttccgtgtctgaaatgacccccgttgttttatgataaacctgtgagaaatgggctctccccagaacttggtaattgatgaccagttgatgtatttttagacctgagcttccacccaccgtgcttgtctggaaatggctggggcaggcagccatgttagagggaagctttttgcccaaagacaccatctgcagggggaattgtgggtaaaatatggcagcctctccaactggggcagggggtgccctctgaggtgattcctgagcttccacagggcagtgacctcagggagggtggaagactttgcttccattcctagtggtaaccttcctttaaaaattcatgtattaacctccaccaaagggctgtttatttagagtggagtgacctcgccctcccttagaggtccttctctatttgtgtcttagagtgctggtgtcccttcctgaaacagagggtgtttccttaggggacacatttgcattgacaatagtgaggtcagagatttgcgtgggaggcctgcaaaagcaaagtgagtgagtgggaagggcagagccctggagagacagagacggggtggtccttctggggctagaaatgagggtgaaagcatggatctgccaagccttgggtcacacacactcaagtcctgctaccctgagggaggtcagaggcttctgggccttcctggagcccacggcccccaggagcgggcgacggcaggtggagctctgcagggcccatcaggggcctcaggggtggcctcgtttggctgccttcctttagagccaaggaagccacaccaggactgggctggtgtctccactgccccacccagatctcagccaaggccgaagatctctgagcagggtctgggcacactgagaaggcctctgggtgctgcatctggccctgggaacacattggtgcggttggaataaggatgggggaagcacggagggacagctgccaacctcatcttgctcctgcttgcagagtatgagatagagaggtcgttctttcttcgaatgaaatgtgtcttggcgaaaaggaacgcgggcctgacctgcagcggatacaaggtacggggagtcatgggtgcggggaggagctggctaagggtcttcaatgtgtgttttcaagagcrtctgcagaaaggaaggcacgggagcacaaactcgtcatccccactaatgtagagctctccagcaacgtggtgcacagtctcttggaggctcatgtgagagctggtgttttaggaggatgttccagctggctggaattcatcgcataagacccggaatcagtgtggcttagggcagattttattaataccttggcactttccatgtggaccagtcccagtggagccaccgcctctggagtttatagaggcccatcctcctgggcacagtgcagctggcagtggtatccagagcacggacactgcccttccccttgggatgctccaccaagttccctgccgccgatgacggtgtgcaccacaataatgctagcgccctttccaaggtccaaggcagagctttcatctgcggcaccacacctgggccactccctcaagcatctcagctgcccattggaatgagcagcactggcccagttttctagtcaaggaccagaggagggacggcagaaggggcttggtggcggagctgggactctgagcccagcccatgctcctccctggctccacgtctctgccagacaccaccgcttgttcttgttaattccagaatggaggagtaggtcatgtctcagggcacgagagtcagccgccccccagggaaaagtgggtcgggggaagtctgtgctgagtgccccccgccaacacttttgtcccctctctgggctccttaccctcctcccaggcatcttcactgccatctctccaacctcagaggacagacatcataacccatcaatatgaggctgaaagctgccagaaactttcttccaggaggatttgtctcttagaaaagaagggaggaggatggggtgagaggaaagggcacttttgtgcctttgtcctctctttctggaaggccccgccccagctcccctctttgaccccactctgagctcctcctttgacctatatctcactgtgctgttacagttcgggggacatgtttcttcctttttgtcccagatactaagcctctttgggccacggtggggccccaggagccaacagacattcttcagggcacttgggtctttttgttaagggacagggtcttgctctgtcacccaggctggagtccagtggtgcaatcacagctcactggagcctcaaactcctgggctcaaatgatcctcccacctcagccatctgtgtagctggggccacaggcgcacgccaccacacccagctaatttttaaaattttttgtggagatggggtcttgctgtgtttccaggctggtcttgagtccctagcctcagtcaatcctcctgccttggcctcccaaagtgtcaggattacagacaggagccaccgcgcctggatgggacttgggtcttgacttttttttgccacttattaactgtccgctgtccaatcttaagcaatacacaacaccatcttgttcttggtttcctcattagtaaaatgggagaatagactggaaggattttaagatttgttttagccctaaagatgatgaatgcattcagaaatcctggagaaagagttttggaacagagaacttaaggctaagattcttcactgttgtcatgatgatawtgaccctgtcaagatttcacagactgcagcttgaataaatgcttccagtagtgacgctcgaggctgtacagatgtttctgtttgacaccgaaacactgcattctygtctgtatggcttttggctatagcaattggaagggcttctgtagggccactctggcttattattatgaggaaataaaatcttgaattataaataaaggaaataaaaatacattaaaaatgaagacttcaaaaaattgtactggggcagggcacagtgattcatgcctgtaattccagtactttggaaggctaatgtgggaggattgcttgagcccaggggttcgagaccagtctgggcaacataatgagaccttgtctctacaaaaamttttttaaaaaattagccaggcacggtggcacatgcctgtggtcccagctactcaggaggctaaggtgggaggatcacttgagcctgggaggtcaaggctgcagtgagcctgattgcactactgcactccagcctgaatgacagtgagaccttgtctaaaaaaaaatctacggaaagaattgtttatttactggtacagcgtgtcgagtgatacagatgccaagttcaatcccattggaaggtggtaagcagcatcgtcagtgatgcaagcactgtggaacaaatggttggcctcccccagatgcctttattgtgttacctactcacagcttggcagtgagctcatatgtatatctccatcatatatgacagggccctaatttgtagttacttacagtacagtcaattggataagacaacccttatattttattatgatattttttgttgtcttgtgagtttgttttgttaccctggctggagtgcagtggcacaatctcggctcactgcaacccccgcctccagggctcaagtgatcctcccacctcagcctcccaagtagctggagactataggcatgcaccaccatgcccggataatttttgtattttttgtagagaaggggtttcgccatgtcaccaaggctggtctcgaactcctggactcaagcaatcccccgacctcggcctcccaaagtgctgagatggcaagactgagccactgcttccagctgttatgttgtttcctaagaagcacagctctccacttctcctaagcaatgaaccggtgcctgtcagcacattgggccgcacagtggagtagaggctgggctgggagatattctagcatgtttgagaaaatgagccaggaggagtgggctccagcccaaccccagtggccagtggctgaccctgccctctccactcccaggtcatccactgcagtggctacttgaagatcaggcagtatatgctggacatgtccctgtacgactcctgctaccagattgtggggctggtggccgtgggccagtcgctgccacccagtgccatcaccgagatcaagctgtacagtaacatgttcatgttcagggccagccttgacctgaagctgatattcctggattccaggtgagttcggcacctgccacagtggctgtggccttctggaagacaccggtggtggaaatgggtccctgaaagctgccatcttggccaaatcataacaaggaataagtcataataggaatgtggattaagcaaaaccaatttatgaactgaaagaacatatgtcagccttaggactcaagggcttgttttactttatttacttattgatttacttattttatttacttattgattacttattttatttacttattgattacttgttttattttatttacttatttgaatcactagagtttgaaatgaaaacatgggctgtgagcacaggttgggcttttttgaaggccatgatgtcagagctctgcctcctgcgtccaaggaggactttagaacaaacagaaaatttccaccctgtgtgcggtgtgtggggggccttggcactcaggctggtgtgaagccaccacagggctgaggctgggagcagagacgctatctaccctgggggatgctcttcccacagctcatgggtgccctgtctacatctgggctgggaggaggggattggatgaggtcatttctcctggccttggggagkacctctctccagacccgtgctggagtggccttcactctcccctagaaccggctgcagtcccagttttttaactgagtctgcagttaaagtctgagttttttaaaattgaagtgaattttaattttaattaattaatttttttgagacagagttccgctcttttgcccaggctggaatgcaatggtgcgatctcagctcactgcaacctctgcctcacaggttcaagygattctgcctcagcctcccaagtagctgggattccaggcacccaccaccatgcccagttaatttttgtatttttagtagagatgcggtttcactatgttggccaggctggtcttgaactcctgacctcaggtgatccgcccgcctcagcctcccaaagtgctgggattccaggagtgaaccactgtgcccagcctaaaactgaattgaatttttaagtgacaaacgctaactgcgtttggttttcagggttttgtggtgtttgtgggktacattgtgatgctttgacacatgtccactctgtggaaccatcaaacccctcccaagtcttgaggccacgtgctagtcaggcctcttccatgttcttatttgtaaaacagcagcgcagcctgcccactcactgctaggaaagatgagattagataatagacggaagcattggaaacagtgaagcctctcttacctgcaaggccactttagctcttggcaggtaggttcctcagctgtgcagtcgggaataagccatcagagaccccgctcctggcgtggggtgtgtgtgtgcgatgagtctttggcggggggaggagagatacattttgctttctgtatgtccagaagccaggatttactgttttcttttctttttcactttttaaagttgtggtaaaatacacatcacataaaattgatcattttaaccatttattgatgttctatagagaaaaaacagatcttcctggttaggggcaagagataaagacaggagtcagtttggctccttgtcgacacccttcaggaccactcagaagcagggtgagtgtgtcagggtcaccagcatcttcccagaaactccaagcagacaggaaasagcgctctttggggaaagctgccagcacctctggggacggccaagagcgacaaatgccattttcctgccatgcagagggaggcgctgcagggagagaaggcagccaagctgccccagccagggtggacccctctgctccctcttttctgacttgggagccacttctgagaggtggctggaaggacatcagctgcccaaartcattatcagagacatctaggaggatccaactggtttcccccttgtttcgtctcctagttttcctctgggccttctaggaaacccctgagactgatgaattctggagaacaggaaagaagtggtctccccagaggagagacctgagggcttttcaagccgttcaatccacattgcctggaaaggcagccaagggtagaggaggttgtgcctaaaggaggcctggacagggcctggatggggctttgcagcgccagagggggctcccgcgtctcagggtgtaggggctgcacccctggartgaacagaaaagaaggctggtggtcttgaaggagacatcctgcctctcccagatctctggttgttcctgccatatcaggaaacttctagcaaagccttgaggccttttctgagctgcagtcacatgggaggggctgaaaggggtcagaagaatgctgcagargccttcccagtcaccacagtcagtctgtgaccaaggggatggggcctgggctggcccagccctgggaggacagcagagtggccaagcagggtgggagatgtcccttctgagtccaaaccccagaagccagacgagggctttgcccgaagtccagcggccccaagtcacaggagcgagggtggtcgtgggcctgtctggcgccacaccccgcacaatcccagacacaactgaactcgccgtaacctgaaattgggtttgtcagggttttgtggtatttctctttgaaactggagctgatgcttttgctaaggatgggtgaacacagcgatgtttggggtttggcagattcctctgacaggtcttcagacactagaggcttggaaaaaaccgggagggcaccttgccaaacccctccatttccctttaatttttaaagccagtgtgtactttgatgagaaacttaatacatgtgtttctgattcatttacacgtttggggccgttgttctgtaactttgcatccaaagggtctgggaagcctctttcatccccacacggtagagatgcctggttttctttttgggggaaaacagacggctcaattttcctgccacacagagttagattctgatggggcttgaagttctaggtggcccttaggcaagttccctgagccccgaatggctctgggctctacaaggccccctccccgcatccctctcccccaccactgcaagccctgtctccttcctaccctagaaggacaccatggaaatgagtacaccaaacagggaacaattccagggaaacatgaggctctccgagatttacgacccaaagcttgagcagatcttaacagaaagggaagcgggttaaagaatgaaagtgaggtcaagtttttcagtttaatttacagctaacgtctcctatcctagcaaggagggcccccagccccagccctccctctttccccgacctcacccggcccccaggactgactgcaccatagcctcgcctgccttggaatcccttcatccctctctctttcatctgttcttgaaaatctatcaccaagatggtgaggaccacctccttcgaggacatggtgcccggccccattgcccaaagcctgggaaaccatcgttgccacgtgcagcttccacctacggccagagcgatcctgatgcgggtgatgatgtggtcttgggtactgagagccacttttcttcaaagagccgaagtgggaaattaatatgcccagggctcgatgagaacacaaaggggttgtgtcacataagccccagraaaatgcttccatttctctagagagcttaaggctttccttttagtcacaatatcttagggcgttatcctgtcttctggggggtctgaaccaatcctcccctcataggagcctaaaggtccccagttattccgtaattcccaatagtgggaatcacccagcggcagcatcctgagaccatctgtgccaatcaacagtgtctagcgtgcaacagaggtttaaacactcgcacccgcagtagccaagatgtgcaaacaactgtccacagacagagggatggaggaaccaaatgtggtgtctacataaaacagaaacgtattcagtcctaagaaggaatgaagttcagacacatgcctcagcatggatagccttggaaacatcatgctgagtgaaagaagccacacaccaaaggccacatggtgtgccattgcacggatatgaactttctcgaagagaaaaattcctagagacagaaagtacaagggaggctactgggggctgggcaggggacagtggggagctggtgtttaatggggacagagtgtttgggatcatggaaagctctggacaggggcagtgatgcctgttacacaacactgtgagtgcaccaaataccactgaattgtacactagcgctggtaaccatggtgaattgtatatgtatattttaccacaatttataaaaaacattcacacaggaccgtccccccgaagccctccaagagtgggttctttctcaccgtagcagctttctcgcaatatcagtatcaaagtccacttgtaagcattccccgataagctgaacttggaaaaaggctacaattttaagccattccaaacattctcttagccggtggtttcagaagaacattcccattcatgaatagtgctacatcctgcaccgggctcgagttcaaagacttgcttcttgtaaaaaagatcattctcagtttccaaaatcaacatttcccgcctgagccttttagcacttgattagttggcaaaaccaatattagtttaaatgaaaggcagtctgcagagtggcgtaactcactgagctgccatgcccccacagggtgaccgaggtgacggggtacgagccgcaggacctgatcgagaagaccctataccatcacgtgcacggctgcgacgtgttccacctccgctacgcacaccacctccgtgagtagcacgcccaccccagccacgggaggtagctggtcagggaggaggcgctgaggacagagccgggggacgtrtcccttttgttggtgcaataatcatccatgatacacacttgaatctcaagccccaagtgtggcttcctccaccccgtgattaagtacggctgcctgttgtyggttctcaagcagccacgcgcaccctttcagggagactctagcaggtgtaggatcaggaagttgcctggattctagattgtggatgtggaacctaaactctgtgatctggacaccatttgcgaataacagcaacagtggaagactgctagttatggagctcttactgctgtcgggcactaagtttaagtgactaaatacattaccagcccagtgagggagggtctcactgtcatgatcctcattttaccagtgaggatgctgaggtccagataggttaagccgcttgcccaccttcatacagctggatggtagcggagttggaagctgaacccacgcagagccctgcctccgactgctataccccagccagctaggggaagcccagggaggccaccattccacgatgggagaggtcatcttgggacggggtgaacaaacaccaatttgatttgccaacggaggcggtttgggaacatcaggatatagaggcggatgctctagtcactgaaatgtttaaagaagtgacacttttcttttacttttttaaaatctaaaaaaaaaaatctttttgagacagagtcttgttctgttgcccaggctggagtgcagtggcatgaacttggctcactgcaacctccgcctcctgggttcaagcaattctcctgcttcagcctcccaagtagctgggattataggtgcatgccaccacgcctggctaatctttgtatttttagtagagacggggtttcaccatgttggccaggctgatctcgaactcctgacctcaggtgatccatttgtctccgcctcccaaagtgctgggattacaggcatgagccaccgcacccagccacacactttcagaatccaaatggaggcaaagactaatttggatggagtggaatgcctcatcctcctgytgtccagccctgccacgcccatggccagtcgggggtgctttataatggggtgcagacagttagaggagctgggtcttctgcagtgtggcccagatggcatgtcctctgttcttgctctgccttctgttggctcagggacgttagaggacaggttgccagtgtcgagtgggagggggacggcaggccygcaggccgctaggtccacagatgcgtggtgtgctgggctccgtgtggactgggacccgggaactcgatactcccagggtgtcgctgttgctcttccctccccaartctctatggacagaaacccgtgacaaccaggacttatggctgagcaggcacagacggcttcttccttgctccttgactcatgtggagacttggaggtgtgaacaacccttttgtgtcttttgttaaagaccaaatcatgatctcataaccatctctgtcattctggagaccaagcttggtagagaagcagctgcttagtgttcggatggaacttctccgtcggtgtcactaatatgggagctagaaagttttcttgagcaaactgggtatggtgtgtcaattctagaatcagatatccaggagacttgatcaggcgggtgtgaagagcagagtggaggggctctgcagtagcaagagcagttgggagacgggagaggcatttgcctcgagggcatagagctgtgctgtgccctagaacagtctgggacttggagagtgaaggtgagggctcatacctccacacgctccccctgccactgttggggcggaggggctgaccagctgttctaagggaaagccccagccctggggggtctggagcccccttccatggaggcaggagaatgctggggagtttaaagcatacccccgaattacagcaagagaagacttgctcttcacagcgggctgaaaggcaggaaattaggcctctaagcacagagacaaaactgagggaatcaaaaatctctttttttttaatgagatggagtctcgctctgttgcccaggctggagtgcagtggcatgatctcagctcactgcagcctctgcctcctgggttcaagcaattctcgtgtctcakcctcccaagtagctgggattacaggtgcccaccaccacgcctggctaatttttttagttttaatacagacagggttttgccatgttgagcaggctggtcttgaactcctgacctcaagtgggactacgggtgtgagccactgcacctagacaaaagtcttctttttaaataccatgtcttttatctcacactgcctggctaacccaggaagcagggatttttttttttttttttcagacagagtcttgctctgtcacccaagctggagtgcagtggtgcgatctcggctcactgcaagctcctcttcccgggttcatgccattgccctgcctcagcctcccaagtagctgggactacaggcgcccgccagcaagcctggctaattttttttgtatttttagtagagacggggtttcaycgtgttagccaggatggtctcaatctcctgacctcgtgatccgcccgcctcggcctcccatagtgctgggattacaggcgtgagccaccatgcccggcccgaagcagggatttttttccccatttgctttggaacagtcatgaagcycacagtggtgctcagtcagtgcctcctctgtgtccatcatgggtagatgctttcacttatagactctgacctgcgggcagtttggggagctgtgtccctctcktgcccttttcccaggtgatcagggtgagactcaggggacacttgtccaagggcagcagtggagctggggcaggaccaaagtccagcccattggctgtcgtgctgtcagccgtcaccaccacaccacaccacaccacggggcttaaccttggagatgtgggctggtggctgttctgtaggatcccagccctcctgagcttgcctggctcaccagacccacaaggtgattttmtttgaggggtcttctgtggtttatatgatgaagccactttatctcacaggaagtttccagatattgaagttgtccaaggggactctgaaagggcaagcaggcacaggctcaaaaaggtaggcgtgtttagaaattagacggggcatggctttcttttccaaatgagccagaattggtaattcaaagaaaacagaaaatagcaagattgacagtgattgctactgtcctgtgactctgaccttagctgtgctagagaaacaaccagaaaagactgcaccccagccaggccggtgggttggtgtggtcttggagttcaccatgagtgtgcctgcctcagtttcccctggcagctttgagagggaggggaagcaaggatagtctcagatgatggggagttctttggttccagcgtgggaaccacctgcagggctgagcagcagcctcccctcagagcactcaactggaatgtcacacgcctctccaaagctagaactctctgggaagacagtcaactcccaagcagggtcttcagagtcggggtcttcatggtatggagctttgtgattgtggaggcctcactctccttcccaggtacagaacctgggccagaggggccaaccccaggcctcctgttcctgcctctccatccccagggctgggtggcacctgtttgatttcctgaaactccagaagctgccccagagcctggagttgaagtgcaatggttgatttggacagtgactagacatggccaggggaggagtgagccagagaagagaaggagccacaaagggtgttgtccactggctacagccgagggaggctggcgctcaacgccggggataccccagagccagtgtcatcaagcagaggggagagtgagctgaggtattgatacccctgtgcctgtcagtcagtagctggagggcagctctcagggggccttgattgcctggcttacccccaacatggtcagggtgggccctgccaaagaaaggcctcagtgggggagaacaggtcaggccagtggatgtggctgggccagagcaaggctgatgtcttcacagcctgtcstcagcttcctccctgctgggccttcatccaggctgtgttaagatgttytctgttctaaccttccacaagtttctcccttccgagcccygtctgtcatctttcccttgtccacagaggccacgcctctctctgggggtccctgttggctgacaggagcgtccttacacccacaccactgctgtgtgagggctgagggaagcccatcccccacactctccagctctgtctccactcctggcttygtaccaatagctgctgcctctcctcttggggacatgtgccccactgctgcttggccccacagagtcccaaccaagggacctcaggtctggacgatgcttttgtcttgtggtgtttgggtcctgatggggacttggggactgtcttagtgtcccaggcacaattcagccctcaactaggtcattccttaatatgtccgtatcctcactcaagttgtggggagaggcccttcccatattatagctgcagaggccgacttggggaggacaggggagaagctgagaaggtgggaggccccattttgaaatgggacttgttagtcctgtcacacagtgctttggtggctgacagcccggctcagggcctggcttgagggaagggcagtgaggccagacttcctattcagcctcctgccctcccaggttccaccagggtccccactgtggccactgcagacctgagactcaagtctttcaactccatcagctagagctggcccygtggctgcccgagggatgcggggacacaggcagcctgccagcttcccttccatctgccacaaccgagtgtagctggaggtagccagcagtgacagcaacccccgccygggcccctcaggactcctcacagtgagatgcccagacgcatctgtcgtgggcagtgggtgaggtcaccgagagcaggaacaaagcagacagctgccaacagccaggacccgagtgaggtcactgtcccctcttctggggcctcgctttccccacaccggtagccaaaagccaggaacctctggggtcagtgccaagggctctgcagaggcctgattggaggtaakaggtggtggtccgggagggccagacagcccgatggtttgcacacgttcttcagaatattatcttcactgggagcaagagtccacaggggctgaagaaatcgcagcccctaaagagaaagaactcccagcctccagaaacttgagctttgtgaggaagagcagggccagcagcacaggctttggggagcacaggtttgcagaggtcaggcgagggggcacctcggaccagagaagggggcatgcgggcgtcatgtcggtgtggtctgggtgtcaccaggtgagtctgtgaagtcagagctgtgccacaatattccccagaactaacttccttcccttccttccctccttcccttcccttccctttcctttcctccctccctccctttcttctttcttttccttctttctttctctttctttctgtctttcctccctccctccctttcttctttctttctctttcttttctttctttctttcttccttccttttctttttctttctttttctttcgttctttctctctctttcttcatttttattttttagagacagggtctcactctgtcacccagtctggaatacagtagcgtggtcggagctcactctaaccttgaacttctggcctgaagtgatcctcctgcctcagcctcctgagtagctgggactacaggcatgtaccaccatacccagcgaatttttaaatgtttttggtaaagatggggtcttgctatgttgcccaggctgggcttaagctcctgtgttcaagtgatcctcccatcttgacctcccaaagtgttgggattacaggcatgagccaccatacccggccccagaacattctgtaaagaaaagtgaacacgggatcatcataaatggaaccactgtgaccctcccaccccacgcctcacccaccacctgaggtggctgattaaaggcaccatgctccagcctggcctcaggaaagccgagctctgcctccccgctttctttgtttcatgtttgggagactttttcttgtatgtagggggagctggcaaaggcttgtgatctgttgacccagaccctcagggggggctgagcacagcctggtccataggtggagaagggatcagtgtcagtaaacctgacagtttgtgtcatgggacactgggctgtccatggtttggaagaaccgtgatgtccacatggctattcttccaaggttgttgagaatttcacccggctctctaggtaggctcctgcccagaatgggccaagcccagaccacaaagagaacacaggccatgtgcagctrttaaaacatttcaatgtccactttgggaggccaaggcgggcgggtcacttggggtcaggagtttgagaccagcctggccaacatggtgaaaccccgtctctactaaacaatacaaaacttagccgggcgtggtggcattcgcctgtaatcccagctattcaggagtctgaggcagkgagaatctcttgaacccaggagacggaggttgcagtgagccgagattgtaccactgcactccagcctgggcaaaagagcaagaccctgtctcaaaaaaaaaaaaaaaaaaaaagcaaaaaaaaagcaaaaagaaaaaagcatggggccatattcctaagggcttgaatagattttgaggttgaagagcttagcgagcactagtcctcttgaaatccgtggatggatcctcagtctgagcctgctgcatctcttggttattttggaccataaacaaattggccaagtctcccttaaaaggtgagcccacctcacccccatacgtattattcaatgtattactttgaaagtaatagcagccagatgcggtggctcacgcctgtaatcccagaactttgggaggccaaggcaggcagatcatgaggtcaggagttagagaccagcctggccaacatagtgaaaccccgtctctactaaactacaaaaaattagccgggtgtggtcgtgggtgcctgtaatcccagctactcgggaggctgaggcaggagaatcacttgaacctgggaggcggaggttgcagtgagctgagctcatgccactgcactccagcctgggtggcaaagccaagactccgtctccaaaaaaaaagtaatggcaaaaatcgcaagtacttctataccaacctaatagctatagagaactttccagaggccgctgctccctcctcccacagctgccactttgaggacacctgggctggactccagctgtgccctcaagctctgttggccccggtttcctggtgctgcccacctcccacctcccactgttgtagtgggggtagaatgaggcaatcctgtgaaatgagctggaagtagacaccatgtatcttttcattagagaagcaaacccccaaaggagaagcattgtcaggcttctctctttgccatggcctttgcctatacccttsagcagtgatctgagtcggctgagatgcagatgttaagcctgggcagaaaagcgctgctctctgcatggtccgggagagacccctctccagccggtggcatgctcgttacgcaacactgcctcatgtccccaggttcatcctgacggggtggtggggcttgatggagactggattcctgcctcccaacccccacaatcttctctcccatgtaaaaaacaaaaccatttcattctggttaaacctcctcctcgttggaaatttagaaagtcaaggaaagctgaaaagaagaaagtgaaaattatctgtcattttcagtcagataaaagttaatatgtattgagcccttcagctgtgtctgccagtgttctaaatcctcaaatagatcatctaatctttcaacaaccatatgaagtaaggactgattatcctttttttataaatgaggaaattgagtcacaggggggttggtagctagtctaggatcacacagtttgttggagggggtagtgtatgcacgtgcccactttttcataattagggttatactttacacatttctgaatcttgtcttttcttctgttaacattgtatcacacatttcccataatataacaatttcttattaatcatcattttaatggctgcatagtttgccataatgtatttactcttttccctaccgttgaagagttaagtctctccccaccccttttccctgaattttcagcaatattgcaatgaaaccctttgtaggtaagtctgtgtttgcacacacagacctgctcacaatttccataggatcaattcctagaagtgagatcagtgtgtcagagggtgtgagctatcagactgctttccaccaactcatccttccatcacacatgaaaatgcctctcactgggccaggcgccgtggctcacacctgcaatggctgcatagtttgccataatggcaaactatgggagggcaaggtaggcggaccacttgaggtcaggagtttgagaccagcctggccaacctggcaaaactggggaggctgaggcaggagaattgcttgaacccaggaggcaggtttcagtgaratcatgccactgcactccagcctgagcaacacagagagactctgtctcaaaaaaaaaaaaagagaaagaagagaagaaagaaagaaagagagaaagaaagaaagaaagaaagaaagaaagaaagaaagaaagaaagaaagagaaaatgccactcaccatagattagccggtgtcacctgttggcctttcatttttttttttttttagataaaattcacctttctcaccattttcagtgttttttagttatattcacagtgttgaacaactatcacctttaattccagaacgttttcatcatcccaaaaggagcctgtcaccccagtccccctcgtgcttcagcccctggcacccactcatttgtttttggactctgtggatgtgcctattctggaagtttcatgtaaagggaatcatacaatgtttgtttctattttaatgtctgttgatctgatggatggatctgcctttgagttaaacaagggagttgggcatttgttcatcattttgcccattatatttattctttgatctttgcctatattgcttttagggtctttstgtttttatcaatctgtacgaaccccctatatattaaggtgaataactccgtgcagcattttcttttgcaccaaaatattttgatgtggatgagaaagagccatctgcaaggtgaaaaggaaccgtaaagggccacagacagcccaggagtgtttgggcagagactgggggctttgcccagcggtatgacaggaaggctgaatttttgttgcatatgagcctcaaaggctgaatttttgttggaaatgcaccttggggagtttccttcagccccagctggtacagtcacagactcagcccctttggccacctccccagatctctgctcaggcagctgctagttaggtccaggggccagtcctgccttgagaagcaggaatgttctggagctgaggacccagacatccaagggtgtctttctagacttgtgctatcctcctcttccctggagaagcttcacctctccactgcccacctgcgggttctggcactttcctcccccacctgcctcctggaaggcggtgaggtggaattgtggtttatgggtgcaccgagcctttggctgagctgcttagcggcctggagtttgcacccaagcatagaagacaggcccataggcccaattttcaggaactctgcagccaagtagaggtctttcctacataaacaacatagcaaattaatgggcccaaggaaaactgggattaatgggaagaaaatataaatggcaacaaacagtttcactgtgaataccctcatgttcctgaacagcaaacatcagcaacagcttgacacttggttgaatgcacttaactgactactttgtgtaaataactacatcactcaccccccctccccattaaggatttggggattaaaacataattgtggcattttgaaaactaaaaagcagattgaattttttcattctgccagatacaaactttggtggctaatgtttccctcaatgaaagcaatgactgttaaataagagttcttaatgggtgggaactccttgaagctgaaggcaaaattcctgtgtgcacatgtatatgcacgcgtgtgtgtgtgtgcacgcacgagacgcacacagacatgcaccctccagcggagaaagcccgccccctttgtcaagttctcagaggtgtccttgggacagaggtcaccgttgggggcagcatcccagaggtggggcctgcgaagcgtctgaggactcmtgtcaccttgtgcttgcagtgttggtgaagggccaggtcaccaccaagtactaccggctgctgtccaagcggggcggctgggtgtgggtgcagagctacgccaccgtggtgcacaacagccgctcgtcccggccccactgcatcgtgagtgtcaattatgtactcacgtaagtcacacgtatttgtttctctccttgctcttttctcttccctgtcccacatcggatggctccaataagcaccatctctctttctctctttytcaaactgttcatttgtcttctgttttttttcttttttttaattttttttttttaggaatctggtcattttggaaggtgcaaactatttctatgctcagcggtgaaagccaagtgctaggctgcagggggagccaggaggagggggcctgccctgggcatagcttcggatcccatcacagarcctagtgaggagcatgggggcggatggtgatgccccccatcctgaatagggtgcaaagagggtgcacaccccccatcaagaatataaacttgtgctatccatgcctataagcctttaggtcatcttagatgctcctgctgtttgagacaggaaatatcccattttttacctgtcttcttatagagcctgttacaaattaatcatggtgaatatttggtcctttaaacactccagaaggtcaagttcagtcgcaaatgcctttttttttttgtaaattaaaaaaaaatatgtttttgtagagacggggttttgctatgttgcccaggctggtctcgaactcctggcttcaagtgatcctcccacctcggcctcccaaagtgctggaattacaggcatgagccacggtgcccagcctgcaaatacttttaaggccattagaagcaataggacagatgtctatctggggccatatattactttccacccaccatagctattgtacgttcaatcaccttgctccaggctstgacccttgccatgccgccagccccatgatgaaaagagttctcgtttgcactttacatggggtgaggatttaggctctaggtttgttcatagaatgactgtgtcttagaagtcaagtgattctgacaaaactgtcagggagaaaacagtttagccctttagttattcttcctgagcaaatgtgtgggctggttctccaggtcgacctctccttgtgtgaacatgaccctgctgagttggttctttagggcagagatgggcccccgatgtgagaatgcacaaagctggtggtcaggctcccagacctgtgaagagtcccggactcttgcctcctggggtgctaactggagaggcagctgggccacaggtgtgcatgttggatgcaggtggacctgatcaatggtatttctgcctgtctctttttcccttggtggctttcctcatggcccacgacctccccgagcaatgtgtttggggttttattggactggagagagctctgacctggctcagcatttcctggggtggcccagcctggggctgcagatggcttttataatgagggtgagctggccttgtctcaaatcccatccacatccaatcccagtgaaaagacacactggagcactgagaacgccctgcccaagggctggggccagggaagctgctcggcctccagcgcctgctggacatgactcggcccactctcgccttccagggagattgaatacaaggaacttcagctgtccctggagcaggtgtccactgccaagtcccaggactcctggaggaccgccttgtctacctcacaagaaactaggaaattagtgaaacccaaaaataccaagatgaagacaaagctgagaacaaacccttaccccccacaggtaacacgcatgtcctgcagttttggggtgctgacatctatcctaggggttcgggacacctggacacattaaggaatggggagcctctcattgcacagcagggatctccctgccgtggagcaaggtccctctgggatgtcttgcctacacagtagtgacagcccggggaaggccgacatcccggtgggctagtcaagtttaggaaacagaagactaaattggaaaggcacttcagcccactagaatccatgggttagattctaatgggcttgacgggttggaatccacgggttagattctagactggtgggttagaataccagtccattgtatttctgcagcattttaaaaatgaaagccctccctctttttaaaaaagtagtttgtgagctctcagaaatagcaattgtcggttgggcgtggtggcccatgcctgtaataccagcactttgggaggccgaggcaggtggatcacctgaggtcaggagtttgagtccagcctggccaacatggtgatactccatctctattaaaaatacaaaacttcgcgcctgtagtcccagctactcaggaggctgagacagggaaatcgcttgaacccgggaggtggaggttgcagtgagctgagacagtgccactgcactccagcctgggtgacagagcaagactccatcacttgttctgtgccaagtgaactttggtartgtggtcattagcagatagaccagttgaacgtcacggcctccacattatgacaaaaaaaaaaaaaaaaagaaagaaggaaaagaaaggaagggagggagggagggaaggaaagacggaaggaaggaaggaagggaaggaaggaagaaaagaaaaaagaaataaagaaagaaagaaaaacaaagaaagaaagagaaagaaggaaaaagagaaagaaagaaagaaagagtccatgtgtgcctgatgtcttgttagcttggggtgggggatctctttccaccctgggagcaggtcactggggtatcgctcgctgtgtgcctgtccccagtgggaccttgcagtggtggcgagggtaggggcagcccttggatggggttgggccccgtcgggacggttcttgcagggccggaaggcagcttcctgccggcccctcgctggcccttcatccatcttctttgccatgcagcaatacagctcrttccaaatggacaaactggaatgcggccagctcggaaactggagagccagtccccctgcaagcgctgctgctcctccagaactgcagccccactcagaaagcagtgaccttctgtacacgccatcctacagcctgcccttctcctaccattacggacacttccctctggactctcacgtcttcagcagcaaaaagccaatgttgccrgccaagttcgggcagccccaaggatccccttgtgaggtggcacgctttttcctgagcacantgccagccagcggtgaatgccagtggcattatgccaaccccctagtgcctagcagctcgtctccagctaaaaatcctccagagccaccggcgaacactgctaggcacagcctggtgccaagctacgaaggtgggtcaggtctgctcgtggggaaggtgggaggactgcgcacggccgggagccgaagcagccatggyggtgggtggcagatggagacagaaccctcacgctttgggcaaacttgccctctttctgcttctaagtagggcttgctgtgctttcttgctctcaatgcaggtgctcctcgagagtgagaaatggcagtctgcctgcctcggggacactagtgacagtataaagggcaaaggaaaaccgagtatctggccttcacgtaaatcctggccacattcaccaaccaaagggggacagtgatkttcaaaaccagctcccatgtgctgagaacaccccagctgcatttcttttgcaagattcctttccactccaaccagaagtgaatatttgagacaaacggcctattggctattttcccatgccagttttggaagtggggaaaactatggtggaaatttgtgggcttggggacagaaatgccactcaccaacccagggcaaagaacacaaaccctccaggcctcagtttcttcacctgtaaaatggggtgaagctgtgatgtgcctactcccaaggacacgacacacagtagggacctgccctgtacatgctagttcaacagaaaggaatggcctttcaccttctcctgstggcaggcaagcagatgtcctctgcggagataccgccagctccccaggacgcagactgactcctgtttgctcgctggaccaaccccaggcagaaggtggaaggtgggaacagaggtttagctgcaggacatgtattcccattgcaccgagacctaactgccgctcagagtgtagaccgagatggtgcagatgcctgcagtgccactaaaatgtgggtgaaggtgacatcaggattatgtgccccaggccgggctcagtggctcacacctgtaatcccagcactttgggaggccaaggtgggcggatcacctgaggtcaggagtttgcgacaagcctgccaacaagctgaaaccccatctccactaaaaatacaaaaattagttgggcatggtggtgagcacctgtaatcccagctactctggaggctgagataggaggatcacttgaacccgggaggtggaggttgcagtgagctaagatcacatcactgcactccagcctgggtaacagagtgagactgtctcaaaaaaaaaaaagaaaaagaaaaaggatgatgtgcctcagaaaagcagcacaccagcccctgcttaagaagacagctcttggaagttcctccaygcctctctcgaggcaggtagggctctgctccttctgggcctcatcctgctttttctgcaaatcctaggaatctcttgctctgtattgtgacttgaggctgagataacatttcttcccaaatctgagaagagagatagattacgggagaatgccgcctttctggaaatcactaggacatgttttttcagaagtagctaacttagaaaagaccacattggtgaccagggccaggmcccctgccttttgacctggcctgtcccaggagccacggatcccttagatttgcatctgccatacccgtgaacatcttgggcccctcatataaccaaggaagggatctccagaacatccaagcaaaggaagacaaagcaaagggttttgataacagctgaaagtattacccacttgagattgacttgaatttgtgtgtcggaagctggctaatgctgtcacatggtatttgacttttaccactattttaaaagtgaaagaggttaacaatctccttatcacacacttgataaaaagtggaccaaaggtgctaatttgaggcaatttgcgatcagcttcctagtctttttggtattaaaggaagacaaattttgccatatagtgtttaaaaacaaacaaacaaacaaagacaaaaaaaacccacaagccagggagctacttaatgtcaggcatcggactgagtagatgggagtggttatttttcattatgacacggcgaaaccgatcggggtggttaccacccctctccactaagggacgggcagaagaaatcagagcagacgggggccctccaacaccagggcccctggtggcctctagacctctgccgtccaatcaggtagccaccaaccccgtgtggtcttgaacatggaaatgtggccagtgcagtgaggcaggtgtgacctgcgctctgcatctcaggaccaaaaaaaaaaaaaagaaaatatcccaataattgtttcacacggattccattgagagagtattttggatatgctgcattaacgtgtattacttaacaggcattccacctgtttccctgctttgtaacgcggctcctggaacatttcaggtcgcgtcctgagattggacagcacggcctagactaaggcgggggagggcgacagcgaccccgcgggtgcagcgcgtgggcggccgaggggtggtggctgcgcccggggcttgggggtggggtggctgcggccgcgccccttgctgccctctaacgtgtcgcctgtccccgcagcgcccgccgccgccgtgcgcaggttcggcgaggacaccgcgcccccgagcttcccgagctgcggccactaccgcgaggagcccgcgctgggcccggccaaagccgcccgccaggccgcccgggacggggcgcggctggcgctggcccgcgcggcacccgagtgctgcgcgcccccgacccccgaggccccgggcgcgccggcgcagctgcccttcgtgctgctcaactaccaccgcgtgctggcccggcgcggaccgctggggggcgccgcacccgccgcctccggcctggcctgcgctcccggcggccccgaggcggcgaccggcgcgctgcggctccggcacccgagccccgccgccacctccccgcccggcgcgcccctgccgcactacctgggcgcctcggtcatcatcaccaacgggaggtgacccgctggccgcccgcgccaggagcctggacccggcctcccggggctgcggcgccaccgagcccggcaaatgcgcacgacctacattaatttatgcagagacagctgtttgaattggaccccgccgccgacttgcggatttccaccgcggaggccccgcgcgccggtgccgagggccgaggagcgcccgggtccgggcaggtgaccgcccgcctctgtcctgcgagggccggtgcgacccagttgctgggggcttggtttcctcaccttgaaatcgggcttcacgcgtcttgccttgtccccaacgttccacaacagtcccgctrggggattgaagcggtttcactccgcaaatatcctccactttcaggagggaaaacccaccctaccacagtccgctcttccaagtggacggcagacctgggaggggacgcctgtgtcacgagcccttttagatgcttaggtgaaggcagaagtgatgattgtaagtcccatgaatacacaactccactgtctttaaaagtcattcaagagtctcattatttttgtttttatttaaccctttcttcaatacaaaaagccaacaaaccaagactaagggggtgaccatgcaattccattttgtgtctgtgaacataggtgtgcttcccaaatacattaacaagctcttacttccccctaacccctatgaactcttgataacaccaagagtagcaccttcagaatatattgaataggcattaaatgcaaaaatatatatgtagccagacagtttatgagaatgaccctgtcaagcttcattattacgtggcaaaatccctctggcccacacagatctgtaattcactaggctcgtgtttgctacaaatagtgctaataaagttaaattgcacgtgcaatacggaacactgtcaatggactgcaccttgtgaaggaaaaacatgcttaagggggtgtaatgaaaatgatgtagacattttaagcattttctacacagcgagaaaacttcgtaagaacatgttacgtgtgcaacaggtaaacagaaatcctttcataaagcaccagcagtgtttaaaaaatgagcttccattaatttttactttttatgggttttgcttaaagatctcaacatggaaaaatcctgycatggctctgaactgcacaatgcattgaaccgccgtccttcaattttcttcacactatcaacactgcagcattttgctgctttatcaaaatggtttattttaggaaactttttccacctttctgaatggaaagaggttttcacaaatgttttaaactcatcgttctaaaatcaagtgcacctacaccaactgctctcaaaatgtgaactgacttttttttttttttttttgccaaccctgtgtcacttagtgaggacctgacacaatccctacagggtgtctgtcagtgggcctcatggtaagagtcacaatttgcaaatttaggaccgtgggtcatgcagcgaaggggctggatggtaggaagggatgtgcccgcctctccacgcactcagctatacctcattcacagctccttgtgagtgtgtgcacaggaaataagccgagggtattatttttttatgttcatgagtcttgtaattaaaccgtgattcttgaaaggtgtaggtttgattactaggagataccaccgacatttttcaataaagtactgcaaaatgcttttgtgtctaccttgttattaacttttggggctgtatttagtaaaaataaatcaaggctatcggagcagttcaataacaaaggttactgttgagaaaaaagaccctatcatagatttacaagtgacaacgtggacaggcgtaacagagtgtgtatgtacttgaaaatgtgtactagtgaaaacgtccttgtctaaacaaacttcgttttcataacctagaacatgaaggaagattcttacacgagctggcttcaggacggccagggctgagtgtgaagtcagcagagctgttactgtggcaacctaatattgtgacctccatcttgaagagtctgcacatttaagctggggatagcgtttcttgacttctgtgaggctccggcaggggaagaggaagcattttaatacatatgcctctcttttacaaaaaagaaaaaaaaatcatcgtaggccctaacatgtaccatgttgacaaaaatgccagatcaaatggatttgagaaataagcccaattcaaggctggctcagccctccacggggcctcccagggaaaggaattcctttatgttcttggaagcccttttctagaaaagccattccattcatacctttgtagagcagtgggctgggtgtggagggcagcgcggagggtatctgcaagagcctgtattttccgcctcccttgcccccactccttttatccttttaaaagtcctatcagccctgccttcgtcccttccgccctaagccctaagagtgggggaggtttaatacggccaatggatcttgtataaagtctacgtaagttttaatttaccagagctataagatggttaaggtagactagtggggactgctacagataaaatgagatacaaagaacatttgcaaataaatgccataaaattacagtagcttggaattttagtgaatcatggcccttgtgttatctagaatgctaattattcaagctgttcctaaacttaagtatgacatataagattaaaatcttggggggaaaaactgttcagatgaaaagtcaagtcaagaagtttccacaaaagaaaagaaaaatcctaaaaacaatctagctgttgttacattaaatttatttctcacctccattaaaagggtttttgctttggagttttgttaactttcgttctttggagtaataatatttctcttgtgtatggcgctgaatacatttgtcaataatacgtcaaaaaaaaaaacacttggcttcttaatacttggaaatacgtacatattccttactatgtaaaacactttatttattttgtaaaaatatgtttaaatatgaataaaaatactgtaacccaaagtagttgcctacttttaaaaatgaaacttgtaaaaataagagggagcccaaaccacatagaaagtcttagtttattttggtagacttgctttttataggcattggtttaaagtgattcttttcagagacatcctttgagaagttaaaattgcagaggcttacgctttcttttatttcaaatatgcatagtgattaaccaggaataaggattctcccatgttctgcctgttaagagcaaacagatctggagaacggaagcccaccctgcctcccttttccatctgaagcagtgcggggaggctggctcctctctttgttcccagactccagggcaaggggcgaccatgctgtatatgctgtgccttgggggacccccagaggctgcgctctgtggcctgtgctcccccgacctgtgcacccgcaccccagtcggccacttgctctcacatcaggcaacgtcagcctgctgcagtgaaactcaaccatgattttcctttgcacacaaatccttcctacttccaccactccctagcagagttcccagtgccagagagcactgctggggtgggggtggggacaggaagcccagttattgctgtgttctattttagggggcacttcctcaagagtccccttgaaacccgttaccagcctggaagggaggatatcttgccttttacaaaatacggtcgatactcaatgcacagcctctaaaacaagggctactccagtgttctaaaagcacacgccaatcctgagtttagtgaccacattttaaagatcatcaggaaaatgccaagttcccattaagactttaaagctccttgagatcccaggttgcggggtgcataaatggcccaaatcggagagtgtgctatagcaggtagacaggtttcgctaacacgaacagctatcagtaaaatgcctttattcagctaattctatagaagcggagttttgagagtctttggttcatgtgaggcaaaatcaggtttatggaaaacgcagcatctgcttcaaggctgcttcatctctctcaggacaactgagtctcctgcgtgagggaggagcgcctgctggaaagcacagagcacagcagtatgcccggaacatctccatagcctttgacaaggccacacttcattagttttaatttgcagaaaggaaattaaatgataacattttttcccaaagcagagtgtccagaataggacttcagcttaaaacaaaacatagcatgtttttcattaaataacccccaaagaaattcaaaaagtgatgatggcagctctgagagagggcttgccttatattacaaagtctgagaaatgaaacctacatcgttagcctcgagatctttgtccctgatgatattctgcagatgccctctcaagggtaagtccattttgtaatttggggatggtgtggacttgtattttacttaagtttctaactaattttgaaagaaggcttgggcatttggagaagagtggttttttttgtgttttttgtttgtttgttttttgagaaaaataattctaattgaagcctcatttccaaaaattactttttaagttcttttaatgtttcatttccaaaaaatatatattgggtattttttcatagggctgtcctgtgcctggctaaaggtagacagactatactaaaaaccacaagtttctggaattagcctgactgggtaagacctggataaagatggtgctagtttacaatgaagggattttgttcaaagctgaaagctccatcaaactttctttccactaatttcagctgggactggaagagagaaaactggacaaaaattggccttttaaaaagctgaaaagtaatgagtatgattcataagttcaacagagataggagggacatggaaaaggcatggcgtacatctgggaatagcgaatgcatatcaaaaggcttcatttcttttgttctttcatgaggcttgtagcacatcaaattttgaatgtcttcttttaaagctatgtgcgcacacacgcacgcacacacatatgcgggcacacacacacatcctccctctgaactgatggtgtttagtatcgataacattttctttcttggtaatacgaggtaaatgaggggggcaaaaacttatgacttctgagtaaaatgccatgtcttctatattccgtgagctgcacagtcttgcaggaatgctccacatttcagagtaaatctgaaactggcttaaaagctccaaatcctcccttgtatgtggtatgagtgtgccttcatctccagctgtcagagccaaatcgcccacctcctcatccaagtgatgcctaatcagacatttaaggattctgaacttgatcctgtctcttcacaatatgtagtaaatttaaacttacttaagaaagtcagtccctaactaaggacatttaaacttccttaggaaaggagagctcactgaatgatgtcaaagtaatgaactgatttcctctacaaggtcactgcaaccacaccagctagctctatctctacaggcatttagacttcgctatggggccacaccaccgggtggacagtaactcttggaagtctgtcttcccttttcttcattaataaaaacacagaacaatgactaagtgtccaagcatgttcttacagttcagtacctccccagatgcttacaaacagtgatagcatacctctaactcaccactggcctgggcgcaagagcatattttggtttgttttttcatagactaggggtaaaggtctgcactactaagaaaatatctgaattttcccattgtcatttccatgtaaaaactccccttgacaataaacgtaagtccaagccacagaggggagagcaatttcccacctgtgggagggctttccctaaactaaattttctacttcttaaccatctatcccagagcctcttcaaacaccaaagaaaacgacaacaaaacaaacctaaaaacaaacagaaacacagaaaaagaacaaagacttaacaaatgaattggaggaaaagaaaattcacctacaactctaaattagatttccagatgcatgggcacggacaggcagccgcgtctcggggacgcccggcattaccgccgtttggggaggatgaggtttctcagcatgtcgaaggagttgccgtccgggtgcacagtcacaacctcgccgccctcctggtgaacctggaggaagccagaatcgtccaggccaacgatggacacctttggtccctctgcgctgcccagatggacttgctgaccactgaaaaggaagaacagcgtgcggtcactgggaggtgtcacaggacgacttaagacaatgagctgaagaataatccatgatgagagagctgggcgtgctggggagagggctgaggctcgctgcagggaaaaggcagcctgggctgagctctgactttcttccaccctggtgaatggttttaagaactgctcaaataaccagcaggatgcaagttcaacaaggagtcgaaatttcttcacacaacgtcactcctcctaattctggtcatctgcggtgatggctggaaccacttcctcacctcccagcgcttttaagaaacactgtgcaactctaggttttttggctgagattggaggaaaataggccgagttggcaaacaatgttttatcttataaaacaaagttggctcatatcagccacaagtgaaactcatcctgatcctacttcttttgaatattttccaaatgtactcaagtcacgtccttcttaacagctttcgaagtatagaattttctcaagtttttattttgaagaattttaaatctaaagaaaagctgaaagaatagtgcaacaaacctcatattctcttccattctcacaccaaatgaaaatattttctgtatttgctttctttcttcacacataaacacacacaagcacacatttttttttcctgcaacatataaagataagttgcagctgggtgtggtagctcatgtttgtaaccttagcactttgggaggccaaggtgggaggattgcttgaggccaggagttcaagaccagcctgggcaatatagtgagaccctgcctctacaaaaaaatttttttttaaattagcgggccgtgtggcacactcctattgtctcagctacttgggaggctgaggcaggaggatcatttgagcccgggagttcaaggtttcagtagtgagctatgatggcaccactgcactccagtgacagagcaagaccctctctaaaaaaaaaaaaagtgaaaataaaaaaagttttttaaaagctgcaggcattgtgacactttctgcttaaatactttatctcctgagaacaagaacctcccataaaattataatagcattaactatgaccactcaagaaagtctggatacaaacggtccatgttcacgtcattcccactgtccttttaatatcctttgtggctatttccctccatccaggatcacacacattacatttagatgtcatgcctctttcgtcttctctaatcccaaacaattctgccaccttcttttggtctaattgtttgtgcgcagacctgacatttttgcagggcacaggcctgttgttgtggaatcagtgagcggtcctcggacttcagctgcatgagaatccctggagtatctgttatgacacagggtgctgggcccagcccaggggtttctgatgcagtagcccctggttgaggctgaggctgcttcctgggatctcactttgagaaccactgttacctggaaggtttgacaatttagatgcgtctattgtttcctcacaattagaatcagattaaaccaatgttaaactctctcactatttcggttcttcccatcgcatcccaccaggaggcataagatgcccgtttgctccattacttgtgatgctaacttggtcaaggtggtgtccctgcagtttctctaacagagacacagaaaataatcattcagaccagtgctcggtccctcattttaagatactgaactacggccgggcgcggtggctcacacctgtaatcccagcactttgggaggccaaggcgggcagatcacaaggtca

SEQ ID NO: 98141 - DNA, 17583 bp, Homo sapiens
acagtttaaaagctaataggccagacgctgtggctcacacttgtgatcccaacacattgggaggccgaggtgggtggatcacctgaggtcaggagtttgaggccagcccaacatggtgaaaccccatctctactaaaaatacaaaattatccaggtgtggtggcaggtgcctgtaatcccaactacttgggaggctgagacaggcgaattgtttgaacccaggaggtggtggttgcagcgagccgaaattgtactattgcactgcagcctgggcaacaagagtgaaactctgtctcaaaaaaaaaaaaaaaaaaaaaaaaaaagctaatggaagaaatagaataactctgaaatacttgattaatgcaaaagaaagataaaggaggaacaaagaacgtaagagcttaactcctgggataaatataaaactaatagcaagatggtagacataaacccaactttgctggtaattatgttaaatgtaagtgaactaaacactctaatagcaaaaattgtcagattggatttttttaaagctccaattatatgctgtttatatatatttttattgttattatagagatgaaatttcactatattgcccaagctggtctcaagttcctgagggcaagtgatcctcctgcctcagcctcccaaactgctgggattataggcatgaggcaccattcccagcctacaattatatgctgtttataagagacatactttaaatataatgacacaaaaagtttgacagtaaaaggatggcaaaagatatctcatacaaagagtaagcccaagaaagctgctgtagctctattaatataagagaagcacacttcaaggcaaggcatattagtagagatagtgataaatgggtcagtcattaaaagacacaattctttctatgtttttaataaaacagcttcaaaatatatggaaaacaatggcagaaataaatggtaaaatatacacattcaccataatagctggatattttaactcacctctcttcataattgaaaaataatgacccgtaaataattaagtcaatttgtggccaggcacagtgtctcacacctgtaatcccagcactttgggaggtcagaagttcaagaccagcctggccaacgtggtggaaccctgtctccactaaacaacaacaacaacaacaacaacaaattagttgggtatggtggcccagctaccctggaggctgagcctggagaatcacttgaacctggaaagcggaggttgtagtgagctgagatcacaccactgcactccagcctgggtgacagagcaagactctgtctcagaaagaaagaaaaaaaaaattaagtcaatttgtaacagaaaagcaaagggggaattacgctttagatagttgcatatacatcaaagtcatgagaatatacaggacaatggaatggaacaggaaactcacaggaatatgagttaccaagtgatacagtttggctgtgtccccacccaaatctcatcttgaattgtagttcccataatccccacatggcctgggaaggacaggtgggaggtaattgaatcatgggagcagttacctccatgccgttctcatgacagtgagtgagttctcacaagatctgatagttttataaggggtttttcccccacttcgctctgcacttctccttgctgctgccatgtgaagaagaacatatttgcttccccctcctccatgatcgtaagtttcctgagacgtccccgccatgctgaactgtgagtcaattaaacctcttttcctttataaattacctagtctcggatatgtctttattagtagcgtgagaacggactaatacggcaagctagcacaaaaatcaatagataaagaacagaatgcttggtaaaaggactggaaaaactggcccacaacatggagaaaattaaaactagaaccctaccttacactatgtgaaaaggtagactccagatcgattagagacctaggtatgaatggtaaaaatataaagttaatgaaaatcaatgtagcaaaatatgtttgggacctcataaacacaactatgaggtaaaatgggatatattatctaaggaagggaaggtttaggtggatcagatggctgctgccataatacagtgtaaaggacaaggaattctaggactgtgagttgcggtggttgcttctagcagagatggatacataaagaaagataatttaggcttgagtctgaaatcctcagctcaaaaattttagactgaattctcaatctaaaaaccagaaaaagccccatgtttttgctaacaacatattttctctctttctagttataatgctgaaataattgaaaaccatggtcatacttaatcttgctgcttgccaaattatattaataccctgagttaaactgacatcctcattaggcctcttatgtcaaacttagagtattgaccaagaaacagtaggaccttgatttggaatggggaaggggatttggaggactcataatatcctaaactagggagaacaatagtccaggtttcagaagtgaaagtcctgtgtcccaggaaacccctcagtcccaggaaaactgggatagttgacatgttctcctttgctaatcaaagcaggatctcttcccgtctaaagaagttgttactgccttgctagaagatcctgtaatgacctcacctgaggtaataattaccttgtaaagagaaaccaattgtaaagggaggcctacgctcctcctccattattcacattatttccgtacaccccaaatcagattccagcatgagaagggctgtggtggctagtaatttaaaaggcaaatccagaaggaggagacttacgccaaaaaaattctagactctgctcacatatattggcaaaagcccagagaaaaatgtgtgggattctcagaacgttacactcacaaggagaactgtaattttggataaggcagaaatgatgatagggtacacttgccacagattctggattctgtgcgctgccttgagcagctgggggtgattctacttgttggttcagttagttgagtgaaacatgaacttaataagggtccacattaaatgaaattgagaatgcaaacattccttaaataatataaagccattcaaatatttacaaagataggaatgttggagtggaattgttgtgtgcaatatgactgtcctaatctattgatctcctaagtctccttggaggacctatcagtgaccctcctttcactaaggccttgagagaaataacactggtgaggggagtaccaacatccatgaaaagcattttaatgatacttctctttaagctaggaaggcttgggaaaatgttatggttaaaaggctttcctgatttcaatggagacatcagactcttgggtttggtacaggcttaatagcatttagtagcaattaacaactggagacaaggtgaaaacagtgattgtaataggaggaggtccagtgtaatcaagagttcagcccacagaaaccttggttgtggataacacggggcctcctggcctgaaatgctgttcaaaaaattaatgaggcagcatacatactaaccaagaaaaattgataccattgtataaaattgatacagccatgccagtacataccagctatatcccagcctggcctaggaccaaatacattagcaacaacatacgccccacttgatatatataacaatagcagaaaagcctgactggagccaccaagatacagtgtcaccaaattgccacaaacagatatgaatgaaagacccctaaagatgcagaactctgtaattatatcataaatgtttccaaaatcttttttgaggctcccatttgctaagataacaatgcactgcagaaaggaaaaactattaggccttttggaggtcatctgggaacagctctgaacaaatataaatttctcgggtctctgaaaccactgtggtctatagaacaaagtatatgctataggaataaacccatcccccacttatttttccagtaaagagttataatttatttcttcatcctctgtggcaatatacccacattggatccctgatccataaaaagagggttattctctcaggaagtatgaagagatttgcagagatgagtcccaccatcaaaagctttgaaagcagcaggagtgtgattcttatcacatcttgctttagcatgatctttggcatatgtaggaggagacagatgggtctctaagaatgacttcacaggctgggctcagtggctcacacccgtaatcccagcactttgggaggctgagatgggcagatcacttgaggccaggattcgagaccagcctggccaacatggcgaaaaaccatctctactaaaaatacaaaaattagccaggcgtggtggcatacacctgtaatcccatctacttgggaggctgaggcatgagaatcacttgaatccgggaggcagagtttgctttgagctgaaattgggccactgcactccaccctgagtgacagagcgagagagcaagactccgtctcaaaaaaatagaatggctgcacatattccgaaacttaagcagatggtgattccaactgcagctgctgtcatataagttcttttttcttggagcaaatcagaaagtagctggctactgatttggtcaatgcttttttgtttttcctttattccagtaagtaaagaccacttgaagcattttctttatctcagtaagcagcaatgtagattgtctttttccaacattacattaactttctatgtcagaatatcagtctcgatatcagacctttgatcagcttaccactatacagggcagcatgctgtatgcctccaggtgatattctgattggacttggagaatggagtcatgtttcctggatgcctagtaagatgtgtcatcccagagggtgaacgataaatcccatgaaagcacagagcctgcagccaagttttgtagaagtccagtgtctggtacatgctgggatttccccttcattgtgaggaacaaattgtgtactttgttccttctataactaaggagaactcccagggtttggtgggtgatatggtttggctgtgcccctatccagatctcaccttgaatagtaataatccccatgtgtcaaggacaggaccaggtggagataattgaatcatgggggtggtttaccccatacttctcgtggtagtgaataagtgtcacgagatctggtggcttcataaaggggagttcccctacacaagatctcttgcctgcccctatgtaacatatccctatgctcttccttcgtcttctgctgtgattgtgaggcctccctagccatgtggaactgtgagtccattaaacctctttcctttataaactacccagtctcgggtatgtctttattagcagcataagaatgagctaatacagtgggcttacttaaattctgtgtaccctgctcaaattcattcgggggttgacccaaatgcatctagttttgactgggatcagaaagagaggtctctctagctggtccaggctatggtgaaattagttccaccatgtggaccttatgagggaaagccaatgggctcagagtttctgtggcaaatcaggattatgtataaaaccaggaagtgtgagcaacactgtgccctcttcagacaataactattcttttgacttactactgggctacttgagataaaagcaagtgaaaaaaacctgttcaaaagggttccatgaaggctgcagacagacaccatcagaaccttctcaggttctgagaggggatggatggcatgtaaggagttatatgtgaacgctcaagttcacaggcaatgtatgtttgatttaataaggaatgttttagaggtccctgtgttgtggtctgccaactcatctggcctactcaattcactatgcaggtgtcctcagctcttagcctaacacataatagaccagtaaggaatgaaaagcaaagaacatacttgacgatatgcttcatttacttcagcaaactttaaaaagacactgtaacttttataaatgagcacattttccaaataaccatttaagaatataataaacagaatatccagattcttaagttacaagcaatagagactgattctgatttccgacaacaaaagggaagatgctgggtcattcaaaggaaatgccaaacagctgagcattcagtaggtcagaaatgagggtggcactagaggtttaagcagcaagagctcacagccatctctccaggaggctgccagaggacaacttgattcctatcactttctcttcccaaatcacacagggaaggggcagtttcccaaaataagctgtgtgtgtagggggagggggttggggaatgacggacttttattatgtgctcatatcaggctgtgcaaacaaccagcagactcctatacatacaaagttgagttttgaattatacatgtactttttttttctataaaacctacacgtccccataatactatctgcattagttttcctgataggaaaaaaagtattgcagaatgctcaaattagacttatttataaaaaagtaggttctgaaaaatctcagaaatagctccagaagcagtagagttcataacctagaatttattgccttttctttacacccatctttctgtagctacttttgctcatgtaatcaggaaaaacacctctataaggtaggttgatggcacatattgattcatttggatggagttacatctgttgaaggcctaaaacttgtaaatgcgaattatacttattgatagctttgtggagactgtgggggaaaaagattcctatactttgttgtttttagtgctggcaaacattaagaagtgattccttggcaatgtaagtcctatttcttccctttgcatataggcaaagtgtcaggctccagcctgagttccagcacaaccaaggctaggatggaaacatgaatggcaagctggaggacctggcggggcaggcctacagcgagccatgggttgaagatctgagttgtgccctgagaggacactcattgtgacctaagaagaaagaggcagtacaaagtggacccagttctaacacctccttgggatagggcctcctgctccatcatgtcctctctgtagcccaaggacacgtctgcatccacggcacagagggtaaaaccagatggtagtttcatcagaagttctgtaggctccccagcacaagcagcactgtctgacatctaacaggatgtgttcctaaatcccagcaccaagctttggcatcttgagaggacccagtaggagaatggaatgcctcccgggaaagggcagcagtagctgaccacagaaacacggaaagctgcagaggctgctcaagacatctcttagcacatgagactcgcagaaatacttggggagggatggagacctggtaatgaaaaggcttggcaagagctacttaaatagcggtttttaatcattaaaataaactctcattttgaaaagcctggtgaagcctgtggagcttggaattttcagaggagatggcagtaacatcatcggactgtagaattagattttttttttcccaataaggtaatgatgcagatatccacactggtcccctcaacagtctcttgccctttatagtaatgcatactggcacacaggcaaaggttggattgaaacaggcgaatactttgtagacaaggaaccatgtgtttatcttttctggataagaattaaactaatactggtatcaggattgctagtatcatgaactgatataaacagccagaacacatagcattgtgtgtcatcttttaactcgtgggacttcatgtctatgagtcctttgccactgctattaggatctagttttactaaaacactcgaaataggagtttaaagtaagaaatgaagtaaacgggctgggcgcggtggctcacacctgtaatcccagcactttggaaggccgaggcaggcagatcacgaggttaagagattgagaccatcctagccaacatgatgaaaccctgtctctactaaaaatataacaattagctgggcgtggtggcgcacgcctgtagtcccagctacttgggaggctgaggcaggagaatcgcttgaacctgggaagctgaggatgcagtgagccgagatcgcaccgtctcaaaaaaggaagtaaacatgtccttcctgttctcattttaaacttgatttagatttccaataatgaaagacaagtgggtgtgtcacatgtgtgctagcaatgtgaaacaaatgctattcatatttctcaattcataattgcagtttgatttttgatgttagttatgggctttggattcctcttcaatcaaatcagcttcacaagttaaatggattgtttttattaatttacaatgaaatagtttttgaatgacttcacacaaaaacctasagataacatcacaattgcaatgttataaagtttaaaggcctattcatttcactgtcagttgaaattcgttaccaggtgaaaattctggagctgggttttgcactgaggatgctacacagccactagcctttttaatttggtcttattaacagaaatactgacttagtgaaattacaggcataggcctcttaatcgctttttatgagtctgaacttttgctttcaataccaaatagtatctgaaaaacatgctcacttttgtgcttcttgagaaattctaagaattggcccagattcatgtgatagtcattccttaatccatagtcaccatgagcctcaaggagtaactcttcaaaagaatggaaaaggcgcaggtcctcaccatttccttctgtctccacgctttcagcatgcttacaggaaatgtgcttccaattggggtacctaattgtgtgccagaactcctcacagtgctctttgaaaccctccacacagattataccaggctttcctgtcatgcaaaatccagtcacatctaaccttttcccaacatccaaaatctttttccttaggtcctgctgatatatatggtgactgtagatccacattcggaggaatgtgttcttgactggctttgcttgtgtagatggttcatatacaagctttctgttcaggaaataagatgcactgttgtcctgtagccactggattgctgcacatacacagagctcacctggatcaaaagtccctatgtaagaagtgagacctttgttgagaagtagctgctgatgtctgtcaagttcagatgaccgtccaaacagctgcaatgctacataggggtagctgtgaggcatggtcacttgcaaatcaattttcaccttaaaatgaaaatcaaatagatttaaataccataacatcacataagctagtttatcaatagcaactgcatgattttgagaaatgttattgctactattaaatgtaccaggtactttacatacatgattgcttccttttatgcattatttcaatatttattgaacaactacgtgtgccaggtgcccttgtgctgggataaaaaagtgaataaaccagacactatttttgcccttcatgaagtccagggcctagtgaaggagacacacattaaacaaataattacatatagcaagtatttaatttcaattgtgaaaagcattaccatggaaaagtggagggttccattgaagtgtgtaaccagcgggacagaatccagtctggagaaccagaaagtctcctctgagggaataacaactgaaggatgagtaggaaatagctacaacrgtggttctcaaatgcccagtccacgtattacctatgctatgctaatgttgctggagataaatggatcagaagatggaggkaaattcatttttagtctttagatttttccatccatatttgctttctgtgttatggtgccatcaaaaaatccactcattcactccttaaaagacagttatgttacaggagatatttagatttatgaaaatcatgatacatgtgaaaggtagtccaactggatgggtgaacaaaataataatggcataagactgcaagatagcgtcaataaaaactccaggtatatttgttaaaaaggtgtatatgtttacataaaattaaagatatttactgaagacaatttatagagcattccgtatctttcaaacaaggaaatatgcacctggaatatttctatctttccttgacagaaagctcatgttctagatgtttcaattaaaaactgggcacctggcaaacacttaaatcagggtacctaccttgggctcttcaatctggagtgtaattacaaattcgatttttggtggcagcgcctcccttgtgccttccaaatacctctttatattcgtcagggcatttacatcttcaagttttacttctccttggttaggaaacatagaaaacagcatttccatctccagtagctgaagctgaaggctttctttcaccgaagcagacatgttgcctcgcaatcagcctgcctggaaacctcacaaggctcagggacgctgggtttgtcaatgccagccggtatccagcgaaatttcccgaaggtccctttacgtggaagcaattctgcaggaacgctttgcaccgagagctaggggcacaaaccagacacttgcactcttctttatttcctgactccaaaatctagtatgcacaacatcctctaaaacactccgtaaaaacccatattctgcgtacccgggctccgggttcccgcctcccgcaccccgcactagataggggaatctgcactttcaacaggtgtttggaactgtcccgctgcaggtggcaggcagacacctgcagacgctctgcaagcctgaattctgggaaaggctggggcccggcttccaatcccacccggggctcgggcttgggcggagccagacgctgcggcgagagaggccgcagtgccagcaggatgggctccgagttccccagcgccagtcgccacccctcggtcctggactcgcggaccgcccccccccaacaccgsggtggccttttcgcttgggccgcattccagggctccggacgtttacgattcactggcctctgccccgagggacccaggataagggtagggggtgtctcagaggtcattaaataaaagatgtttacagtgagctgggggaagggggtacccggggagacggcagccggagaaggcttcccagattcaaaggtttgggagatgacctcgacgtcggagagggggatgcgggccgccggcggcgctcactgtgggcgaggtcgccctgtccgaggcccagcgacggggctgattccccacccccgcccctagccaagaccactaggaaccccggcttcccaggaacgcagggcctgccgcccccagaggcccggatttggaggcggaggctgtgcctccgcggccgcagtgctctgagggcccgcgaccctcggccccaacccccgggccaccgcgggggcctcaccctttctggtcactcaatggtaacagccccasaccccgctcggaaccgcagccgcagttcctcaggcgccagctgcgcgcgacctgcggcgaggcgggggcggggctggcggatagtcctctgccgtgattggccagggggcgtggcgacgagccggaagccacgcagggccacgtctgcggttctgaggactgggtttgggtgcagacgttgttgcttgggcgcttctccgctgcgtgtaggtgaagggggcttcctgaccgaggtaagccgggccccgaggctcggagttgagaagggagactaccggtcggcaagggctcggtgggagcgggacaggtcagattctcggcccgacggaggggctagtggtctggcgggcgactgaccgagcggcggagcgcgcgggacacacctacaggcccctgcgccccgcgggcgggctggtcgggacgggccgcgggtctcctgccggggctctggtacgtggacctaggcggggacctcagggtggagtgccgggaatcacccttgtgcggtgattcgagggtaggcgggagagaggcaccaaggagatttgaagattgaatggagagtagggggatactcttaactttttgcgtggacgctggatttggcaaatatgctttcaataaaggcattcgcagaggcattgaaagtagttgtagggcctaaaacgcatgaaaggatgaactcatattatctggacctttttttttttaatggctttttggagttaacaggactggtttacactcttatgaataatcatgacacataactgactgctcagtttttacaaatatgtattcatccttaggaaagagatctgatcactgtcttgaactaaattagtttactgaatgccagctttttccaactggacaaaagcaagtatttttcaccatttcttgcaagttctgttcattgaagcaatgaaggacaataaagaaaacaaaattatgaggctagcagctggcggactgctcctcatctctgggctaattgggaattaattgacccaggaaatgtagtatatggactactgaaggaaaactactgactgaggttggaaaccccaagttccacttaatgggagtatcccagagaaaacagtattagtgggctaagggccgattttttgttgttgtttgttttgagacggagtctcaccctgtcgcccagcctggagtgcagtggcgcgatctcggctcactgcgacctccacccgcgggttcaagcgattctcctgcctcagcctcctgagtagctgggactacaggcgcgcaccaccacgccaggctactttttgtatttttagtagagacaagggtctcaccatgttggtcaggctggtcttgaattcctgacctcgtgatccgcccgccttggcctcccaaaatgccgggattacaggcgtgagccacctcacctggcctgttttttttttttttttttttttttgagaccgagtctccctttgtcacccaggctggagtgcagtggcgcgatctcggctcactgcaacctctgcctcccgagtagctgggattacaggcgccagctaacacgcccgactaatttttttgtatttttaatagagaggcggtttcgccatgttggccaggctggtttcaaactcctgacctcaggtgatccgcctgccttggcctctcaaagtgctaagattactggcgtgagccaccgctcccggccgatgttttatttttaaaagtaaaggaaaaaggtggcattctttcagaagaagatattgctagttttagagcaacatcttagaagggtgtcctgattgtttttagcaaatggaaaaagatctgggtagtcttggagaagaaactgttgccttttgcttttcctttaagaatatgtctctgtagtttgggagaaatagcaaaagaaccacaaagatttctcagatatttggggatatgtagtttcagtccactcaagaatctgactttaggcctcaatccgtcaccagctatctatgttaatttaggttagtttccctttttgtaaaatgaaatgatctttgagctcattggagtctctgaataggtgtaaaatcttcattttagttgagagtggaccaatttaagtgtgcccggcgtccaggatagtcctggagctaaaatgggaggagagtggggacaatctgctatctgccctgagtctgcccaggagtggacataccaagttggacaacatcttgtaggtaattctaacccacaggacttactctcctgcccattgctctgtcaaacatagggttctttgaggaggttcaggatgagacagacctattcgtttggggtggcagtttttgaagcaaatggttcttaagaaattacttgttatgcccgaaacaatatttcttaattttgtagacatggatttaggtgctattacaaaatactcagcattacacgccaagcccaatggactgatccttcaatacgggactgctggatttcgaacgaaggcagaacatcttgatcatgtcatgtttcgcatgggattattagctgtcctgaggtcaaaacagacaaaatccactataggagtcatggtaacagcgtcccacaatcctgaggtaatgggtttagtgccctgataaagcagaccattatttacaagaccaagccttagtgtctgagcaaattgacctaaagtacaaattctaattctaggaatgtgccttctcatttatatgtgctttggatgtgaaacaactttttttttttaagagcatgatcattaagctcatgattcctaagggtgtggaaagaatgaaaagatactgtcattttttggagtgtccatattagagaaataacaatgtccttccaaatttattgatttaagacattttcagtaattgaaaattgtttcctttgttaacttagcagtgattaaagatattggggttgggtggggaagggtaaagatttgaaaagaaacattttgaacattttcagacaggtttttatagctcggcaataatttcttgttctgaatgaacaaacaggtgagctttggcagaatattgatgacgcctgatagttctagtctttgtgacagttagattttaatcaaagtattctttttgacacaattattttttcagctttattgaggtataagtgataaataaaaattgtataattcaagtcatacaacaccatgttttgatatatgtatacattgtgaaatgattaccactatcaggctaattaacatatccattagctcacatagttaccttgttttgtggtgggaatacttaagacgtacgctcaacacattttcaatatatattattatgaactatagtcaccacgctgtacgttagtcttccagaacttattcatcttataactgcaagtttatgcccattggccagcatctccccatttcccttaccctctagccgccaccatactactctgtgtttctgtgagtttcacttttttacataacacatgtatgttatgagcctgcagtatttgtcttcatgtgtctggcttatttaacttcgcataatgtcttccagattcaaccatgatgcaaatggcagtatttcttttttaaggctgaataatattctattgtgtatatataccacattttcttcatccatttatctgtttatgagcacttttgttgtttctatatcttagccaacctcttgacacaatgtagttattctttattagctataggccattaatacagggtttgaataatatgcttctatttgattgctggggctgtgggatttttgcctttgtagctaaatcagcagcaagttaaagtggtgtaggtctgtgaaggattgtaacctcctcttcccccaaacaagggcattgcttgtccaaatatgtgatcattataaatgtgtatatgtctaaatatgtaagtcaccataattgattgactgattgacttctaggaagaccctcacatttattgctagttccagaggcacttctcaaaatgattctcttttctttcaggtgacattcactgtgaactacactttctttccacgaatttgagcagaacagtgttgggaggcagttttcagtgtctgtcctacccgctggttgacaagctggctagtgtgttcttggagttccgagtcatagtgagaaggatctctgtgtgcccttattctgctccacttgtgccctagtcagtttatggatagtggatgcacagatcacagccttttacaaaggctagtgtggcatagtgtttttaggcgagtaagatagacttgctgttttaatatcagtactgacatttgttagctgtatgatcataagcaaattacctaacctctctgaagctcagttttctcgaagattgaaattaaaataggattattagtttaattgattatgtgtgtcatgaggatttaatgaggtaatatatatacataaaatacctaatccagggtccagtattaatatttggtgtttattgttgaagctgctcagccatcactgtctttggttgaagggaaacagcttttgagttctgttctcaactcagcctcatgagtatgcacagattgcttattgtttgtttttcttttaaggaagacaatggtgtaaaattggttgatcctttgggtgaaatgttggcaccatcctgggaggaacatgccacctgtttagcaaatgctgaggaacaagatatgcagagagtgcttattgacatcagcgagaaagaagctgtgaatctgcaacaagatgcctttgtagttattggtagagataccaggtgatgataagagttactggtaaaaaaaaaaacctttgggaacgtgatataaacgattgtatcagttttaatccaagacaaatggaaagaagtaaagtggaactaccctgagttgcatgtctacctgcctggcctttctagtaggatgtagtagctaagtcactactgcagcttggggtttggagtctgactctggtttaaaaccctactccaaaacccaagctgcagaataatgtatgtaaaatacttcctgacacaagagaagcactcaataaatgtctcccaccccctctgtaggtttatttttttttccctacagagtcaacacatgatttgaactcattatttttaaagatttactttgtaatctgtgttattattgtttcaaatatttatatcattttcccatgctggagctcactgtaaactacaatattattttccacatagttctgttttgcagcttttgcctttcttaacaaaaatgtctttttgtaaaatattagatgaaaagtatactttgcaacagtagcatttccttttgcataagatctggttttaacctgagattatttcaaaaggaaatttctactcaatctccaatacctggactggtttttttaccctctgttgtattaccagagggttttccagataccgacgatggtagcagagtaacttatgttctgaagtaaattatcccaccacagtaaagtcatcccacatgtatttggttcttaactattaactaatgtaagtgatgaaacattttttcctacaaggcagtttttttattatttttcatttttttgatacggagtctcgctctgtcaccaggctggagtgcagtggcacagtcttggctcattgcaccctctgactcccagggtcaagtgattctcctgcctcagcctcccgagtagctgggactacagctgtgtgccaccacgcccagctaatttttgtatttttagtagagacgtggtttcaccgtgttggccaggatggtctcaatcttgtgatccacccacctcggcctcccaaagtgctgggattacaggtgtgagccactgtgcctggccaaggcagttttgtaatctgttttattttcagatagataatttgttctgactttacaaaatggaaaacaggttctatatccttggcagcttaatacaagtactgtcttatacacactgtgtatattcagtgtttattgttactgttcttagagttcagacatgttgctgtagtcgaacttg

SEQ ID NO: 98142 - DNA, 44776 bp, Homo sapiens
cgctctcacccgcaggagtcccacacagggagaaaggcaggcaagttacaggaagcagcagagcaatcacctcccagaccagaggcggtaaagccaaaaagcaactcgggggaatttcagcaattacagaaatggatcaaatctgatcattacaaatcactatttgaaactaaattagcaagatgaataaagttaatttaagaagaaatctataaacaaaaaaatcagattattactcaaatatggcaaaagatcactaaatgcaacttaactcataaacttctgttaacttgcttccaatcccaaattaagaaaataaaatttggcagtttctctgaacctactctggttcaggggttgcctgattttttaaaaatactttaaaaaaattttttttaagcatattccaaagtaccaataatcctctgcattccatcttcagtttgtatcatactttggtcccactaagaagcctgtgtttggggtgtagagctactcttacatggcattatgcaaataaatgcagcccctttgctcgaggcacccaccctcaacccccagctcaaacacctgggatcattacaaaagttaagagcccaagtttttatttcctatttgccttctttaaaaaacaccctcttctggctgggtgcggtggctcatgcctgtaatcccagcactttgggaggctgagacaggcggatcacgaggtcaggagagagaccatcttggctaacacagtgaaaccccgtctctactaaaaatacaaaaaattagccaggcggggtggcgggcacctgtagtcccagctactcagggggctgaggcaggagaatggcatgaacccgggaggcggagcttgcagtgagccgagatcgcgccactgcactccagcctgggccacagagtaagactccgtctcaaaaaacaaacaaacaaaaaaacaccctcttctacaatgatgctgtaagacaaaacatcaactctttccctttcttttccacacctaggtatcaaagcccagttttgtggctaatcttaaggttgatcttcttctctttttttggtttctaaagacacactacaccaaatcttaagacaaagggcactggaccttcagaagcaggtccaccccagtcttcacaatctagtgcagttacttttcttgtgtgtactctgctggcattattacaaaaatcaggatatggtcccagttcctgcaattttagcacagtgcttatatacaataaagttgacctcttttttaaaagaaaagttgagggttttcccaggcacagtggctcacacatgtaatcccagcactttgggaggtcgaggaggatagaccacttgagcccagcagttcaagaccagcctgggcaacatgatgaaaccccacctctagaaaaaaatacaaaaattagccaggcgtggtggtgtgtacctgtagtcccagctacgggccaaggcatgaggatcaatggagcctgggaggtcaaggctaaggtcagccatgatcgcacagcgccactgcactccagcctgagcgacagagcaagaccctttctcaaaaacaaaaacaagttgaggggttttaacgtttaggggctactctactgtttatctaactagggtgaacaagtatgggtcaccagcacagcacaacacccacctgctgtattatctccaaactcatgaacatggaatccatgcaggccttcagtcagtcctttaatgcttccccacaccttcactggtccattactttcctttaagaaaagtgcaaagttggagagagtttctgaacaaagaaaacagctgatttacctttacccctcacagtgaagtaaaaagcagccagacttgggagtggaaaaatctgtgtccaaatcccaggctgaccactttctagccagtgaacctccagcaagctgcttaactgctctaggcctgtgtcctcaaaagggagatggtaatcttgttcccacactcaatgcacaagcaccctgtggccaggcttcatgattaaataacataaaaagcacctaatagagtggcaagcaaagtgagtacctacacatcagtgttagatacttcataggctttgactattacagtaaataggtaatgtaagtacctatttatgtagtaaatacttttgaataggttatatttgtacatgttgaatatacatgtacatgtaaacgttttttattttgagacaagagtctcgctctgtcgcccaggctggagtgcagtggcatgatctcagctcactgcaagctccgcctcccgggttcacgccattctcctgcctcagcctttttaacccaaaaggtgtatgtctcatcctacactctggagccccttgctttttctccacgcacacccttttccatatggcatactcacttgactttaaaaaaaaaaaaagaaaaagtcgccctggaaatgtccaacaggctaccctgggacccctgctctccactccccactcagtgagtgtttttaagtgtccatcataagtttttttctttttttttttgagacgagtctcgctctgtcgcccaggctggagtgcagtgacatgatctcggctcactgcaagctccgcctcccaggttcatgccattctcctgcctcagcctcctgagtagctgggactacaggcgcccaccaccacacccggctaatttttttgcatttttagtagagacggggtttcaccgtgttagccaggatggtctccatctgctgacctcgtgatccacccgtctcggcctcccaaagtgctgggattacaggcgtaagccaccacgcccggctatcacaggtatttttaattagcagtcagaaaatattatattccactgcccccaggagaggactgattctagtctaaccagacgtactactgctttctgaaatcttttcaagcactgaaacctaggtaacctttccactctaccaaaatgaaagcaagcagtatagccattcaggtaatggtgacaggtaatggtgctccgtggctacatacagaaatcaaggaagttacaactagatctcaggactaaaataaacacaacatccacaccacaccgtcatacaacatgtcagtgtctcttgtttttagcttggtttgttttcaaatacggccaacagttaaggggcattaacccttaagatgtgactttccactggaaaatatcattgctcaaatgaagtatcctggcaattgctgcctttttaaattcttttctttttgacaatagatactgtgactcttctacaacctttaattttggaaaaactcaaatgtgaaagttgtccctcaaacactctgttatcaagagcacagggccaaaaacagcaggttctttgaaacctccatttaaccggtaatacattcaggacatctaagtagctgtgctcgggtacaaccctgcagggaccaggctatgaacttaagtgaataacacaggcctgggaagcgaaaaaatatatgaactgctacagcagtactgtcctgggctaatgaaggctcagtatgaagagatctccaaaaattcttcaagagaagctaggaaaactggattaatacgtgaaaaattctgatctgtaaaaactagcaaagagtccaagattttaaacacggaataggccaagccaagtagctgatagccaatgtattatctctgcatatctggaaagctggaatgctccactatccaaggctcattctcaggtacaacgggcaccaaacaaaacgaagtcaggcgcttaaaagaaggaactatgcaagctgctcagggaaggtggaaaacctgggttcatgcatggattctcaatggccagggagaagggattcctcagaggcgtcttaagaatagcactggtggccgggcggggtggctcacgcctgtaatcccagcactttgggaggccgaggcgggtggatcacgacgtcaacagatcgagaccatcctggccaacatggtgaaacgccgtctctactaaaatataaaaaattagccaggcgtggcggcgcgcgcctgtagtcccagctacccgggaggctgaggcaggagaattgcttgaacctgggaggcggaggttgcagtgagctgagatcgcgccactgcactccagcctgggcgacagagcgagacttggtctgaaaaacaaaacactagtactggtgaattatgtggggagaagtaaagagggacaaaaagaagtctgacaaatgaaacagcaaaatggagtcaaatgccaaagaaccttttccagaaaatctggagacctattaaagaaaaaggctaaactcattatctccctcacatatatttcagacatttacacagactaactgttcctgtcctctcacgtttctgtaaacccctttaaagactgaatctcattcgtatagtaaatattccctcatgatttttaagccgagtgcaagagaaaattttccaccagttggtaacttcactaaggttctggggacagtgttatcacaagcaccttccttgcaacacgttttgtaattttactgataaaagttctgaaaatatttctgtatattttacaagagtcgttcagaagtttgtctctgaccatcttagcaacctgcctactggcagagcaattttaaagccactttacgaaaatgtggcttaagaaatgctccgacaacagttattaagtgccaattcggtgtaatggaaactccaggtcttctaatttccaaatacgaaactccacccactgtcctcaaacgacagttctcaatcgtaggtgcacatcaaaatcacttttggaaactttcaaaaaacagcaatactcaccctgcactaggacaggttttgatgtaattggtcggaggttgggctctggtgtatttttagtaagatcttcaaataagctaactgtgcacccaaagttaagatcactgccctcaaaaatccccaaaagggtcagttaaacctctggctcccggagcttaggaggaggaaaaggacctctgttcaaggctaccttctctgcccttgcagcccaatcatgacctagaacagaggccagcaaacttccctgcaaagtgtcacacaaacggtctctgttgcgtatttttgttttccaaagccttttaaaaatataaaaaccattcctagccttagagctgtacaaaagcgaagactccctgacctagagcgctgaagccggaaagcggagagggatgcgaagacaccaggcgggcccaggcgcagtcgccatccccgggctgggcctggcactgcgccactcggtgtccgcgggaccctcaggaacgagaacacggccaagcaagggacgagcacagccgctccaggcaccacgacagacccgcggcggcggcccaaggaccacagagggcagcacgcccgcccccgcccctccccggcccgcggcaatccctccccgcgctcccgccacgcgcaggcccagccccgcggcggcctcggtcccacgccccgcgcccgggcccgcccggtgactcagcacttgggcaccgcaccgctgggggcgaaggcaccgaccgggcggcacgggccgggaccgggcgctggaccagggcggccccgaggcctggcgggcgacccgctcctagcaaaggtgcgcggggggacgagcgggtgggagcggcctcgcaaacaagcctccgtcccagcccttgccttctgctcgaaattgatgatgccctgcactgggccgtcgcccttcagcacgcacacggccttcgtcgccataactcgctaggccacgccgaggtcctggttccgaggactgcaacggaaaccccagacgctgcaggagactacgacgcaaaccagcaccccgtctccgcgactactttataggccagacctccgcgcctcgcccactctggccccaaaccaatcgcctcgcacgcgctcagcccgccccctgcggcagcctcgggtcgcgagtggccgggaatgactgggggcggggccaaggggccgcgtgcgccggagactccccccgccccgcagccgggaaacgtccagaaccccgaaatgtggagaaaacaaccttcttttcacgggggcgtggcccgccggttgcagtacgcgaaattggcaaaatgatgtaaacagggtacgctttgaaaatctgaagtcactttgtctagaaatgtcattagttatgactgagtttggccacagcgtctcatttgttactcagcaattgggacgccccaagatggatgcttttgtagttttcatttttttgtcttgttttttagttttctgagggtatagaaagtcgctacacctcaatcccgggacttaccttttcttcccctgcaattttcttagtccttagtatagagtttcttatttggttggcagaattcggtattctttttatatttttcctgtttggcaaggccacaaccctacagataaccaaacggcaactagttggcttctaggcatcacctgcgtttttgtctggcctaaaggccacaacactcaaggagggtagaatggtgaaataatttatgatgcctccatacaacaggaatgataaatatgacttacctttcaagggaaatatttcaaaaacatattgtgaaatgagaaaatagtgcaaactacttttgtccggggcgagggggttgtttgtttgatttttgagacagggtctcgctctgtcacccaggctggagtgcagtggcgccatcatagctcactgcagcctccacctcctggrttcaagccatcctcctgcctcagcctcccaagtacctgggaccacaggcatgtgccaccacacctggctgatttttgtattttgggtacagatggggttttaccatgttgcccaggctggtttcaaactcctgagctcaagccagccatctacccacctcggcctcccaaagtgctgggattacagacatgagccaccacgtccagcctagtacttaatattgagtatggcaaaatactgagacttaattgaagtccagtgtgaaacaacaatagaagctattccagcctcgtttggagtacactactatcgatttatttacttatttattatttacgctatttagaccctcagactctaatgcatcctctatcagagaaatacaattcacatttttttatcatcctctaggaagtatacatatttgcagttttgcctgttgtatttggtagtagtctccagataattcgtatattctaaacggttgcataaacagtgcaaatgctggccaaagggcctttgcccaaggctaaagtttctttgggttccaggaagttcggcagatttcagttcattgtaaacttgccaagggatccgcccacagacacgagagagctgctttgggacagtgaattactcttcttttgagacggtctaatgatgcctgggtggtgccttcgtaggatggtcgtcacacctgaaagggggtccctcatgctttactgccctgttctgtccctcttctggcatcatctcccatggagaaaagaatgtgttgaagccaagaagatgctccccccgcaagaatatcatctctgctagaacaggggtaaggaatttaactctgtgatatttaagagtatttatatcttcctaatgcagggcatcgaatgtgggcactatggacattttgggccagacagttctttgctgtggaggctgtcctgtacactgtaggatgttcagtagaatccctagcccctactcactagatgccagtaataccctgtccctccctgccaggctgggataaccaaaaataattccagacgttgccaaatcactcccagttaagaatcactgtttttatttatttatgtatttattttgatatggagtctcactctgtcaccaggctggagtgcagtggtgcaatctcagctcactgcaacctccgcctgctgggttcaagtgattctcctgcctcagcctcccgagtagctgggactacaggcgtgcacaccatgcctggctaagtttttgtatttttagtagagatggggtttcaccatgttggccaggctggtctcgaactcctgacctcaagtgatctgccagcctcrgcctcccaaagtgctgggattacaggtgtgagccaccacacccggccaagaaccactgtttagaacaccacttgagtacccggatcctggaatttcctgcccaaagagccctgagcctgtgtataggatcctgaacaggccacacagggactgtcccttgttgagtacactgctagccttgaacgtaggccctgcccagtgccacaaggagcaggggtggggaaaggaggaaaggccaggggcgggcaggcagccagctctccactgctacccttctacgtagaactgaaagaagtccaagaattccacatttcaacctgccttccaggtctttatgaaggtatatttgttaagacagkatgatagagccttggttgtttggaaccctggaacgtgggttgaatctggcacatgtaattagccgggcatggtggtacacccctgtagtccaagctacttgggaggctgaggtaggaggatcgcgtgggcccaggaggttgaggctgcagtgagttgtgatcgcaccattgcactccagcctgggcaacagaatgaaatcctgtctcaacaataatcatcatcatcatcgtggagtatctaacttaaataaaataaaatagggaaatcagatgagagggacctttgcacttgaaccccagggtttaaagaagcagaacaggcaaaccctgtcagaaagaagaaaagagagtgagagagaaagagaaagaaagagaaagagagaaagaaaaagaaagagaaagaagaaggaaggagggagggagggaagaaagggaggagggaaggagggaaggaattagagaaagaggagaatgtggcacatgtagacagttcaactttgtcaggaatggtgaggaggaatagatgccttaaatcagatggcggcacgtgcagatgactaaaccgcttgtaatgtgtcatttcagccttcctgagagtgaaaattcatgtttggggacctctgtggttaaaaggtgggcaaaaaggtagaccagaaatttttttttttttagatggagtgttgctctgtcgcccgggctggagtgcggtggtgcagtcttgactcactacagmctcaccccgctgggcttaggcaattctccaacctcagcctcccaagtagctgggactgcagtttcaataattctctctagacctcagctgcaaatcaaaggcactgggcctagatgcagtgtttatcaaccctggctgcacaatagaatcacctgggcagttgaaaactaaaacaaaaaatactgtgcttaggcccaattatattaaaaccttaaaattgtatatctttatactgtaaatacacatttcattgctgtaagagtcataagaaaccctcaatggttatcgatggaagtaggctgcttatctgtgtacttttcatcacgagaaaaataaacctttatttggttaaatagcgtaaccacatttgttacatgcagtcaaaagcaatttctaactgacagagaggagaagccaccagaggggtgtccacagggagtcagaatggtctctggaatagctcagtgggtggactgagagcagatggggtgagactcaaggcagagaggccatttgggagacaggataagagcccacctaaggccatcactggaagaaagctgggagatcacggaaatgcaaccacaagtccagccacccattagaggtgcatggtgagagagggaaggtaagggcagcccccaggtttctagcccccttggtgctgtttaccaaggaaagcaggttcaaggacaaagggcttaattcaggacagggtgcatctgaagtgcctgaagaacctataagtgccaggctggaatcatcctcttggatatgggtctaagcctcaggatcattcttaagtctggactccatctcagaattaacacacagcctattcaacgttcttgttttattttgttctgtttttttgacacaagatctcactctgtcactcaggctggagtgtaacggcatgatctcggctcactgcaccctcgacttcctggattcaggtgatcccctcacctcagcctccctagtagctggtgtgtccggaattggtgggttcttggtctcactgacttcaagaatgaagccgtggaccctcgcggtgagtgttacagttcttaaaggtggcgtgtccggagtttgttccttctgatgttcagatgtgttyggagtttcttccttctggtgggtttgtggtctcgctggmtcaggagtgaagctgcagaccttcgcggtgagtgttacagctcttaaggcagcgcgtctcaagttgttcattcctcccggggggttcgtggtctcattggcttcagcagtgaagctgcagaccttcgtggtgagtgttacagctcataaaggcmgtgtggacccaaagagtgagcagcagcaagatttattgcaaagaaagacaaagcttccacagtatggaaggggacccaagcagcttgccactgctggctcaggcagcctgcttttattcttttatctggccccacccacatcctgctgattggtagagccgagtggtctgttttgacagggcgctgattggtgtgtttacaatccctgagctagacacaaaggttctccacctccccaccagagtagctagatacagagtgtcgattcgtgcattcacaaaccctgagctagacacagggtgccgattggtgcatttacaatcccttagctagacataaaggttctgcaggtccccactaaactcaggagcccagctggcgtcacccagtggatcccgcacctgggctgcaggtggagctgcctgccactcccatgccgtgcacccgcactcctcagcccttgggtcgtcgatgggactgggcgccgtagagcagggggcggtgcttgtcggggaggctccggcagcacagcagcccacagagagggggaggctcaggcatggcgggctgcaggtcccgagccatgccccgcagggaggcagctaaggccggtgagaaatcgagcccagtgccggtgggcggcactgctctgagtacagggcctccacagccgctggccctggtgctaagcccctcattgcatggggccggcagggcctgccggctgctccgagtgcgggcccgccaagcccacgcacacctggagctccagctggcccggaagtgcccgcacagcccctgttcccgctcatgcctctccctccacacctccttgcaagctgagggagcyagctccggccttggccagcccagaaaggggctcccacagtgcagcggtgggctgaagggctcctcaagtgctgccaaagtgggagcccaggcagaggaggtgccgagagcgagtgaggcctctgaggactgccagcatgctgtcacctctcactgggactacaggtgagcacccacacacccggctaattttttttttattttttggtagagatggggtctccctatgttgcccaagctcatttagaactcctgggctcaagcaatccacctgcctcagcctccccaagtgctaggattataggcatgagctaccgcccccagcctcaaagttgttttttaaaaatgtaattatctattccctttaaggcacataattttcttaatgaacctctaccctactaggtgggtaggagttgggtgagacttaaacttgaaatgataatgcctaaagtttgtgcggtttaaaccccaggggtccccatcacctgggccatattggcttcaaattggctatatttgaagaattgtcttgggccacacataaaatacgttaacactaatgatagctggtgagctaaaaaaaaaaaaaaaaaaaaaaaaatcgcaaaggcaatctcacattttaagaaagtttatgaatttgcattgggctgcacccaaagccttcctgggccacaggcaccataggctgcgggttggacaagcttggtttataggcctcatatgtggtggggctgctgttttaaaagtctcatcagtgcagattttacttattgcatgaagattggtatttaagttgagatgaaggrtagtatattttgtttgagatcattacacttgtgaagagttaattgagttgcatgtttttcacgtattatttagtcatacctttatcatgacaggatgattctgcttcacaacttctttctgtttttaaggaaaggggctgggcatggtggttcaaccctataatcccagcacttttggaggcggagacgggcagatcacttcagcccaggagtttgagaccagcctgggcaacatggtgaaaccccgactctacaaaaaatacaaaaactagctgggcatggtggcacacacctatagtctcagctacccaggagactgaggtggcagaattgcttgaactcaggtggcagaggttgcagtgagcagagatcgcacctctgcactccagcctgggcaacagagtgagaccctgcctaaaaaaaaaaaaaaaaaaaaagaggcattggtttattgttattgttcttttaaaaaaaattgctgctccacaacctgggaggtttggtttgttttttttttttaacagttttattaagatacaatttacataccatacaattcaccctttgtaagcatgcactttaatgatttttaaagtaaatttatgtagttgacagctaccagcacaatgcagttttaaaacatttccatcagcccaatttacctcatggtagtttttgcttaatcccttctcccaccccaagctgcaggcaaccactgacctgctttctgtcaataaatttgccctttctggacatttcatgtaaatagtatcatacaatacactgtcttttgcatctggcctattgtacttagcatgatgttttagagctcagttcacgttatagcacttatctgtaatttgtgcctttctatatgtgaatactattctgttacatggatagactgtatctgagatcgtttttccgctcataagctgagggacatttggatgtattatgggttgaattgtgccccatccccaaatacatatgttaaagttttatttttttggacggagtctcgctctgtcacccaggctggagtgcagtggcgkgatctcggctcactgcaagctctgcctcccaggttcatgccattctcctgcctcagcctcccaagtagctgggatgcccgccaccacgcccggctaattttttgtatttttaatagagactgggtttcaccatgttagccaggatggtctcgatctcctgaccttgtgatccgcctgcctcggccttccaaactgctgggattacaggcatgagccaccacgcccagccctgaagttttaacccccaataacttggaaggtgaccatgtttggaaatggggttttgcagatgtaattagttaagataaggtcatactggagtaggatgaacccctaagtccagcatgactggtgtccttacaaaagaggaaatttggacataagcacacagggagaacacccccatgtgaatataaaggcagagataggtgtggtgcttctacaagccaaagaacaccagatattgtcagcaaaccccaaaaagctaggggagaggcatggagcagattcttcacagcctcagaaggaaccagccttgctgataccttcatctctcctagcctctggaactatgagacaatgtctgttatataagccactcagtttgtggtagttgtttttctggtttgtttgtttttctgagacagagtctctctctgtcagccaggctggagtgcaatggcacgatctcggctcactgcaacctccacctcccgagttcaagcaattctcctgccttagcctcccaagtagctgggattacaggtacctgccactacacccggctcattttttgtgttttcagtagagacagggttttgccatcatggccaggctggtctcaatctcctgacctcaggtgatccacctcctcggcttcccaaagtgctgagattacaggtatgagccaccgcatccagccgtgtgcatggtagtttgttacaacagccttagacaggcatacaggagtatttccagttcttgaatattatgaataatgctgctgtaaacactggcattcatgcctctgaacacatatggttttatttctctttggttttttaacttttgtttaacttttttaaaaaactgccaattagcttttccaagtgtctacatcactttacatttccatcagcaacgtatgatggttccattttctccccatcctcaccaacacttggtattgtttttcttttttgattacagccattctaatgaacgtatagtagtatttcattgtaaccgtaatttgcatttttctaatgactaatgatgttgagcaccttatcataatgctgattagcaatttgtatatcttctttaatgaaatgtccacttcagtcttttttcatctttatggccttataacactgtctgggacccccagggcagtgttgaatagaagtagcaagaactgacattttgcattgttcctgacatttcagggaaatgttcagtcttttactgttaagtatgatgttaactgtgggtgtttcatagatgcactttatccaggttgaggaagttcccatctattcctagtttgttgagagtttttaacatgaaagagtgttagattttgttagaaggtatttctgcatctattattgagaggatcatgtagtttttgtcctttgttctatcagtatagtatattacactggtcaagtttcagacgttaaccaaccttgaattcctataataaatcccacttgttcagagtatataatcctttatatatgttgcagaatttggtgtattaatattttgttaagggatattattctgtaattttattttctggtaataaaaatgtctttattaactgttctcactgaatgagttgagactcattggacatatatcaattaggtcacataggttaataatgttttctaactctttaatatccttgctgatttattgtctaattttttcatcaattagaatagaatattgatatcctcaactattgttgttgaactgtccatatcttcttatatctcttttaattctgccagttttgtttcatgtttttgaggctttattagcgatgtacatatttatgacttgtacattcctgacatattgactcttttatcattactaaatgttcctcgttgtctccagtaatatttcttgacttaaagtttatgttagctgatagccacataactaatgactgcaactctcttatggttacttttttttttttttttttgagacacggtctcactctgtctctgtcacccaggctgtagtgcagtggcccaattacggctcactgcagccttgatctctgaggctcaaggatcttcgcacctcagtctctgagtagctgggactacaggcacgtaccaacaggccctaatttttgtattttttgtagagatggggttttgctgtattgcccaggttgatcttaaactcctgagctcaagcagtcctcccaccttggcctcccaaagtgctaggattttagatgcatgtgctgccatgtccagcctactattttcatagcatatctttttccatgtttttactttccacctatttgtgtctttgaacctaaggtgtaactcttgcagrctgcctatagttagattttgccttttttatccaatccaaatatcttgttttttattggaatgtttagaccattcacatttaatgtaattaataagtttggatttacatttaccatttgctatttgttttcttttgttgttgcttaatttacttttcttttttttttttattttttattattttagaagcagggtctcattctatagcccaggctaaagtgcagtgacgtgatcacagctcactgcagcctcgaactcctgggctcaagagatcttcccatcttagcctcccaagtagctaggactacaggcaaacaccactacaccccactaatttttctttgtataattttatagagatggggtctcattatgttgcccagtctggtcttgaattcctgagctcaagcaatcttctcacctcagcctcccaaaatactagcattgcaggcatgagccaccatacccaacctgctatttgttttccatatgtctcctatttttgtttctctgcccctctttcactgatttctgtgttacatattttttagtacagcatttaaattctttttttaactatttaaaaattttcttagtcattgcagtatggattacaatatgtattttttaataagagccatctcaaagtaattttttcagctttattgaggtataattgacaaaactatatatttaaggggtacaacttgatattttgataacaatatgcatcttatctaaatatagttcagattattactaatttaattcagataaaacatagaaattttgctttaataaagctcaattctcttccctcttttttgtattatcatatgtattacatttatacatgctataaacccaacaatacaatgttataattattgctttacacaatattatgccttttttaaaaggtaacagaagaaatgagaaaaatatatttatggagtcttttctatcagcccacatatttaacaattccaatggttttctttttttcttttctttttttttttttttggtgacggagtctcrctctgtcgcccaggctggagtgcagtggcgtgatcttggctcactgcaacctctgcctcctggattcaagcaattctcctgccccagcttcccgagtagctgggactacaggcatgcaccaccacgcctagctaatttttgtatttttagagagatgggatttcaccatgttggccaggatagtctcgatctcttgacctcatgatccaccgacctcggcctcccaaagtgctgggattacaggtgtgagccaccacgcccggcctatttttgtcctgtgcattaaagttgctctctgatgttgctttctttcactctaaaggacttcctatggcgtttcttgaaaggcaaaactgttgtcacttccactgacagtgccataggtgtgggcatcacctgctacagcaaatccagtaagccccctccaacctggcagcaccactgcaggtcctcatgcctggtcctgccctggcagaacctccacacccactcggctagaggagatgggagcagtcctaggaaagaacgcttcagacatccactgttcttacccaacgttcagcatgttatcaagcttaaacacttctcagattgttgtatgagttttattgatttccagagcaccaaaatagttgttcttgtcaattttgttcagacttatagttgctttctggggagaggatttgctgacttttcacatggctgtagctggaaatacgcttccacccccagtgtttctgattcattagacccggggtgcaactggagaatttgcatagcccaaaaaagaagtgtgttacagttcctcccccactctctctcttgctcctgctttcaccatgtgaaatgcctgctcccacattgccttctgccatgaataaaagctccctgaggccccccccatgaagctgagtgatgttggtgccatgcttgtacagcctgcagaaccgggagccaattaaacttcttttctttataaatttcccagtctcaggtatttctttttttttttttttttttgagatggagtctcactctgtcgcccaggctggagtgcagtggtgctatctcggctcactgcaagctccacctccaggattcaaacccattctcctgccttagcctcccgagtagctgagactactggctcccgccaccacgcccagctaattttttgtatttttagtagagacagggtttcaccgtgttagccaggatggtctcaatctcctgacctcgtgatccacccacctcagcctcccaaagtgctgggattagaagtgtgagccactgtgcccggcctttttttttttttttttttttttttttttgagatggagtttcactcttgttgcccaggctggagtgcaatggtgcgatcttggctcactgcagcctccacctcccggattcaagggattttcctgcctcagcctcccaggtagttgggactacagggacgtgccaccaggcccagctaatttttttgtttcttcactagagacggggttttgccatgttggccaggctggtctcaaacgmctgacctcaggtgatccacccacctcggcctcccaaagtgctaggattacaggcatgagccactgtgcccagctggaaactcccatttttaaaaccaccagatctcatgagacttattcaggatcacaagaacaacatgggaaagacccgcccccacacctcccaccaggtttctcccatgatacgtgggaattgtgggagtcgcaattcaaggtgagatttgggtggggacacagccaaaccatatcagcctctgtcttgttcctcctcttctggtctggtttcttgttcctgtccatcattcacagagccacgtgaagttttaccactgccactgccatcatgaggacacccaattccatgccaagggtgctacctccagataccccctatttctctggtactggagcagggctgggtttcatgctgaggtagagagttatagccttcccccaaatccctgccacagttccctgggccccaagttgggtacagtatttcaaaggtcatgccagtaggatttgccaatggttaagacgttgaatgcaagaggacaagagtccaggataactccaaggtgttggttcaatagaaggagttgttgttaattaatatggccaaggaggctgccagtggagcagatgtgaggaagaagaccagtagtttcattttggacacagttaagttcatgatgtctcttagctatctgagataagaaaggtaatgatggatggacctccccttttaacttacacacagttaccgtagtcaaagagcagaaccgaaatgtcaggatgattttccagttcgctggcactattcattgcctccccaccagccctcttccctttcttccactctgatagacctgattttgttctagtgtctatccttccttatgtggccagcggaaatttcagttgtctaaaccagccatggtcattcattctgcttatcartgatgagtttaggggtgagctgaagacccccacccaattctggtattgacccagagggaaactcagttggaaacttctgggatatgttcttttccttttaaaaaagatayacaggccgggtgcggtggctcatgcctgtactcccagcactttggaaggccgaggcagacgaatcacgaggtcaggagttcgagaccagcctggccaacatggtgaaaccccgtctctattaaaaatacaaaaaattagctgagggtggtagcaggcacctgtaatcccagctactcagggggctaaggcaggagaattgcttgaactgcagtgagccaagatcatgccactgcactccagcccgggcaacagtgtgagactctgtctcaaaaaaaaaaaaagccaggcatggtggcacacccctgtaatcccagctactcgggaggctgaggtggaagaattgcttgaacctgggaggtggaggctgcagtgagccaagatcgtgcyactgcactccagcctgggtgacagagtgagaccctgtctcaaaaaacaaacaacaaaaaaaatgatatataaggtcgggcatggtggctcatgcctgtaatcccagcactttggaagtccgaggcaggcggatcacctgaggccaggagttcgagaccagcctggccaacatggcagaaccgtgtctccattaaaacatacaaaagttagctgggcatggtggcgggcacctgtagtcccagctactcgggaagctgaggcaggaagaacacttgaacccgggagacagaggttgcagtgagccgagatcccatcactgcactccagcctgggtgacagagcaaggctccgtctcaaaaaacaaacaaacaaaaaagatacacaaaaagaaaacttgatctcgctgcttctcctggacatctagagcaatcatcttgcagacgtaatgagagttagactgcataaaacaagccaaaagtggtagagctaacagacatcatcttccagtccatgtatttgttaacacgaagccacactttctctggatttcttcttctgcgagataatacacctcagcattggtgaagccattttgagatggagtttcttcacttgtgggggagggggccgaggggaaggattatcccgaacatttaactagataaactgaagaggaaaccactgaaagttccgggcagtagattaggatacccaacctattactggcaagaccaggacagtgccagcagcaggacaatgtgcagtgcaagggactgacttggtgtatgacttgagttagaagctgcttattttggcacaggtctctcctttttctttgccagaaagggcaggaattgcaactgcacctgtggtccttatcactaatgacttcctctatgttcttccttcacgcacaagacttttcctgggtactgagagtcaaagtccatgaattgctttctccttattgcattttgtacttacaagcccttgttatcaggccagacagatattgttatccctatttataaactggatattttattttattttatttttgagacggagtctcactctgtcgcccaggctggagtacagtggcgtgatctcggctgactgcaagctccgcctcccgggttcacaccattctcttgcctcagcctcccgagtagctgggactactcgggagtgctcaccaccacgcccggctaattttttgtattttttagtagagacagggtttcactgtgttagccaggatggtttcgatctcctgacctcatgatccacccgcctcggccctccaaagtgctggtattacaggcgtgagccaccacgcccggcctaaactggatattttaattaaggactcagggagggaagtgatcacaacctagaaatgggaaaaacccagacttgaaccgaggttttctgagttcaaggccagcactctcatccccacatggcattcattttagaatttaaaaatggcatctaatcattgttcttacttgattattctaattttgcatattaagtacagtatgagtaaactatcattaagactctcatgcatcttgattcaacagaatgtatgctaagtacccaggccttctagggtatgcttgcttatcttattttctctttttttttttttttttttttttttggagamagggtyttgctgtgttgcccaggctggagtgcagtggcacaattacagctcactgcagcctccctctcccaggctcaagagatcctcccacctyagcctctggagtagctgggactacaggtatgtgccaccacgtctgaaaaaaagtacttttgtacttttttgtagagatggggtttcaccatgttgcccaggctggttttcttatattcataaaaataaaaactcttcttcctatgctacttgatcgggactctcttcctcttccagttttcttacaacatgtgctttgagttaatcttttagtgctatatagaacaaggctcagaatcacatttactttattttatttattcatttatttattttcaagacggagtttcgctcttgttgcccaggctggagtacaatggtgccatcttggctcactgcaacctccacctcccaagttgaagcaattctcttgcctcagcatcctgaatagctgggactacaggcacacgccaccacatcaggctaatttttgtatttttagtagagatggggtttcaccatgttggccaggctggtcttgaactcctgaccttaggtgatccgcctggctcagcttcacaaactgctgggattacaggcgtgagccatatttacttatttattttttgagacaaggtctcactctgtcccccaagctggagtacagtggcacgatcacactcattgcaaccccagcctctcaggctcaagcaatcctacctgttcagcctcctgagcagctgagactacagatgcatgccaccatgcctggctagtttttgtagagatggggtttcacgatgttgcccaggctggtatcaaacccctgagcttaagcaatactcctgcctccgcctcccaaagtgctaggattacaggcatgagccaccacacccagcccttaaattgtactttattttcatgaaataaattattttcacatagttcagaaaccaaaacataaaagagaataggctgggcacggtggctcatgcctgtaatcccagcactctgggaggccaaggtgagcggatcacccgaggtcaggagtttgagaccagcctggccaacatagtgaaacccccgtctctagtaaaaatacaaaaatcagcctggcgtggtgtgggcttgtaattccaactacttggagtctgaggcaggagaatctccggaacccaggaagcagaggtgagccgagattgcaccactggactccagcctgagcaacagggcaaagactgcgtctcaaaaaaaaaaacgaaaaaaagggaatagatgggaggttttcacttccatctttagtcacgtgtatgtaccactatttatttatttatttatttgagacagagtctcactgtcgtccaggctggagcacagtggcacaatcttggctcactgcaacctccacctgggttcaagcgattctcctgcctcagtctccagagtagctgggactacaggcacgtgccaccatgcccagctaatttttgtatttttagtagagatgaggtttcaccacattgggcaggctggtctcgaactcctgcctcaagcagtccacccacctcggcctcccaaagtgctgagattacaggtgtgagccaccacacctggcctgtaccactatttattgaactaacccttattacaatatttttttggggctgccataacaaattaccacaaattgggtggcttaaaacaacagaaatttattttcccacagttctagagggcggatttgcaaaatcaaggtctcagtggggctgcagtctctctaacagctctagaaatgaatcctcccttgcctcttctagcttctggtggctcctggtgttcgttggcttatggccccatcacaccaatctctgccaatgtggtcacatggtcttcctctctatatgtgtcttgtttctgtgtgtcctctcctcttcttccaaggacacccatcattgggtttaggatcaactctaatcccgtattgtggtaggagttattaagaaattattttaggcagatagagaggaaaaggggtccttgggaagttttcatttttaaagctgttccagaaaggtttcttgtcaagcccaggctcttagagccaggccagcaacctttgatatgcacatgctggccattagaaactgggtctacccaaacatgacaattcccaccctcttcttcttgcccttgccccacaagtgcctggcaaacatggccgcccccacgtatccccacgtgtgtagaacatcatggtgctctgcatttgcatattaaaaggctagggtgggtggaccagctttttcccgggctgcgtgaatgacatgcctggtcaaaccaatcccctgagccctgtgcaaatcagacaccgcctcctccagcctctatataaacttagctggttttcactccacttggtgtctactctttcrgctttggagcctctctgcctcttgtctctgtacgagggagcttcttccttctgccttctcccttcttgcctattaaacttgcctattaaaaccactccacggccgggcgcggtggctcacgcctgtaatcccagcactttgggaggccgaggygggcggatcacgaggtcaggagatcgagaccatcctggctaacacggtgaaaccccgtctctactaaaaatacaaaaaattagccgggcgaggtggcggkcgcctstagtcccagctactcgggaggctgaggcaggagaatggcgtgaaccccagggggcggagcctgcagtgagccgagattgcgccactgcactccagcctgggcgacagcgagactccgtctcaaaaaaaaaacaaaacaaaaaaaaacaacaaaaaaaaaaccactccacttgtgtccatgttgttttatctaaaccggcatgaggaccaagaacccttgtgttcctccactcatcggagccatatcaatatgccctcatcttaactcaagggtccccaatccctgggctgcagaccagtaccagtctgtggactgctaggaaccgggccacatggcaggaggtgagtggtgacaagtattaccacctgaactccgcctcctgtcaaatcagtggcagcattagattctcatatcagtccctggtgcaaaaaaggttggggaccattgtcttaactaatcacatctgcacagactgtatttccaagtaaggtcacattcgcaagtatgccatggattaggacttaaacttatctttttaggggacacaattcaacatatcacacctatggatggacttgtagatgttttcaattatttgctattagaacagatgtgtattttctatggacatgtatatattcttatggacttgtggaatgcttctsagatacaaattgctcaaagtatatatgccagctcacaagttgttgccaaattgtgtttcaaaatggttgtgcttacagcctggccaacatgacaaaacygcatctctactaaaaaatacaaaaattagcggggcttggtggcgcaccgctgtaatctcagctactcgggaggctgaggcacaagagtcacttgaacccaggaggcggaggttgcagtgagccgagatcacgccactgcactccagcctgggagacagagtgagatcttgtctcaaaatatataaaaataataaaatgaatttaaaaaacaaaatggttgtgcttaattccattcctactctgtttatttccctacagcctcaccaaaccataataccagtctctttacctaccaatctgagaggtgaaaaagaaaacctcattttaaatttctacttatttgattattcatgctaatgagtacatgttcatgtgttcattggctttgtgtaagtctgtgaaatgctagctgtttcttattccctgttgaggtgctggtctatattttatttaatctattttagacatttcaagggctttttgtaaggtcataatctttttattgttgttgttcttttattgaaaggaacttgatcttttatataaacttaaagcaacagattgtgtgaaattacatatctacaatgtaaggctattagctatgtgagtatgggaagtgtttaataagattatgatacttgtgatgggtacaatttatgaacagagagagagagagagaagtgtaaatagttacaccagaaacaagatgtgattgaaagaatgtcagtgagtgggaccttatatgaatctgtgagaaggtaaaaaaaaaaaatccatttcctagccaggcacggtggctcacaccttccaaaatagtccagcactttgggaggccgaggcaggtggatcacttgaggtcaggagttctagacctacttggccaacatggtgaaacactgtctctactaaaaatacaaaaattagccaggcatgatgatggtcacctgtaatcccagctacttgggaggctgaagcaggagaatcacttgaacctaggagactgaggttgcagtgagccaagattgtgccactgcactctagcctgggcaacaaagcaataacttgtctcaaaaaaaaatccctttccttcattttatttactttattttattttttgagacagagtctcactctgttgctcaggctggagtacagtagcacgatcttggctcactgcaccttccacctctcaggttcaagtgattcttctgtctcagcctcccgagtagctgggactacaggcacgtgccaccacgcccatctagtttttgtatttttagtagagatggggtttcaccatatgggtcaggttggtcttgaactcctgacctcgtgatctgcctgcctcagcctcccaaagtgctgggattacaggcgtgagccaccacaccggctattttattttatttgagactgagtctcaccctgtcacccaggctggagtgcagtggtgcgatctcggctcactgcaacctctgcctcccaggttcaaatgattctcctgcctcagcctcccaagtagctgggactacaggcacacaccaccatgccagataatttttgtacttttttagcagagacggagcttcacagtgttggccaggctggtctcgaactcctgacctcaaatgatctgtccacctaggcctcctaaagtcttgggattagaggtgtgagctaccttacctggccccttttcttcattttaaatgaggacctccagttaagatatcaaactggtggtaaatattcaacagactgtgtgcccatcctgactttcttttttcaacacagagccatttagtttataattaaaaatagtgagggggtggccaggcgcggtggctcacacctgtaatcccagcactttgggaggctggggcaggcagatcatttgaggtcaagagttcaagaccagtctggccaacatagtaaaaccctgtctctactaaaaatacaaaaactagccagacgtggtggcaggcacctgtagtcccagctacttgggaggctgacgcaggagaattgcttgaacgtgggaggcggaggttgcggtgagccaagattgcaccactgtactccaccctggacaacagaacaagactctgtttcaaaaataaaagtaaaaataaatagtgagggagcaattccacttctgggtatatacctacaaggattgaaagtaggacatgagtagatatgtgtatacctgtgttcatagcagcagtattcacaataaccaaaaggtgtaagcaacccaagtttctattgtccgatgaatgaataagtaaaatgtagagtatctattcaacagaatattatttattcttaaaacagaaggaaattttgaaacatgctacatcactgataaactttgaagaccttatgttaagcaatatgtgccagacaaaaaagaacaaatagtccaggtgaggtggctcatgcctataatcccagcattttgggaggccaaggcaggaggattgcttgaaaccaggagtttggaaacaacgtggccaacataatgagatcctgtctctacaaaaaaaattaattagccatgcaaggtaatgcatgcctgtagttccagctacttgggaggctgaggcaagagaattgcttgagcccaggaggtcaaggctgcagggggctatgaccatgccactgaactccagtctgggcaacagagtgagatccatctctacaatacaataaaattaaatgacaaatatcatatgatttcacttatatgagataaacagattagtcaaatccatagagacaaagagtggaatggtggctgacaggtgctaaggcaagggagggatgaagagttatcatttaatgggtatagagttttagatttacaggatgaaaagaagtctggagactggttcaacaacaatatgaaatacttaatgctactgaattatacacttaaaaatggtcaagaagtgcctggtgtggtgattcatgcctgtaattccagcactttgagaggtcagggcaggaggatcacttgagcccaggagtttgagaccagcctgggcaacaaagcaagaccctgtgtctacgaaaaataaaataattagcgggacattgtggcctgtgcctgtagtcccagctaatctggaggctgagatgggaggatcccttttgcccaggcattcgaggcttcattgaactattatcacaccactgcattgaagtcttggccacagagtaagccctatctgtaaataataataatattaataataataaataataaatggttaagaggagaatgtataaggacatgtacaagggagcccctataagactataagttgatttctcagtggaaactttgtaggccagaagggaatagggtaatataatcaaagtactgaaaggaaaaaaaaaacttgtcaactaagaatactatgcctggcaaaatactccttccaaaatgaaggagaaatgaagttttcccacgaaaaacaaaagctaaaagattttattaccactaaacttgccgtacaaaaaaatgctaaagggagttcttcaagttgaaacaaaaggatgctaaaacagcaaaacagttgcataagaaaatataaaacttactggtaaaggtaaatacaaagacaaatacagaatactgcaatactgttatggttgtgggtaaatcacttttgattctagtataaaagttaaaagacaaaagcattataaatacctatagttaaaggatacattaatagatacataagataagtacatgtaaattatgacaacataaagcgtgtgtagggggtaataaaagtattatgttttgtatacaattgaacttaagttgttatcagcttaaaatagactgttctaaccataagattgtttttgtaaaccccatgatgatgacaaagaaaatatctgtaaaaattacacaaaagaaaaagaggaaggaataaaagcatatcaatacaaaaaaaaaaaaaaacaaaacaaaaaggaagacagcaagagaggaacagatggacaaaagaattataagactaacacaaaccaattaataaggctgggcatggtggctcatgcctgtaatcccaacactttgggaggcgaaggtaggcagatcacctgaggtcaggagtttgataccagccaggccaacatggtgaaaccccatctctactaaaaatacaaaaattagccagacgtgctcacttgaacccatgaggcagaggttgcagtgagctgagatcgtgccaccacactccagcctgggcgacagagcaagactctgtctcaaaaaaacaaaagcaaaaacaaaaaacaataaaatggctgtagtaaattcttccctataaataattactttaaatgtaaattgattaaaccccctaatcaaaagatatagaatggctgagtggataaaaaaacaagactacatgctgtctataagaaactcactttagatttaaggacacacatagagcaatgtgtgtccttaaacatattccatgcaactggtaaacgagtgcagaagtggttatacttggatcagacaaaatagagttaaaatttaaaactgtcataagagacaaggaaggacattatataatgataaaacggccaattcactaggaagacataacaattataaatattcactcaacatcagaacacctaaatatgtaaagcaaatgctgatagaactaaagagagaaagcaatacgataatatctgagcctctggctactttgtaaaaaggaaaaaaaaaagcaatacaattacagtaacagacttcaataccccactttcaatagtggatagaacatccagatagactattgataaggaaacaaatgatttgaacactgtacactaaatggacctgacagacatacagagaacattccacccaacagcagcagaatccacatccttttcaagtgcatgtggaatattctccagagtaaattgtagtgttaggccactgccttcatccatgttgtgctgctgtatgagaatagctgaggatggataatttgtaaagaatagacattgattactmacaactctgaaggctgggaagtgaaagatcaaggtgctggggtgctgcgaagtttggctgcatccttcagaggggaagaacgctgctcctcacatggcaaaagtgcagaagatgatgaacccactccaaatcgcttgttcaagtgcagcattaatccactcacaaggataaagccctcatgacctaaacacctcccattaggcctcccttcccaaaactgttgcattggtgattaaatctccaacatataagtttaggaggggacaaacattcaaaccataacagtcacgaacaagtcctaacaagtttaagaagactgaagtcataccaagtatcttttctgaccacagtgaaataaaactagaagccaatagcagaaaaaaacagctctgaggccaggcatggtggctcaggcctgtaatcccagcactttgggaggccaaagcaggaggatcacttgagctcaggagttcaagaccagcctgggcaacaaagtgaggtctcatctctactaaaaaaaaaaaaaaggaagaaaagaaaatcaagaaaattagccaggtgtggtggcatatgctgatagtcccagctgctctggaggctgaggcaagaggatcgcttgagcctggaggactgaggcttcagtgagccataattgcaccactgcactccagcctgggacagcaagactctgtctcaaaaaaaaaaaaaaaaaaaaaaggtaaatcaaaaaaaatcttaagatgaatagaaatggaaattctacataccagctgggtgcagtggctcacacctgtaatcccagcactttgggaggccaagacagaaggattatgtgagcccaggagtcttagaacagcctgggcaagatagtgagaccccttctgtacagaaacaaactaactaacaaaaaattagccaggcattgtggcaaatacctgtagtcccagctacttgggaggctgaggcagtaagatttatagagccagggagatcaaggatgcagtgagctatgattgcaccactgygctccagcctgggcaacagagtgagactccatctctgaaaaaactaaattaaattaaaaataaaaatactacataccaaaacttatgggttgaatcaaaagcagtactaacggggaagtttatagcaatgaatgcctatattaaaaagaggaaacatctcaaacaaccaaactttacatctcaaaaaactagaagaagtggcgtgaacctgggaagcagagcttgcagtgagccgagatcgcgccactgcattccagcctgggtgagagagcgagactccatctcaaaaaaaaaaaaaaccactagaagaagaagaacaaactatgcccaaagttaacagaagaaatgaaataataaaaattagaggagaaatcgacaatatagagaataaaaaatagaaaaaaattggccaggcgcagtggctcacacctgtaatcccagcactttgggaggctgaggcgggcaggtcacaaaggctgaggtgggagtatcgcttgagcycaggagttcaagaccagcctaggcaacatagcaagaccccgttcaatatttaggaacaaatttaactaaggggtgaaacacttataaacagaaaactacaaaacattgataaatgaaattgaagaagatccaaataaatggaaagacttcccatggtcatggattagaaaacttaatgttgttaaaatgtccaatgctacccaaagtcatctacagattgaatgcattccctatcaaaactgcaatggcattttttacagaattaaaaaaaaaaaagcaattctaaaattcatgtgaggccaaaaaagaccccaaatagccaaactaatcttgaaaatgaagagcaaagctgaaggcatcacacttcctgattacaaaatattttacaaaactacagaaatgaaaacaatatggtactggtatgaagacagccatatagaccagtggaacacaatagagagagacttaacagaatctgcaaataatggtcaactgatctttgacagggatgccaagaatacataatgacaaaagtctcctcaacagatagtgtcgggaaaactggatattcacatctaaaagaatgaaatcgcagccttaatttacactatcccaaaaatcaactaaaaatggattaaagacttaaatattagacctaaactataaaactcgtagaagaacacataggggaaatcttcatgctattagtcttggcagcgatttcatggctatgacaccaaaagcacaggccacaaaagcagaaataaataagtggttctacaccaaactaaaaaaattctgcaaagcaaaggaaataatcaacagagtaaaaaaggcaatctacagggtggagaaatgttggcagaccatacatctgataaggggataatttccaaaatacatagggactacctacaacttgatagcaaaaaaaataatgataacccaattttaaaatgggctaaagacttgaatagacagttctccaaagaagccatccaaatgcccaacagaaagacactctgtcactaattgtgtaaggctgttcttgcactactataaagaaatcctaagactgggttatatataagaaaaggggtttaattggctcacggttctggaggctgtacaggaagcatagcagtttctgcttctggggagggcccaggaagcttccaatcatggcagaagacaaagggggagcaggcacatcacaaggcaagaatgggagcaagagtgggagagattcgggggaggtgccacacaattttttttttttttgacaaggtcttgctctgtcacccaggctggagtgcagtggcacgatctcggctcactgcagccttgacttccctggctcaagcaatcttcccacctcagcctctccagtagctaggcccacaggcatgcaccaccacacccagctaatttttgtattttttgtagagattgggtttcaccatgttgcccaggctggtctcaaactcctgggctcaagagatccaccaccccagcctcccaaagccacacaaccagatcctgtgagacctcatttactattttgaagatagcaccaagccatgaaggatccacccttataacccaaacacctcccactaggccccacctccagcattggggattacaattcaacctgagatttgagtggggacaaatatccaaactatgtcactaaccatcaaagaaatgcaaatccaaaccacaatgagatatcaccttacacctgtcaggatggctattatcagacaaaagacaaaaagctctggtgaggatatgaagaaactggaatcctcttacgctgtagatgggaatgcaaaatggtgcaaccgctatgaaaaatagcatagaggttcctcaaaaaattaaagatagggccgggcgcagtggctcatgcctgtaattccagcacttcgggaggccaaggtgggcgaatcacctgaggtcaggagttccagaccagcctgaccaacatggtgaaaccccatctctactaaaaatmcaaaaaaaaaaaaaaaaaaaaaaaaaattagctgggggcatgcctgtaatcccagctactcagaaggctgaggcaraagaatcgattgaacccaggaggtgggggttgcagtgagccgagatcgtgccattgcacatcagcctgggcaacaagagtgagactccttctcaaaaaaaaaaattaattaattaattaattaaaaatagaactaccatatgacccagcaattcaacttatgggtattgatccaaaaggattgaaactggaatctccaagagttattaacactgccatattcattgcagaattattcataatagccaagatacagaaacagcccaactgtccattagcaaatgagtggataaagaaagtgtggaatacacatgcagtggaatgttattattcagccttagaaaagaagaaacttctgcaatatgggactacatggatgaactttgagacattatgctaagtgaaataagccagtcacagaagaacaaatactgcatgattccacttaaaattagtatctaaaataggccaattcatggaatacaaaagtgaaacggtagttgccaggggctggggaaagatcaatggaaagtttcttttttctttgtttttgagacagagtcttgctatctcacccaggctggagtgcagtggtgtgatcttggctcacttcaagctcaacctctcaggttcaagtgatcctcccgcctcagcctcccgagtagctgggattacaggtgygcaccaccacacctggctaatttttgtatttttagtagagatggggtttcaccatgttggccaggccagtctcaactcctgacctcaggtgatccacctgcttcagcctcccaaagtgctaggattacaggcatgagccactatgcccggcctcaatggaaagtttctaatcaacaggcataaagtgtcagttaagcaagatgaatgagccctagagacctgctgtacaacactgtacttatatttagcaatactgtattgtatacttgaaaacgtattaagagggtagctttcatgttaagtattcttaccacaataaagttattcttttttttaagtgtgccacaaattgaggagtatgattaaatctacctttggaacccgagttccaaaatgaaataaaataaatccaacataaaaattttaaatgctttaactattaaaaatactattaaggcaaattttacaagaggtaagattcagttatcatggagactaagttaagattttcagttcctagagaattttttcctccagaactgaaagctagctcacaggggtatcttttgtccatttgttttttgagacaaggtctcactctgtctcccaggctggagtgcagtggcatggtctcagctcactgcctcccagacttaaaggaacttcccacctcagtcttccaagtagctgggactacaggcgcacactaccatgcccagctaatttttgtattttttgtagagacgaggtcttgccatgttgcccaggcaggtctcgagctcctgggcttaagcgatccacccgccttggcctctcaaagtgctaggattacaggcatgagtcaccgcatctggcctttcgtcaaatttaaccttgcctgtcttgttcattattaaacctccagtccaggcatagtgccagcacagagtcaactctaataaatatttgatgaataagtccatatcaaaacaaaatgcaagctgcttccattctgtaattccgcattttgctaatgaaaggatatttgagtcatagaaatcagcaaagtaggtagtatttgttgttcattcatggagatgataggtgagaacctcagattttaggcttggccaagatctcagtctgttaaaactggacaaagatggaaagtttctaattgagtaggcatggaagccagagatgctagcaaagtccctttagggcagccagaatgacccttatgaagggcagtcataattttgatcatgtcacgttcatgctggagaaagagtgagccaactatgaaatggccactgggacaaatatggtcttakgtggtcaatctacggacccctagatttgaaagaccataacagactcttgtctgaggatgtcagctgaagcctcaaaccgagaatataagtgacaagtgacaagccgctgacatttcaaagtgaggagtaaaggcaaccccacataacttgctaagaggtggcaggaccaattctctgacctggaacccattcctttcctgcaggctgtcaaggggaaagggaggatccataggcacatcagagcaatcctttctgtgaagagtgtggttagcttgtggggaagggatgattttccaccccacccctccaactcaaggcaagtaactctgcttccaaagaagcccacctggaatgtgggtgttgcctgccagtaagggagaaaccctggatgccagggtcaagcctgaggaagtccaggagatggctagcggaaggcaggcctgcgagggggagttatgggaaggagaaggacttgtacattttatttttgctctctgttctttgtcttcttcttcttcttttgagatgaagtttcgctcttgttgcccaggctggagtgcaatggtgcagtctcagctcactgcaacctccacctcctgggttcaagcaatttttctacctcagcctcccaagtagctgggattacaggcgcctgccaccatgcccaggtaatcatttttgctcttttttctatttaattgtttttcttaattgtgaatatgtattacttttgtaatttttttttttttttttgagatggagtctcactctgtcacccaggctggagtgcagtggcacaatcttggctcactgcaacctctatctcccaagttcaagcgattctcctgcctcagcctcccaagttgctgggattacaggtatgtaccaccatgcccggctaattttgtatttttagtagagatggggtttctccattggtcaggctggtctcaaactcctgacctcaggtgatccacccacctcggcctcccaaagtgctgggattacaggcatgagccaccgcacctggttgagatcggatgtttttaaaaaaggggagtttccctgcrcaagcttctctctctttgcttgctgccattgcacgtaagatgtgacctgctcctccttgccttctgccgtgattatgaggcctccccagccatgtggaactaacacttcagttctggaagatcaagatgaagataagtccccaaagaaaaatactccttggcagataagtaatggaacatcatttgtgatcatctccagaaagaggccatcagaaggaaactaccaaaaagaaaaagacttgtatattcaatattttaaccaggggtctgaatcagatcagttggaatttgtggaacatcttatttcacgaatgtgtcattatcaccatggacgtatcaactcttacctgaagcccatgttgcagcaggactttattactgctttacccgagcaaggcttagatcacatagcagaaaacattcttttgtacctggttaccaggtctctgtgtgcagcagagctggtatgtaaaggatggcagggattgatctcagaatgaatgctttggaagaagctgattgaacgaatggtacacactgatcccctatggaaaggactttcagaaagaagagggtgggatcagtacctgtttcaaaacagacccatatctagccctccaaattcattttataggtcattatacccaaacattatccaggatatagagactatagaatccacctagcggtgtggccgacacagcttgcagaggattcartaccactctgaaaatagtaaaggtgtctatggtttacagtacgatgatgaaaaaattatcagtggcctacaagataattaagatttgggataaaaccagcctggaatgtttgaaagtgttaatggccacacaggttctgtcctctatctgcagtaggatgagcgtgtcattgtaactggctcttcggattctacggtgagagtgtgggaagtgaacacgggtgaagttcttaacacattaatccaccacaatgaggatgtactgcacttacgcttcagcagtggactgatggtgacctgttccaaggaccgctccattgctgtgtgggacatggcttctgcgaccgatatcactttacgtggtgtcctggttgtccactgagctgctgtcaacgtagtagactttgacgagaaatacatcgtgtctgcctctggtgacaggaccatcaaagtctggagcatgagcacctgtgaatttgctcgtactctcaatgggcacaagcgagtcttgtctccagtacagggatgggctggttgttagtggatcatcagatcataccattaggctcttggatattgaatgtggctcctgtttaagagtcctagagggacatgaagaattggtccgatgcatccagtttgataacaagaggatggtcagccgggcctatgatgggaaaattaaagtttaggacttgcaagccgctcttgaccctcgagccccagcaagcacattgtgtttgcgcacattggtggaacattctggacatgtgttttgcctacagtttgatgagtttcaaatcgtcagcagctcccatgatgacactattttgatttgtggtttcttaaatgtgcctcccagtgcccagaatgagacccattccccctccagaacatacacttacatctctagataacagtctgcactttcacccgtttccgggttttctagtcttgaactactggctacgtggctaccaatgcctaagggagttcgttcacagctgagttatgaagctggaattggttctagacgctgggtagatgcaaagcagcctaactcttcaagtcccgacatttctcacctctgattccagctctactttgagaaggagaccttagcttcactgacttgaaagtagcacagaagcccatttccttccctcattagtgaaaaaatctaatgtttcaaatgtaaactgatcatagaaaaggaacatagaatctgttttacagaagtaaattgacgccaagagaagtcttggcctctaatttatattgctttgcactttggtttgatactaagaaacagcattcttcttcagtgaaattttgggtgccaaacacctactcagaatgtccacggctttcattttcaaaagttaacattctccttttgaccgtccaagtcattatgaattttgacttgctgtattaggaacatgttggacaatggaaaaatctctctgggtcgttttagtaatatgttttggattatacttcctttctataccaatttcttttaatttaaagaactgtaagtcagttggccgagcgcagtggctcacccctgtaatcccagcactttggaaagccaaggcgggcggatcacgaggtcaggagattgagaccatcctggctaacacggtgaaaccccgtctctactaaaaatacaaaaaattagccgggtgtggtggtgggcgcctctagtcccagctacttgggaggctgaggcaggagaatggccagaaccctggaggcggaggttgcagtgagtcaagattgcaccactgcactccagcctgggcgacagagcgagactccgtctcaaaaaaaaaaaaaaaaaaaaaagaactataagtcagttattatctcccaacatagctcttttattttatttttaatttttttaaattatattttaagttctggaatacatgtgcagaacgtgcacttttgttacataggtatacacgtgccatgggggttagcccttttattaactgttctctgaaccgcaaccatctcctgatatttggtagagtaacacctttatatgtgtgcttgcctcctaatttaaaatactgtattcacatgtagatataatgtacataacagtttaacttcaaagttgctggggtcagggccccctgcacttgagacactaatacagagtgtgttcgcgcttagccatggactggactcaagaacctgataccagggttgatgtggattacctggaacccttcctgcagtattcctacagtgtttttattttgttgtcattgtgtgtgtggtttgtgtgtgtttttaaggagaatcttgttttaaaatgtaatttctaaagttgaacatgaatgttttatttgttgtacagtatatattatacaatagagaggtaacttaaacatttttgttcttattctttttctcataagtactcctgagtactagtggtcacttcccgtagtattcatttggcttcactgtcaaaaatcattattctgtgcagttgtggccctgggaaggggaaataataaggccctattgacgggctgtcctggctctggaattcatgcatcctgtccttgccaaggttctggcagggcccgctggtgtgttggagcctgcaggtcaggtcaggctggttcagaggtccatgctgaggggagggcactcctaagtggtgtaaagcctcaagtccatgaatcccaccccagtcatctctggtgtcacgtgctgctgcggcctcagcaggttctcaaagctcccgagtactcccgagtacacagcccaaatgtgtaaatggcactgtctccctgatggtgcatggaaaggacgttggcatctggcactatcaccctgacagtgcatggaaaggacattggcatccagttggcactccttctcccttattcaatattaggtttgatttgccctttgccgttgtttccaaagatcaaggaatgtcaataacttttttttttttttgagacagagtctcgcattgtagcccgggctggagtgcagtggcgcaatctcagatcgctgcaacctcctcacctccaggttcaagtgattctcctgcctcagcctcccaagtagctgggactacaggcacgtgccaccacacccagctaatttttgcatttttaatagagacggggtttcactatattgaccgaactggtctcgaactccagaccttgtgatccgcctgcctcaggctcccaaagtgctgggattactttgggagccaccgtgcccggccatcaatagcattttaaaggaccaataaacagcctcctataaattaaacctcttcctgtggaagcatgctctactactaaagggaaggtccttgggctccgatttgtcctttgcattgagaacggtgtggggatcaatgtgtgtgtatgtgatttatcgagttggctttgcttttttagtttttcttaaaaaaaatccttccttcccatgttactaatttatgtttttgagaagttgagtctcaaagcgtaaacaataaacctccattcataaggcagatgttgtaagcttgatggtggttgtgaaagtgatttagttttgacctcttttcgtcctacaacttcaatatcaaactgctcaggaaagcccagggggaaggtaggggcagaggaggagacaattcggaatgaatgaatagattttttgttgtttttgcttgtttaatatagaagtcccccttgttccttgggagatcatggcctttgaatatgtacacaacctttgaattgttcctactaaattatagcaagggactttggcacccaaggaattctgactttctgggattataatagtaaattcccagccatactctggactttattttgctaaccataattgagcaaatgtaaattactgctatattaatgttttaaagcactgggatagtctaattctaacttgtagttaattatgtttgccaattatttgtttgaaataaatttgtgtctgaacagctattgaaactgttcaattgtacagatattattcatgacagctttgtactgtggaatgtgcttaatcaaaaacaaaaaagtttgaaaaaaaaagaagaggtttgctgaactttcagattccttttttgttgttgttaactatttgccacccaagctagaaatcagcaccacctaggggtccttgatgttataatcagagaacaagacaggccggctggccctgatgcgagccatgagcaagctccaatgagcccctttcttccacgtttgatgagtagaggaaaatattgggggtgaattttcaataacctgaatcgattgcactttttcttgtagactagccatcattaaatccacttacgcgctcccctgtgcccctctctttccttctggaatgttcagtgcctgtttccagtcccatttttcagtcggatgggattgcccttcattacagttttgtgggttatgagttatgagctcttcctctgtgagggccagcagggcacccccactctcctgtaacaaggaaagggtgttgtgtagtaaagaattttaagcttacttgaagtgagatctgggctttgcccttggctcttgggaggtgatctctaagcccttagatgtcctgcttgataatagcactgtgtttacctggaggccatgggccatgccaaacagacacaacatgttagaccaatgtgatttatggtgggagatttggccacaccatatcagcttgacccctgaaggaatagactaaggtcaagccagccatgtccacaagaccaagccctactatacactctggacaccaacagcctggtgagtttccttggttggcaatactccatgtatatagtccgtgcatatagtttccagaaggagtccattactccactgggagaggactgctggaagctctcctggacactgccctatgtgtgtcttcccttggctgatgttaatctgtgtccttttgctatgataaactgtaagtataagtataatagctttcagtacgttctgcgagtccaccaagtggattattgaacttgaaggtggttgtggggacccctaaactttaaattggtatcagaggggaaagtggtcttgggggctctttcctaactttatagtcatgtactaggaatctgagcacatgatctcaacaaaaacaacaacaagaaagaagaaagagagcaagaaaagaaagagaaagaagagaaagaagaaagaaaaaaagaaagaggaaggaagaaaaggaaggaagaaaggaaatgaaaaagaaagaaagaataaagaaaagaaaggaaaaaaatgcaaacaaacaaaaatgaacagatggtctctagtcttggattctccatttactggctgggtaaaccacttcattctttgaacctcctttcctgcccactcagtgaggaggatgttatctgtgtgctgaaggaggctgccgtggcggtttagatggaaggaagtgtctacagggaggaaagaggggtcggggctgaagaataaggacctggagcctgagtagaagccatttctcaaaattaaagtcttaggaaccactcacatggtgggtgaatgcaagctctagttacataataatataaacagaaatttaaattgcaatgcacctattgcccatcagaatggcaaaaactcaaaatctttacaaaccactatgcggtgaggctgtggatgaggctgtgggattcacacaatagtgcgatcccgttgaggggaactgagtaatagtcaacaaaattacacagcatttaccctctgatgcggaaatcttacttctgggtacttatcctgaattcctgaatgacctctaacaattttatatatatatatatatatatatatatatatatatatatatatatatatatattttttttttttttttttcctttgagatggagtcttgctttgttgcccaggctggattgcagtggtgcaatcttggctcactgcaacttctgccccccaggttcaagtgattctcctgcctcagcctcccgagtagctgggactacaggcacgtgccaccaggtccagctaattttttgtatttttagtagagacaggtttcaccgtgttagccaggctggtcttgatctcctgaccttgtgatccacctgcctcagcctcccaaagtgctgggattacaggtgtgagccaccacgcccggccaattttttgtatttttagtagaaatggggtttcaatgtgttaaccaggatggtctcgatctcctgacctcattatctgcccatcttgacctcccaaaatgctgggattacaggtgtgagccaccacacctggcctacatatatatttttatacatatatatgtgcttgtgtacaaggctatttattcaagcataatttgtaattgcaaaatattaaaaacaacctcaatgtccatatgtaagaaattgtttgaataaattatggtatgtctacataatggaataccatgtcactgtaaaaagcaacaatgaagatctctatgaactgacacagagtgatatccagaatatattgttaggttaaaaaaaaaaaacccaaagttcatcagaatgactatcggtataatattacatttgattaaaacaagaatccatgaatcagagtgacaccaaagaacaaataggaagaaaaaggaaagatctttcactatcagggaaagtaaaatgctcactaacaaatgtagaggaacggagccgggcgcagtggctcacacctttaatcccagcactttgggaggccaaggtgggaggatcacctgaggtaaggagttcaagactagcctggccaacatggtgaaaccctgtctctaccaaaaacacaaaaattgaccaggcatggtggcgggtgcctgtatctggagggctgaagcaagaaaatcacttgaacctgggaggcagaagttgcaatgagctgagatcacatcactgcactccagcctgggcaacagagtgagaccctgtctaaaaaaaaaacccgaagaactgggccgggcgtggtggctcatgcctgtaatcccagcactttgggaggctgaggcaggtggattacaaggtcaggagatcaagaccatcatggccaacatggtggaaccctgtctttactaaaaatacaaatactagctggacgtggtggcgcgtgccacgtagtagtcccagctacttgggaggctgaggcaggagaatcgcttgaacctgggaggtggaggttgcagtgagccagga

SEQ ID NO: 98143 - DNA, 49020 bp, Homo sapiens
gacagtaagaatgtattttaaacagcaataaatttagtaggattttcccttgtaactcatataaagatacagtttctgacttaaaaaaatcaagatccttatcttcttttttgagggcacctaatgaacctctatgtcagagatgagctcagtgaaggtctaatactttcaaataccaagtcatttttattaccaccttgaaacttacatactttgaatatttatatttacactgtagttatttattcacttactgtcgcttagatttgtattctctaatcttgtccacaaagagtttctgtataggatcaagttccttattaaatgccactgctgtaacaccaatgttcctccgcaaatggactgagacggctgaccgaatgacagaggagaacctgaagagcctctgaagaatcatgctgattctgttacagaaaacaagcagcagaaacgttaatatacttattataaatcacctctaaatatatcatgagaatcaaattctactaattgctacagaattacatcatatcagatctcagtctatacctgaccacagttcccttctcctccttattccccattgcaagttttttaggtcttaaccaaaaggctctgggataatggaacagttagaaactcaggcctgaagcttcatcagggttagagcacaaaatgtgaggtgaggtatttcttcccccttgaacttagtcatggatcagagaaaacagtagaggtagactgttgcaacactgtccgctcctaacaggaaaagtacactggcccccaaactaatgtacaaggtttcccatacctcagccgggcatgacaacctgaaaatgtgtacttcacaggcccacagagggagaaactgctctgcctgttacaaatggattccagccatttaagaatactgtaacaactaaatcaaagtccagaagaaccagcaaagaaaaacagcagccagtccaaatgagctgtgcatgacagtggggaggatccggcagtccaactttatcagtgaaataaattggtgaaggagatggaagtctgaattttaaaaataaggacttatggccaggtgcagtggttcacgcctgtaatcccagcactttgggaggctgaggctggtggatcacctgaggttgggaatttgagaccagcctgaccaacaaaaagaaaccctgtctctattaaaaatacaaaaattagctgggcgtggtggcgcatgcctgtaatcccagctactcaggaggctgaggcaggagaattgcttgaacccaggaggcagaggatgcagtgagccgagattgtgccattgcactccagcctgggcaacaagagcaagactccgtctcacaaaaaaaaaaaaaaaaaaaaaaaaaaaaaaaaaaaaaaagacttaaagactttcaaatccctagacttccttaagctaaaatatattactttctaactaaaacatttcagtagaggacaattcctgttgagatttactttagtgatttaaagatcaaatgcaaaaaataatccaaattacaacaaataggtacaaacaggaattctagaagaaaaggaataaagagggccaggcacggtggctcatgtgtgtaatcccagcacttcagcccgaggcaggtggatcacttgaggtcagaggttcgagaccagcctgcccaaaatggtgaaaccctgtctccactaaacatacaaaaataagtcaggcgtgctagcgcgtgcctgtaatcccagttatttgggaggctgaggcaggagaatcacttgaactcaggaggcggaggctgcagtgagcccagatcacaccactgcactccagcctggatgcagggcaagactctgtctcaaaaagaaaaaaaaggaaatgattaaaagagaccataaataattagtagaatacatttttctcagattaaggccgagtctataaactgacagggcttgccaaaccccatattggaacggtgacaaaaggctcacaatgcaccacagcctggtacaatttctcaatctttttttttttcagacagggtctcactctgttgcccagaatgaacacggctcactacagcctcagcctcctggactcatgcaatcctcccaccttagcctcccaagtagatgggagcacagttgtgtgccatcacaccaggctaatttttactttttttttttttttgtagagacgaggtcttgccatattgccctggctggtaaaatttctgaatcttcaagtgaaaatctgatatgctaacatgtttcccatgccctccccaaatttcctaatagcaatactgtcatcatcacattgacaccggacttctactaagttataataggactagtggaagtatacaaactatgttattggtctaaagtaatatagaaattagatataagtatttagaggccaggcgaggtggctcatgcctgtaatcccagcactttgggaggccgaggagggaggattgtttgaactcaggagttcaagaccagcctgggaaacatggagagaacctgtctctaaaaaattagagcttgtattttaagtgacttcattgttttgttttttaaatttcatttcttttgtaattcattttcactgtattcaaaagtgtccacaggagtgggtgtgagaatggccctttaccactcagagtttgagcagcactagctagaaaactgtagagtcgcacaatagttctcaaaatagggttgggggtgggggaagaagtgagtttttttctctccaaggagacatctggcaatgtctttagacatttttggttgttctcaccaagctgagtgctactggcttataatgagtacaaagccaggaatgctgccaaacactataacgacaataacagccctcccacccctaagaattatctggtcaaaatgtcaataatgccaaggttgacaaactctggaatggcatgtaaaaattatcaaaagaaatctacaatgagccaggtgcagcggatcatgcctgtaatcccagcactttggaagaacaaggcaggaggatcacttaagcccaggaattcaagaccagcctgggcaacacagtatgaccccatctctacagaaaaaaaaaaaatagccaagtgcggtggtgggtgcctgtagtcccaggtacttgggaggctgaggctggaggatcacttgagcttgggaggtagaagctgcagtgagctgtgattgcaccactgcattccagcctgtgttacagagtgaaaccctgtctcaaaaaaaaaaaaaaagaaagaaagaaatcctacaatcaggccgggcgtgatggctcacgcctgtaatcccagcactttgttgtaatcccagcactttgggaggccaaggtgggtggatcacctgaggtagggattcaagatcagcctgaccaacatggagaaaccccgtctctaccaaaaatacaaaattagccgggagtggtggcacatgcctgtaatcccagctactcaggaggctgaggcaggagattccttgaacccaggaggcggaggttgcggtgagccgagatcgcgccactgcactcctccaccctgggcaacaagagtgaaactctgtctcaaaaaaaaaaaaaaaaaaaaaaaaaaagaaatcctactatcaatgcaatcaacaaaatatgcttcacctgacagaatgaaagcaaactgtttgaagaaattaaagaattcataacatatcacttttataccccatcagggaaaaatacttgagaaaaggctacaagcaaacaacaaatgacctcacaaggtcatgtgccacttattatcattcctatgtttaaacacacagaaactgaggattagaagtatctggtcaaagtggtcgggcgcggtggctcacgcttgtaatcccagcactttgggaggccgaggcgggcagatcacgaggtcaggagatcgagaccatcctggctaacacggtgaaacccggtctctactgaaaaatacaaaaaattagccaggcgtggtggcgggcacctgtagtcccagctactccggaggctgaggcagaagggcgtaaacctggaaagtggagcttggagtgagcagagatcgtgccactgcaatccagcctgggcgacagagcgagactctgtctcaaaaaaaaagtatctggtcaaagttacacagcaaaatctaacttaacacatatatgcaaaaaaaaaaattgtgcaattcaatgccactttcccttctggcaaactaaggacatgcttaacattcagcaataggttcacccgacatttgcttagccctagatactgtgcaaagtacttccatatatatcctttccttgtacccttacagcaatactctcaaagagttaaagtgttcttatccctgctttacagatgataaaactgtatctaagaaagattaagctgcacgtattctcacagttaatttgctctaagtctgactgcatagatgttactccttctgcaacacgggtaaaatccactttcattgtttcaattatccaccatgtaagtgcctatgattccccaatcgcatttctaattttagtattcatcctgagccccaaatctatccacagcattcaacagttctcatctcccttataagtcctacgaactcatccaaaaaacgaacacataatcccatatcaaaacttgttccttctcctttaatccctttcattttttttcactgattagtgaatgcatattgtccactaaaacgcagaagatagtcattacacaaatagctgtgaaataccacctgacataaattctctattccagtaccatcgggtgccacgagagcatatgatagcgtctgacatgatcagaaagactggggaaggcaacagtaagaaaacactagtctgagcagaggccttgttctgggtgggagcatggttctatttatagtgatgactgaccggccaaaggttagtaggttcgctgcctcttcagtgcatattcctatgaacaatccataaagtcgcctaatgaagtgttagcaccatcgtttttaggtgggatgcaaactttcaatattatgactaattttttccctcttaatggtacacgttctgcctaagtagcctagacgctcccgtgcgcccggggcgggtaggcctggccgaaaatctctcccgcgcgcctgaccttgggttgccccagccaggctgcgggcccgagacccccgggcctccctgccccccgcgccgccccgatttgccctcagagagggtatcgatcttatttctgggtctacggcaaactccaaggtctacaaacgtagaggtcagctgtgaccccgggccaggccgtgaaggtccccaggacacagagctgctctctcctcctagtaaaggtgagaggcagcccaggcctcgtgaaaaaacccagaactggagtcccaaaaggccacgctgatctagctaccctcccagtcaccttgcactcagtcccgagctgccaaagcctccgccgccaccacctccgctctacttccggccctggctccgcccccacacgcctacccgccatcgcaatgcattatgggccgccgtttcagtcggtcgacgctcaccggacaggaagcgtctcggagacagtctgcgaccggacgggtctaggtgagacagaagccaaacaggaggaggaagtggagggtaagtgcttccgggtcccctggcacagcctccgccatcttttcttcgcctaatttgacccgttctttttcccctccttgaaaccttgctctgtacgcatgcgctctttgagtggcctttcccctagttcaagctcccctccgagtcagcgtcctgttcgttagggttatcgaagtgtataaaggtgcagggaaagtgagactgtgtaaaacaaagcggattggggcgttgtgcttccttgtacctcgtgagcctccgttgccttgggcggtcgttttgcgcaccctgccgggagttgtagtcctggacccgaaggtgcctgggaggcgggaggggggttggggcttctcagcgccgattccgcgggaagggccctgggacctcacacttctagtcgcgggagctgcaggtcttacccggagagacgctgcacgtggagccctcgccgctgccgttctcagccggctctggagtgcgggcgggggcgacagggccgattccggagtgggtgagtgcggccgccggggaggaggggagcgcgggccctcgcgggccggcctcgttccggggccttttcccccacaagggcccccccgcggccgcctctgtgttttgtttccgctggtccccggcgctgtgactcccatttccgttcgtggagacttgagggagccgggtggggaggggcgggagagctgtgcggggagcgaaggggaggggcggggggcgagcggcctggagcccggggggaccgggcaccgccgggacccgtgccggacgggtcgcctgtcgccgctccctcctttccgcgtcccctcctcgcccgtccgcactcctcagcagtctcagcctgctcagctgggatgtggtcctgacgcccccgagattttaagagcaaaatgcagaccctgtctcatcgcgggactcagcgattcactcatttcaaatccgctctctttatagaacaacacacaccagaatcatttatcagcgtatatggtagccatctgggtttgtttttttgtttttaagcaaggaagtaaaccaaggagataacaatgggttgtctacttggaaatttttttgtgtactagaagacacgctgtatgtgcgtgtttggatttagggaccccagtttgatcaggttagcggaccgagaggacaatgcctaatattgcattgcaagatgattagaaatttagaaataaaattcatttcataagtagtttccactaatagcagtaggtctgactcgtgagaagagcaaagatttagcaggattcacttgagcgaattgtagaacgaggcggtgataacattcttcggtagtgttatcttgaacttcagaagaaaccgctcaactctttagcaactgcttgagggactagcctgtctctcagggttccatccaggctttccaagcttctttatttttagacatacagtgacgctgagtggacttcaagtcaattttacctgaattgtgtatacaagagcatctgtcatgaggcatgtatagtaatgaagtaattaaatcatgagctagatgttaggttgaagcaaatcatcagaccgagtactaaattaaaactgttgactttagccttccctcaactctttatatataaaactccaaacctacagaagaattggggaaaaaatcatgcagtgaacacgcagatacccttcacctgagggtcccaactgttaatctttcactgtatgtgctttctctttttatattacatagatatgtatgctttgctttttcttaactgctacctttatttttgaaaataaaaatgtcttttaatttcctcagacacagaaaagcatttgataacttaggaaaatgtgcagttaatctcgcaggtacccccacactccacttataatatattgggaacaaaatgttctaagctctgtaataatgctctccaatgaaggacaattctcaaatttatctgtagtttcaaaagggaatgttacacctatctgtattttaaaagacactagccgttcccagaatttttcgttaaattcaagtttagtttgtatcccatcttgtgaaacattccgaaccccaggttggatttaatccagcagaaccagagtgtcaaagtatatgaaattkttctgtgcagttctggcgggggcagcccttagacggagaaactgcaagtaattttctctcagttttcctaagtattgacatagaagcctgaggaattggtttcagaaaaagagataagactcactcaaaaactgatatgaaagatttggactatttctcaaatctctgttttgcttctctggactaagcatagagaaccaggagagaaagaaagatttaagagactgagtaatattttttgacagatcatttaagaaactgagtaattttttttttctccaaaagggcatgggtttttgttttgttttgttttttctctatttggcactttctagggattggtctataaattttttgaaagatcataggataaatttctttgtagcaacttcctattttagtgtttatgttaggggagccccaggtgtccctgctgatacgccattagggccacttctcagcctctggctacatcataatgcttttttttctatcttgccaaagtttccagaaaatttatgttttctaattttaaaaaaattggttgtggagatgggagtggacctctttataagccctgaaaataagtgattttttttaagtgctattctgctataaacctgattctcacttttttctgtagacaacagttttttataatatatctattttgtgtggacattatttccttttaaccaatactgaaattccatagtgtatactttctccacattttctttgattaatactttcttaaaatagacacttggattggcaccagctgtcaccaataaagctgccctgaacattgtcaatcaatcctgttaaccaatttgagaatttttctggaatgcttagttagggatgaaattgctgggttataggtatgagtatgcttgatatacttttctccagaatgtctacacctgtgtgtacaccacatctccagagataggggaatcttatgtccctgctaactgctctcgttatttaattttctgacatttgccgccgccgccgccccctgcccccaacacacacatggtataaagtggtagtttcttgttttaaattgaacttttgaatgatttgaatttgggcatttctttgtatcctgagttattttggtttcccgttatgtgaatatccttttcctatgctttaactacttttctaatttgtccctttttttggttatcaaattccaggccattgtctattccatcgtcacttttgggtattggaaacatctttccattctgtagcctgtctgttgaacataaatcttgatttttatgtaatcagatttttctccttacggttatgttcttggaattttatttaagaaatctttttctatcctgagaccacaaaaatgtccccaccattttcttctgtttcatagttttgccttgtatgtttaatcctttaaggcatgtgtagttcattttatatggtgtgaaatagttcttattcatttattcaacacatattggtggagtgcctgctgaaggtagtactcttcagagtactttgtatatatttgtgaacacatattcttgccctggaagcttatgttgtccttcaaggtagatccctactcggtttccacctgttttcttcagccctcaggatgaattccacaattttacacatagcaccagttaaggaataggctttattggagaaaaggaaggcttattagaccagcatcagcaagaaaaaaaaaaaccaaaaacagagggtcttcatttcttcatcatccccaaaaaagcctgctggagcctgcgcattctgctagatatgcacgtgaacagaatctgcgcagtcggctagatgtgcttgtgaacggagcctgcgcagtctgctccatatgcatgcgtccatcccagtggagaaccttacccttttattgttcgtccttaaagggcaagcctgagagcaaccttaattacgtgggaaaaattagatcattttgtatcaggcagtctagatttgggtgccagctatttgtcagaaaaccagctaccccatagttggagatattgagaacttaggagagttatagccctttctaaagtgggaagggagactcagtttcttaatgctagtgtaacaaattatgcaaatttagtggcttaaaaacaccacctgtttattatcttacagttttggagtcagaaatatgaagtaggtctctgggctaaaatgaggtgttgccagtgctgtttttctagagccttcgagggagaatccgttccttgtctagctttcagaagctacctgcattccttggctcaaagctcctttcctccatcttcaaagccagtcacagctaaccggcagatcttcacattgaatcactctggctctctcttccaatttcctcttctacttttaaggaccttctacttttatttatttgtttcaagagatagggtctcgctgttgcccaggagggagtgcagtggcacgatcatcattgactgcagcctcgactcctggtctcaagcgatcttctcacttcagcctcccaagtagctaggacaacagttgcacaccaccatgcctggctaattttaaaaatgtttttataggagacaggttctttttatgttgcccaggctggtcttgaactcatgggttcaaacagtcctctctcctcgatctcccagagtattaggattacaggcatgaggcaccgtatctggccctagctgcgttttaaaaacgatcacactctggccgttgtattgactgagaatagactgtgaggggacaagagtggacacagggaccccctttaggagattgttgcagtactccaggtaaggggtggtggtggctgttgtactgatatacgcaatacagagcctatatttggacaaccatggttcatccccatctggaatgatacctacttaggttgatacaccaaaactgtgacatggagccacaagtggtttagcctcacctctgaatagcgttcgtatgagatggagctcaaaataagattgctctatgcaaagcatttgaatgcagtgcctgatgctcggcgagtaatggttaatacaaatgaacatttaaattcttcatttagtgaaatcttgtaagtgggagcacaactcttttgtaaatgtcgaaataccaaatttagtggagcgttccttttaaaggtacgcctctttttagatgtggtagtacgcttagaataactactcagaaggtgctgtggactgaaagtgcgtatggaattcaaagacattcattgacctactgcgaggtagttaataacagaacctggtacttaacagtattaacacctcagacatgtccacaaagaaatatctatgtatattagctatttgtgtattctttagcatttttaaaattctaatgtttttgtatcagtggttttaagcaatagataaaaattttacatgggataattaaaaactgaagtagtggtctgtttaaaataaaaccacctctgaaaaaatcattaaaaattttctactgtgtgtaatcagggaaataatgtgcatatctgtaatttgttactttgttttgctgttttataatattcttgcatttataagagacatcatttgtaccaaatcctagctgattaatttgcatatcattgtatcagtgtgatactttgcagtaaattctgctactaaggtacaactttcagctgaataaacatagttcatctccatgttaagcttcaggtttgaatctgttattgagactgagttgctttaatatagttaacagacccttaacttaattttgaggtaacttgttgattgcaattggtcccgaaaacatctcagtaaatccagtagattaatgaagttrtcatgtcaggttaataaacaccagtttttwaaaaaattagtttataaatgtcatttgtggattttctttattttatttttcaaacagggtctcttgtcgcccatactggagtgcagtggtgygatcatggctcactgcagcctcagcctcctgggctcaggtgatcctcccacctcagcctccgaagtattaatagctgggactacaggygcgtgccaccacgccctgctcatttttgtatttttagtagagacaggatttcgccaagttacccaggctgatttcaaactcctgggctcaagcaatctgcctgccttggcctcccaaagtcctgggattagagacatgagccaccacacccagctgattttcttctatatgtaaagactacttccccctcttctgcttggcgtttgctttttatttggattgggtctctacttcttgtgtgtcatttcgtttatgtggatagttttaaaatatcttaaaaagtcactcttgcaggactgatcctttgaaatactccagccatgactaaaagagaagcagaggagctgatagaaattgagattgatggaacagagaaagcagagtgcacagaagaaaggttggtgtttctgaatttatcattttttttcaaaatatcaatatacctaattaaaaccaggaaacaagtcatagttcttttggactgtcwttttttaactgttctcagtattttagggaataatgtattgttttatttcctctgacttaatgtggttgtagctgagagggaaagacagttttaaactaatggtagtaaaagggtaaatgaaatcaaaagcaattgctttcaatagttttctcctttggggcatttgattctttattcttttcctcagcactggttgctttaatttcagaaatagtttaattcaacctgaactcatttaacaaatatttatgagtaactgttgtaaacaactaattgacaagaatatgtgaataaataagatactaatctgcccttataaaggccacgttgtatttgaggagacatacaggtatatgagtacttacgggaccagtactaagcataaaatgtagtgaaaagtgttaattcttggaataatagtggaatcatacttatttgaaaggaggacagtagtaatgagttcagaatccaggagagaacatgggtagaaatagactttgggagtcaacaagaagactgaggaaagtagtagttaatggtccctattgtactccgtgaagtaggaggtgagataataagctgaaagtaaaagggattgaaaagtastagagatctctgtggagtaacaaaggtttagaagtttctgcagtggaactggacaagataattaaggttaaggaggatactgagtattgagagtacagttgagatttaaaatcttaaatttttaatagagcttttcaacttgtttatcccagtttttccagcataagaaagagggaatgcatgyttctgtggaatttcatgtatagatatttgtgttagaaattaccccaaaattcagaaactaaaaatgcgtaacattcagccagatgcagtggctcatgcctgtagtcccaacagtttgggaggctgaggtgggcagatcacttgagcccaggagttcaagaccagcctgggcagcatggcaaaaccctgtctctacaaaacatacaaaaaaaaaaaaaatagcctggcctggtgacatgtgcctaagtcccagctactctggaggctgaggtgagaggattgcttgagcccaggagttcraggctgcagtgagccatgattgtgccatcgttgtgccattgcattccagctttagtgacaggacaaggtgcggtctcaaaaaaaaaaaaaaagcccaacattttttattgctcattgtttctcagagaaacctgggagcaacttacctgggtggatctgtctcgggtatttcatgagtttgcaatgaagctgtcagcccaggctgcagtcttgtaaagacttgactagggctagggtgtctgcgtccaaagtcatgcttgagactctcagcaagatgcctcagttcctcatcacatgactctctctagggctgctcatgggatggcagctggcttcccttaaagcaaatggtctgagagacagaatggcaaagtagaaagccccagtgtcttttttaagtaatctaagaagtgacatatcactttgtcttagtcttctggtcacacagtccaaccctagtacagtgctggagggaactttaaaagggcatgaatttaagaatcattggcagccctcttggagtctagcatgcatatatttatacatgcatgcacacagatggtccacaaagtctaaagtatgtactatctgaccttttgtggatagtctaggttaggcracagattggtaattaatatgtatgacctatgtgaaggaggcagtaattgtcgttcacctaacgtagatttttgctgtgcaagaatttaggtctagtagtatgagatcatcttttttttttttttttaagagaaattggtactttagatatttgaggtcttccaaggtttaaatgatagcaataaaaactttttaaaaatgtttaatgttcagctagtataaagtagttctttaaaaatttgttttaaaagtgacatttgaatcttaagagtaattgttacaaaaaaagaaaaaactggcctgacacagtggctcatgcttgtaatcccagcactttgggaggccaaggcaggtgaatcaygaggtcaagagatcgagaccatcctggccaacatgccagtctctacaaaaaatacaaaaattagctaggcatggtggcgcatgcctgtagtcccagatactcgggaggctgaggcaggagaatcgcttgaactcgggaggcggaggttgtagtgagccaagatcgcgccactgcmccccagcctaggaacagagcgagactctgtctcaaaaaaaaaaaaaaaaaaaaacctaccaggctatagctgaagagtttggtaaaaaggcttacttaaagtttttttttaccttaacaaataacaatagtagactagtatttttaaataagcttgtttttaatcatgagggttctattttataaattttaaatgttttaagtcaagtgcaatggcacacacctgtagtcccagctacttgggaggctgaggtgggaagatcagttgagctcaggagtttgaggccggcctggtgtgaacatagggagactctctctaaaattaaaatataaataaatattttagaaaaaagtttaagctatatacattcattgaatatcatgtatgtatctcattttacttgtaatttatgtgaaaacttgacagatttttaatgcatactgtttttgacaatcacaaataagatttaaatcatatttaaattaaacatgttggaatacttaattgaattccacattcaccaattcagcaaatattacttagtatttgtctatttggccctatataaggatttgtaagagttatgtaggattacttaccaaagattttaacccttttgaattcaaagtgtgaaataatatgaaagagcactaagacagtttttaggaagaatatacattttttttttaaacgttgagctgtcctgattataaccagttgtgttcatattaaattaaagggaaagtcttttatttaacttattctatttttatatctttctttttttttatgtggggaagggaaattgactagtagagatggcatacagattttgaggagacaatgtgtcttcctttctgggtctaaaattcttcaaaataacttgaaaatgtaatgcaaatgcaaacataatgtatgtgcaatgtttatatgtgtacacatacacacatatgtatgtacatacataatgaggcatatttacaaggatgctttaaatttcaagcttagcatttctctatgaaattcagtgttcattttggcaacactagttggtgatgagcctgccacagtatctatgtagaaatgacttttcaaagaccagaaatgtgttttggtttgggattgtgtttttagcatattgttgctttgaaatccagggtaaaaaatgtaactgttagcacttacatctttaacatttagcattgtagaacaaacctacgcrccagctgaatgtgtaagccaggccatagacatcaatgaaccaataggcaatttaaagaaactgctagaaccaagactacagtgttctttggatgctcatgaaatttgtctgcaagatatccaggtaatttttatttttgtaaatttctattgcaacattttagtctgcataggaatattttttgttagccttttctttatagctatagactttatctctgtaagaagatttgacctgtattactgtaaaatttaagtgtttagaaataaaaaggtttttaagcaaagttttctccatttaaagttatattttaaatatttagtactaaaacaaatgraacatttgttttttactttcacaaatataaaacgagaagtttaaataaattagaatcaaagcttaaatataagtagtaacagtaggaagcccattgacttttgaagctgaagtgtatttctagccagcttttaacttctcaaacgtatcatttaactaaatgatttctacatttctgwtttacctttattttctctaacagtaagttttggataagaatttaaatatcaactgataggtcctggaatttattgtaaaaggattttacccatggtagtagtataatatgttatgtctgaaacatatcccgagtcatattttacagtatgttttaaagataggtagtacttttatgtatgaaaggtagcagcctaaataggattgcccatacagttttccatgaccttccttaaacatatgattaaatactagagttttatactttttttttttcttttttttgaaatggagtctcgttctgtcacccaggctttagtgcagtcgtgtagtttcgggtcactgcaacctccacctcccaggttcaaacgatcctcctgcctcagcctcctgagtagctgggactactacaggccgatgcttccacacctggctaattttcgtatttttagtagacacggggttttgctgtgttggccaggctgctcttgaactcctgatctcaagtgatccgcctgccttggcctcccaaagtgctaggattacaggtgtgagccagcgtgcctggctgagttttatactatttttatattaacttagattaatgtatattgtttcatcttctggatcgtttgatttattttattctttactccttcccctgcctgccttgtgatatgggtattctgtatattacagaacttttttattagttttttaaaaattcaaatcatcatatgctgctactatttttaataagatattgttgtacaataagttgaagtgttttaacaaaatttgtgcattttatttgccttttaaccatactttaatcttttcatttcaatataaatctagtaattggtggtgggtagggaagatagagtgcctctaaaactagggcatgtgggaaagtctagtagtgttacaaattttaggatttaaagtttttttctcttaacaatgagaggatgagttagcttagtctttttggaagaccacctcccatttaatatctgttaatgttaaatgtgaaattcctaacagttccacttcagcaaattattcctacagaaatgctcacttgggtaggtaaagatatatgcatgaagatgttcatggctttgcaaaaactgaaaacacctcaaatgttccaaaaatgagatttgatagaatagaattcgaggtagccattaaaaactggtgaacttgagctatatgggcaaggtacgttgagtgaaaaaaatacttacaaaacactctaattctctcacgtaatcttcacatcagtctttgaaatcagcatatttttagtcacattctgcagatgtagaaacagatttaaagagkttaaataatttgcccaatgtgtggctacaaaagggtatactggaatttgaacccagacctctgtggctccagaactctcttcacttgtttgagacgaaaaaacaaaaaacttttttaaaggtttatagtgaatataactcagtgtcactggactttgcctggttttgctcatatgtaaaataaaggagaatctggacttgatctcttagttgtctttcagctgtaacatttattgctttytttataacacttgacctatccaaaatgaaagtatggcctgcagattacccaggctcttccaagttctcagaaaataatagttggataaatggtaatatttataattcatattgtcatagaattcagggctagctttggatctaagggcattttgcattactccttgtccccctttcctccttaaaaaggatatgaggaccacactgacatgttcttcatgtcaatgcaaacatacatttcagtcagaagtcttgctgcttatggtaatgctgtgggctgacttgaaagctgagggaacaacggctaagttgcacttttttgaagagtgttaacacaagatcaaataccaggcttgagttttgtccttgttctggcttttagtgaacttgctaatatgttcagtacctgagagcttatactttcagagttacatttgccatagcttctaatggataataccagtgtccaccagacaaggagaaaaaaacttgacattaagacaatttttaatgaaatgtatattaatggatgaaactgtcatatttaatctatctgtctacaaggttacaaggtttttttttgttttgttttgtttttttggagatggagtcttgctgtattgcccagactgagtgcagtggcgctcactgcaaygtccgcctaccgggtctaagcaattttcatgcctcagcctcccaagtagctgggattacaggcatgcgccaccactcctagctaatttttgtatytgtgtatagacagggtttctccatgttgcccaggctggtctcgaacttcagacctcaggtgatccacctgccttggactcccaaagtgctgggattacaagtgtgagccaccatgcccagccgtacacagtttgtcttctcccctgttcaagttagattcatagtcatttgtcatgtgtttgtgccatgacgacaccatcagttgaattcttgggaatgcswgtaggacatgcagctttatgacatgcagacacagttataaattatgcaagatgattataatggaagcctgtctttaagctgatgacagaaagtgtctgaaagtcagaattaatgttttatcatcaatttgccatagtgtgaaatgcattctataaggatatatgaaggaaaaaacactaatactgaaatgatatagaattaggattcaagatattcatagctaggttaggtagtaaggtcataagtgctttaattttattaactttatgatgagagatttagagtaaacccttatcttcaatatgtagcattgattacaaggcagatatgacaagaatatgttaatatatttagataaattatcatgactaattaaacacttttacttattcatgacagatatagcattaccttctactttaaatacatttcagaatgaataattgccttttggaattatttaaaatcccaaactagactccagaggtagagaaaactgacatgacaaatttggtggtatgctgtcctcaattacttcctcagtggtgaaaatattttagattttggcaaagaattaaatatgacaagctaaataatgtgttcttataatttaattagtatgttcagtaattaagttctgtttggtacatccatttattctaaaccaaaggcaagggacttaatctaatgattgcactgaaataatcttactcattttatccatggttagctggatccagaacgaagtttatttgaccaaggagtaaaaacrgatggaactgtacagcttagtgtacaggtaatttcttaccaaggtaagttacttttcatgatagttatttaaaattttagctcatgtttttctgatacaatttataagtttttaggtgttttcgatggttgtctacattacttgatatgatataatagccaaaattcatgctttgggtttagtagttttatttgacagggtgaaacagatagtacaacacattctacttagttcaatcataaaaggatatattatatggtagtaaatagcagaatcagagagagtactggaagtcagcaggttgcagctgacttcctaagagtacctcagccacactgcagaactggactgctaaggaagctgctgccctgccrtgatctggaaaatacaacacctggaagctrccatggtagctgtcactttaaccatgttgcctttacagtgatccacactagtcaaaaaaatagatgtctgctggctgcgggggctcacgcctgtaatcctaccactttgggaggctgaggtgggcagatcatttgaggtcaagagtttgagaacagcctggccaacatggtgcaaccccatctctactaaaaatacagaataagctgggtgtggtggcacatgcctgtaatcccagctacttgggaggctaagacaggaaaatcacttgaacccaggaagtggaggttgcagtgagcagagattgtgtcactacactgcatcttgggcaacaagaggaaaactctgtctcaatcagtcaatcaataaaaaaatagatgttatctgcctcaatggtccccaaccttttttggcaccagggaccagtttcacagaagacagtttttccgtggattggggcaggggaattcaagcgcattacattatggtgtgctttgtatctattattactacattgtagtgtatagtgaaataattatacaactcaccataatgtagaatcagtggaagccttgagtttgtttccctgcaactagacagtttcatctggaggtgatgggagacagtgacagagtatcaggcattaaattctcataaggaacacgcaacctagatacctcgcatgtgcagctcacagtagggtttgtgctcctatgagaatttaatgctaccactgatctgacaggaagtgaagctcaggcggtaatgtgagtgaaagggagcgactgtaaatacagatgaaactttatccactcgcctgccagtcacctcctgttgtgtggtctgtggcctggggtttggggacctctgatctgcctgcttgtcctctcttaacccttttccaaatagaaggcttataccagtgattctaaagcattggtcacgcctggaaccctagctgcaaagaaatccaaccagtacagtttagcacagagagaagaatttgtaatagacatagagtcatccagtcaaccttattcattacagtattttactaaacttgtataagtacccaagttagaaaagaaaattaggaaactgtttttggtaggttgaattttagctttttaaaatttagaataatttcatctctgaacatatattgttcacaattatgtttcacaaaccacatttttcttcagactctgacaatggtagttacgtacttctgatccttaattccctcaggactgattattgggaataggaaataaattagtagtttttatctttaaaagcctmgtgacctcttgatgcaagtatgtttaagaagagttcgcttaaagccattaaagtatgaaatctagatgaaggattaggaaatagattttaacaaaaaatatttttgattctgattgtttttatcatgtatatttgaaaaatgattctctttaaactacctgagaatgatagtagtagtttcttgcaatactggttttcacagaagatcgaagttgagttgtgctttttctttaagctgtactttgattgaattttgatatagattgtaatagattcagtaagaaacagaagcagttatgtaatatgacagtgtcttagagctgtcattttagwctgaggttatttcgtaaagggctaattccattttgaatagataaataaaagtatatcttatagagagtactgcacacataatgaaataactgtttttatggcataatttcttggcttaattataatttaattaggtataatcaaattataatttaataggtttaaatgtgttttaaactatccagaattaaatcaaaatcagaattttgatttaattctggatagttgaggagcctttgtattaataaattatttatttttattttttattttttccataggaattacagttcttaacacctttatactaggagcttaaaatattcaggatttgggtttttcttcatctcatttaaaatgaaatttagaatttaatggttaatttaatttagtaaatttggcataatttttaacacatctactttgtcctttaaaaagaaaaactgagtcagtaaataataattttaatttgcttagaaggattttttaaaattccaaggataggtagctgctcatttatactctgcctagtctaatttttattgtttcgtattggtaatttttatttttatttatctatttattttattgtggtaagaactggtacttctttttttctaatgatgtttataggtagggtttgtgtgtgtgtcttattttttataaaattattttaaacttgtagaaaagttgcaagactagtaaaakaattcttgaatatccttcacccagattccccaaatgttaayttttactacatttgctttattcgatgtagtttttctctaccatttgggaacatataaactaaattattttttggtgacttctgcgttttcatttagatttacaatttttttttatccactgttcaggaattgaaccaaagttaaacatccttgaaattgttaaacctgcggacactgttgaggttgttattgatccagatgcccaccatgctgaatcagaagcacatcttgttgaagaagctcaagtgataactcttgatggcacaaaacacatcacaaccatttcagatgaaacttcagaacaagtgacaagatgggctgctgcactggaaggctataggaaagaacaagaacgccttgggataccctatggtaataaaatgcataattctatattgggtagaataataggaattaagcttgacatagaagacactagggtaagttataatctattttacatgtagagttattaggatgaatgttgattttctgtatctctcttttaattgtaacgcacatttaagctcatgtggtggacaaattctgtcctgcgtgcaggaaatacaaagaagtctaaaaaatttctgctcttagggtgttgagagtgtagttgaagagagagaagatagatgaaaagagataattgccataaaaggtaacatgtttttaaactgccagtaactcttgtagaagtatgctattggaatctcaaagagatcatagttgccctgagggaaagctgaaaagagtttattataaataagataccattgggcagagaaagacatttaagacaggaaatgttatgtgcaaagcttagacctgggggtatgcatgagtagtgagaaaatggagtggttaaggagttactctgtagcattacagaactgtttttgattgatgaaaatgataattgaaaaatgaatatggtggcaatatatggcataagttggaacaggtagagactaagtgaagggaaaacaggagcatattattatagttgtgactggatgataatgtctacattagcccagactccagatgatttctttgggagtagcaaggaaaaagtggatgaaaacagtgataggactgagcagattgacagattttatgagggtagagagggaagatacaagtattgatctaacttctcaagcttcatcttggtgactaaaacagtaataatcttgataaaaattggttccatcatcattacatatttagtgaacactaccgtacaccaggcaccatgttaaatgctgggcttaattaagatggtgcactatgaagagcatgctttcaaaagcccagttggggaagtagagaagtctggtataggaaatgtttttttcaagagaaggtggatagcacttgattttgatgtggaagtttatattcagctggaggttagccagaaaatggtttcagttatataagatttgggctggagacaaagatgttatatgagactcattcccactgaatttatatttgaagctataaaagtctacgtagtccctgatggaaagcgagaaatggaaaagaacacacaactaaaggcatatacacttgaccctgtaaacatttagggttggagaaaagggagacaagaaataactgaagagacagaaagaaagtaataacttatatgtatagtgtcactgaaattgaggggagagtttggatggtcaagactctcagatgctgctgagaaagtcaaagaatgctgactgatatctattaaatttgatgatcagaggattattcttaaatttagacagaagtaactagagttggcgagacaaaayagaattataagaaatagatatcttagaaatgggggcagatgaggaagaatgctggggtaacaaataaataatactgatcttccaagagttggcggggacctgagtgtrtttgtaaatgaaacagtattgtcgggtttttgtcctttttttattttttatttttagagacaaggttgtacctggggagcagggctgatgacagaaaggctgtattgtagaaccactgttttccctaggacattttttttctttctttaaaccaaacctaaaagatacacagtaaatgagagagcttacccatggaactgaaagagagctatggaaccagacagctaatgtagaatttcagtctgtccctccgctgcccagtactgtagccactaatcacacgtcagcacttgaagtgtctctggtcaaaattaagatgggttgtaaatgtaaaaatacccattaaaagaaaaagtataaaatcttttctaattttttatattaattaccagttgaaataacatttggaacattaagttaaaataaattcattattaagatgtatttgaccaactttttaaatgtaactattagaaaatttaaaattacataatggtctgcattgtatttctgttggacagccctgatcttgataattgtagccttcagttctggatgttcttactgcattattttgataaatacctgtgttctttttgctggaactcctgttgaatctcttgagttgatctgctgcatcttwtttcttgtttatttttcatcttacctatctgcactactttctgccagattttcttgtgtttttaatataacctatctgatttttaatttacaagggctcttcatttttgtttgttcctttctgtagcattctgatcttatattgccaatatcgtgttttctcctacttctctgagtatattgattatatatttttttttaacttttaaaaagctttaccgtggtatatctgtttcttgtggattctgtttttcttgtggtttttgtttgtgttgtttttaacctttcccaagtatctaattatttttgcccatcttttcatatttaagaattaatcactttaggccaggcacagtggctcatgcctgtaatcccagcactttgggaggctgaggcaggtgggtcacttgaggccaggagtttgagaccagcctggctaacatggtaaaacctgtttctactaaaaacacaaaaattagctgggcgtggtggtrcatgcctgtaatcccagctacttgggaggctgaggcacaagaatctcttgaacctgggaggcggacgttgcagtgagccgaaattgcaccagtgcactccagcctgggcaacaaagtgagactccatctcgaaagaaaaaaaataagagtaaataactttaaagctaattaatgcgaagttctgaaggatttgataactatatgctgataaaacgaggcattgactatttcattaaaagaatttcaggccaggtgtgttggctcatgcctataatcccagcacgttgggaggctgaggtgagagggtttcttgaggccaggagtttgagaccagcctgggctatatagccagactgtctccaaaaaatagaaaaaagagctgggcatggtggcatacaccaatatcctaggaggctaagctgggaaaattgcttgagctctggagyttgaggctatagagagctttgatggcaccactatactccagcctgggtggcaaagcaagactgtctaaaaaaaaaaaaaaaaaaaargggcaaagaaaagagtttcaaacgtgtcaatatttatagatctttttgcagatacctgtcagcagtagaagataggggtgagcatttggggtaggtgtgtatgtgaatactgtgttgtggaactggaaaaggaagtagagcagggaggaggtagagaaggtggagacggtctcactcttcagtttataggcttttattactgggaattgttctctcagtgtctgttcgtgtctctccccatctattaataaatgttttcccggtgtccacatgtgtggggtgcactcatttaactggccccccaaatgaaagagagaccctggaggttctaaccacaccatctactttaaatcwgtctccttattttcagctttaagcctcttgctactcagaaccaccatgacttgaaccagtgaagggggttctgcaggcaggaattctctcacttcttactggcatcctccttggcaaacattttaggtcatagttttcccctcctatgccaaatcgattaccactctgcttattgtcttcaaaacattagattaaatctttcatccatgcctgtcactttgtactcatgttcctatgattttgcatcttttaaaaattcctttactgttgtttyactagagtcttagagaaaggaggcagaacatgggtggacaattagttatgttaaaccagaagtcctgatatttgagaaaacaaatcagacaaattatatttttccctgagttttttttatttttaaatttttatgtgaaattaactttgtttttcttttaaaagaggtgtgtttcaggatagcttttctatttaactctgcttctgttgttttcaagtagtatagtactcacagataaggcaactttctttttcagttcttgtcgacttttacctgggccttctcctctttccttttccttggcgtccctctgctgctcacttctagttccactctgccagtttctccttactgtgggccattctcctgaaagtggttcttggctcagtttgacaaacacccaggtgctacattgcttcagccctttaaatcttaacacacactgcagctattggattgggcgaaactgctttttagcgttgctttcatcttgtcctgttgtactttgaatgcatgcttcttggctgcgctcaggttttcctatgatcagagtgggtcacacttcccttgcttccctttgctttctcctgcacacaagctaagaccatggaggtcttatagctgttattgctttgtctttaccctcttgtatcttgaggtccatgaagatatcttgtcacctggttttatgtaaatgttcrtgggtttttggttttgttctccagtcacttttttatgtttatgtgtacaattcagaaaaattaaaaaactttgccaccatcttcctagaatcctcacttaacaactttatggaaaaattttaaaatatatattctgtggctattaatcctgtattcttagaatgcttgcttttgccttttgaggctagggcacctctgttcctttagtctcaaatggaatagtttcagtttcaatagcactttgcctctttgaagaacttttataaaattcttatgtttgatttattttcactataatttgccctcgatacctaaatgttattttttttctacttttcttattgaatagcatttatttattgggtatataaccaatattatttgaatagatcatcttcttaaagtgggagtaccagaaccaaaactaatttagctaatatgtattaaacttacacagatagaatgctctattaggtgcgggtgatacagcaatgtaatatttatagatattggccatatttttttatttatgaattcaattaggtagtaaatgatagggaaaaggaaaattatttggatatactctttaagattaaacaagtgtatgagcaaggcactgttaggttctaaagatagaatggtttacaagacacatttcttgtatttmttagtgtgttgtgaggggacagctgagtaaaacaggcaattaccatgtttatttatttattggaaatgcatcataagggtaaatgcaggagcagccagctttttacaggaaggaaaagggaggaaaaaggatatggttcatagtttggagaataaagctagcttcttagaatccccttttgattttttttcaatgcaactgcaaatttttttaaacttggataatttactttattctctccagaataatctcatattttattctttcatttggcccactggagagcagttttgcattttgtttttcttgatacagttccagctgaggttgaaccaagtgactgcatcagaaatttagattaagaaattggaaaggagctgaggaaaaaattacagcataatttttttttttttttttttttttgcttcatatagtaagtttacctcatatacttggggaaagaaaacatctgtgtgtatgtgtgtgtattgagaagttaactgtaaatttacacagtatctaaaatggaactaggctaaagtgaatatttttctttctagatcccatacagtggtccacagaccaagtcctgcattgggtggtttgggtaatgaaggaattcagcatgaccgatatagacctcaccacactcaacatttcggggagagaattatgtagtctcaaccaagaagatttttttcagcgggttcctcggggagaaattctctggagtcatctggaacttctccgaaaatgtatgaaattacagttatttctttacattgtaatttaagcttaattttatttccttgtaactttgttttcatcttagttgtttattgataatgataagtaataagcaataataattaacatttatttactgtataatgctatgctgaaagctctatatgttctttaattcctatagtaacaccataagtcattactttgcttattttttagataggaaagtgaggctttgagagccccataaagtcacagctaggaagtggcagagccaggattcaagcccaggctaacattagaatccaagttcttaaatcagatgctgtgccctacacttagccctcttcatatattccatttgttgccttctgtttgatcagctcttacatttactgctcatctagaaacggaagagatcatttgtttacaggtggcttcctacccattctcttcattattgatgagattaaatcttttttgaagtctttactattaattgaatagagtcttaagagggaaggaagtgtatgcagccaccttttggcattggaagccattggttataagtttttccacttataacttgtaaggcttcagacattattatgattaagtgaccatgtaaagaaattggatgaggcaggcagatcacttgaggttagaagttcgagaccagcctggccaacgtggtgaaaccccatctccactaaaaatacaaaaaataggcggacaaggtggtgcgtgtctgtagtcctacctacttgggaggttgaggcgagaggatagcctgaacctgaaaggcggaggttgcagtgagctgagactgcgccactacactccagcatggtgacagagcaagagtctcaattggaaaaaaaagagagagagaagtttggaaactacttggctgtccaagaaaacaaggcacaaatgtaaattatttttgcttgaattttaatccatcttatatttcagtcactgttaagacaccgaaagcaacccattccttgacagttttgcatatcagaaatgctagccagacccacatatttttcagaacacatgactacaacatactctgactttgcttttgtatcagttatggatgaaaatgttaatgatagcattttgttttattatatacccaataaggagagagctctggtggagggatttttccaccgtaattcaatgcttgcagttttcattcaaggtgctttctctggccaggtgcagtggctcactcctgtaaccccagcactttgggagtctggggtgggcagatcacttgagatgaggagttgaaagtgctttctctgctggtgaataagaaatgagctctggagagaggcatttcttaattgtttataattttattcttgtgaggattctcccagatgttttttttaagtatctatgatactaaaagacttagtacattcattgtatttgcagcatttatttccaatttccattcttactagataagtaagttgaatgtcctggttgaagctttgtccttggtttcacagatttccttccctgcagaggttttgaaatgaataaggtagattctgaattgtgaaacatgtgagtcatgtttattgaaacactttcttataagaaatctcaagaacacaacaaagatagtgcatagatggtagtttcatttttcccaaatccacgttttttccagtctttcccaggtcagctgtttgttgtggctgtctctttctggttctcttattgcttctcaaactttaaagcttattcataggcttttcccagaacagaagtcaaaggtgtcttgtgtatctttccatttccatgcagttgaatgagtcttcctcagaaaagctctgctctggaaccattgctttgtcttttaaagcaacaaagtcccacagcctagatgagtgtctcacggaatttcttggtgatccagccatggttcttcactctgccggggtagggaaatcccatctgctttggaaatctagtgctcagttcagaattgggagatgggcaggatgatgtgtaagggtatttctaacagactttctagaattcacaagtcttacttctcagaayagggttttttgagctcagtgtagttagtactctggtcccttctgtagagagaagtctgcagcctatctgcgaaaggcactgattctgggacagaactgttaataacccagcctctattatccatcctcagtgatctctcaagaagcagcagtactgaagaggtagggctccttcttcagatatttgtatgagattattcacctgagccaccacctgcctgcagtcccccctatgttgaaactacatccaagtcccactatacatgggaggataattaggaaatgtcccagtactaccagttccatgatgtccttctcggtgtgaatctctgtcttctgtcaccaaaggcaaatgaagttctcagtttgctaagggttttatttaggaaaaataattgttttattcctgtagtgtctaatgtttcttcataaaatggctccatatcccccagggctttgcctctcaagactgcttactttgtgtgtagcaaggatttggaggtttcagggaggaatgtgatattcagagtgcctgtactttgaagagattggtcttggaccagtctttcaaaaactttttttttttccccctgtggtctgccttctgtcttgagagtttccaggaaacagaccaaactccaatctgagaattaggacttagaaggtgattttacaagttgattatgcctgtgctgtgtgatggtgatgctttcgtttgcctcttttgaggctaggttcctttagtctcaaatagttcctctttgaggaacttttataaaattctgaggaaaatttactacaaacataaagtgcgtattttttttatcaagagagaccacagttctggaggagaatgctcagaactaggagtctggataaaacagtgaggttgtcagttgactgaaaaagtaactgttttgtgcactgtgctttttaaaaacatgtttctttaatcctcacaataacctcatgaggcagtaagtataggtgtctaatttaaacttgaagaagttaatgttgaaagaggtcggtaattttaccaaagtcatatagtcagtaagagctaagaactaaatccagatctgtctgaagccagtcccatataattcttaagtcctcagtcttcagaccctcaaagctcccatctgataggattctgacctctttttacttccccaaccttttccagctctgcgtgtctggaactggatcctggcaaggcacccttagcggagtcttcttgggagcccaggcctcagtacccagaatgattgctggagggtatagtttcaatttcaagagagaggcatgcaatttgtgatgggcacaaagtaggctgaagtaatagagactgggatgtgcaattcttgtgagaggtaaagaataacatctaagtagggaataacaacagataagtaatgaatggttctgtaaagccttatctcaggacctttatagtatttttattttgggaactatatttttaaatgtgaaattatttagtttaattgagacatttaggactgctacaattgtgttgaaaatttgctgtctttaagtagaagcattataaagcttaagcagctttagtcaaaagtggatgttataacaaataatgggaaggaggcctttttggtggagatacgtacctaaataatttaattttggtgtatattttatctttgatctgatcttgaagatttccatatttttacatggctttatgtggatttcaatacaaatgtttacatttagaaaaccatagttctctgcagaactttactgaacactaaaagacattggagcttttccctgtgttatttctcttaaggtatcttttccttttaaagtgactatcaaatatttttaaggtttttatgccagtaagtttcagttcagtgttttggttttaattgtggagttctttttaaaagaaccatgtttattaagttgagttttattggattggggtttttatatttttggttttaaataaaaacaaaaaatttttgtttttttcagatgtattggcaagtcaagaacaacagatgaatgaaatagttacaattgatcaacgtgagtatttgtacctatatttgcccttttattaataagaaatgtttatttgataccgcaaggtaataaaaaggaaaattatttaaaaaaattttttttctacacacaaaatatcttttgttctgtggaatgaaagctcgacacargtactttataagatccactcatgtgtttttaaatgatacgattaacataacagcttgctttgtatctcagttcaccaaaatttgttaggacatcatttgtttcatctttactgactgttaattaccaagttgtaagaacaattctaaccacattcatacctgacagaactttcatgcctgataataactggatattaggtagcatccaattgaaatatcagtataggttggatacagcagagaaaatattcaagtgtccaaaacaaacttgaggagttacartgggtttgaaatgaagaaaaaaggccaagttaaaataggaaaacaaatagttttcatttggtgggagttgcaatcaaagtatacagttgtatacattctaatggatcatctgtcccatgtggcattttccaaggcttgaagagtctaccagggcaaacccttcgccgcctccactacttttgcttggcttttcccctttcttttctctcgctttgccttcagctttattctttacctttgattcatctatattgggtactgtacttgctagaagtacagtctagaagagtctttttgtttctcttaatatccatctccattttcatgtcatcttttccatcttttacctcatgttgcattttctcttggcatgtttgggtttgggtaccaccacagttgctgtctcttaaacatctttcattaaaacattactgtctagtttgagaatacttttaagmctgctgagctcttttggggcattttyccccccttttcagcatgcatctttcttttccgcttatgccataagcttttagctatgttttacctgaggtacgaacacacacgtcacaagatcatcccaaccggctaaaatttttaatgaggaatttgagatacacaaagaaagtataactaacacctgtgtacatcattagaaataaaattttttacaccaagtatacctgttgtaggtttcattttcctctctcctaccagagaactatcttgaattttatgtttattactgtctgcatattttatatttttaccaactatgtaatcgtaaacactgtatagcattgttttccacatgtttaaacattgtttgtaaaataatacattgtacatattattttataacttttttatcatttgagaattactcatgttgatacttgcagctgtttcattcattttcactgctgtatcttttaaatgctgtgaaaacatcattgaatgaatatttgtaagaacatgtgtgagatgttcgtgtcatagggtttctatcctttcagccttactccagatattgccagattctcaaagtggtggtgtgaattctcatttgtccacatttagtacaatatatttgacaaaccgtttttatgaacaaatgttttaagaacaaacatgtttaaatactctttgtctaatgtgtatgcatcactaagttatttccaaacaagaatactagctcttactaagatgcacaaactataatgcaagcgttatactttaccatctgaacttttttgttattttgtttgaaattgtggattgaggctttctgtagtgaagtactttcttgggggtaattcatagggcattagttaaagtgataatgtctttcagtaattttttttttttcctgcttgtattggaagaaaaaaaatttctccttgtctgtctttgcagctgtgcaaattattccagcatcagtgcaatctgctacacctactaccattaaagttataaatagtagtgygaaagcagccaaagtacaaagagcgccgaggatttcaggagaagatagaagctcacctgggaacagaacaggtatttttgtattttcttgtatttataaaatatatctatctaattaggtatattttgttgtwttttactgtatgaaaaatgtgaatttggactatccctctggcagtttttagacagcatttctagaaaaacaaaaattgtttttgccatggctgagatttaaaccacgggaccagtttgttgtctttgccttgggctaatctataacactatagctaatgctttgttcctcttaccaatttaggaaacaatggccaaatccaactatgrcagtttttgctagaacttcttactgataaggacgctcgagactgyatttcttgggttggtgatraaggtgaatttaagctaaatcagcctgaactggttgcacaraaatggggacagcgtaaaaataagcctacgatgaactatgagaaactcagtcgtgcattaaggtawgcctttattacttttttttctgttatcaaaaatagaaactttctaaaaaatagtttcttattctagatgtaataagcattgttatgtaatgatattaaaaacttgtttatgtttttttctttacatattaaaaaacctttttaaaaagatcttaataatttcgaggtacagttttttttttacaaaattactctaagattgtttgtttttatctgatttgaaagctataatactctgtcccaaaaaaaaatgtttaatttttgaggtttttattatttgcatagatgaattgagtgttagtttttaatgagtaagcagaaactgtcctctgtttttacaattacaagcagaatattgacccattttctacacaatctgcctaaatctggatatccaatctttacattgatacaaactctccgtaagtagtataaggttttttgacagaaattactatcagaaattatgcctactacagtgatggaaattcaacaggtacatttaagtatctgagaagaaggatatataagaatatcacggaattatgtctgattttttgggagattgaatatagtaaaatagttctgcaattcacgagtttttctaaatagcatgcttttactgcttcttcatgtttcacttggccattttcacactgaaagattataatttagctcacacacacacactctcccttcccctttccatcccttcatctcagtatcccaatataattatatggaaattttggttcagcgagtattcattgttacagtattacggccatgtaactattattacatagttggctgtgattatttttcttttcctgaatgaccctttttttctcagagttcatgagtaactaaaatgtttagttttcaaaatgcttatcctttaccattcagtctcaaacacattgccaactgtctaaagattcttcgtttataatcataattaaagctgccatttttgagagttgatacagattgtatacatacaagtcccctcaaaattacaggtaaattgttagagttaataattaagatgtcagttcccccccagattgatctaagtttcagtgcagcaacttagtttaatttgaaaaatcaaactaagtttttcatagaacttgagaagataattgtaaaatttacatgggactataaagtaccatggtagtcaggacacctgaagattagcaaagtggaaagacttgtcccacaggatattgagactgactctaaagttacagtaataagacagttatgctattttctcaagacaaataggccatacagtagaatagggagccaaaatagaaccaggaatatgtaagcatttgatttaaagaaatggcagtggggagaaaacatatgaggaaacgacctgcttttcaataatcagtgctgggataatttactctccatctctggggaaaagtaaaagttgacctcttgcttatgccgtaccaaaaatcaattccatgtagcttgtagctctacatgtaaaaagtaaaatagaaaaggatctagaaatactttcataacttctggtggtagggagacatttaaacagaatcaaaaggactaattctaaagggaaagatcaataaactggactatatttaaattaggaatttctgttcgttgaaagccttattaagagagccacacatgtcggacagaagtatctagaatatctaaccaattcttacaaatcaattttttaatgggcaagagacttgaatagacacctcaggctagagattatccaaatggccaatgaatatatgcaaaggtgtacggcctcattagtattcagagtaatgcaattgaaaaccataattaaatggtacaactcaccccctagagtggctacaatttaaaagattgccagaactaagctctgttgaggatatggagcaatgggaatgcttctacccttttgataggaatgtaaattgtaacagttgctcccctaagcaactgtttcatacacatcaaacagagatgtacttctatgcccatacacatgttcatagcagattatttataacatccaaaccccagaaacaaccagatatctatcaacagtagagtgaatgaatcatttatggtatattcatacaagaataccttgcattcttgaaaactaagctcctgctacaaacaatgaccagtgaacctcacaaacataatgttcagtgacagaatccagacccaaaagaccaaattctgtatgattacatttatttagtaaagttcaaaaaacaggaaaattaaatttcagtatttagggatgcatgtttgggtgataaaaatataaagaaaaagcagtcaaattactatcatgatacaggcttgtgtttaccttttagagccaggatttggggagtgattgggaggggacataaaggggattctagatgctggcagtgttctgtttcttgacctgagtgatacttaacaggtgagtgaatgttcactttgtaataaatcactgaactgttcacttctgtgtccttttgtttgtgtgatatatttgcaattaaaaagtttaaaaaaatacaagtttaaaaaaaaagagggaagaaaagaaatcatatccatgaaatacaggtattgtgtatctttcattttagggaggcaacaagtggaataaatgctactatatacagttgtgtgatgcatctactagatcaaaagaagtattcagtaaaattcaaatttatgtgtgtatattcttttttatcacctcttaccaagaaatatgattatgccaactccattttcctcctagaattataaaacctctttccttttccattttcctttttttccccacgtatagtcttacatattaatgtagaaattttttaaagcaattgatatgcctatagcatttttaactggatggcaaggaattgttggtttatgagctgaaatccaaattctgtactaatgtaattgacataaatggaaactacaagactgcccaatgtgttatatctcttactgggaaatcaaacataactatttttcttttgctattctggaattagggaaagatgacaatttcctgtatataggtcagtcctttcattaatagactcttgattaagccaagtgacttttatcctgctaaatgtgatagtttatatctggtacttttgcaaatagttgtttcttttataatagccctttgtcagtgggcagtgcaattttaaaataagggctttgcaatctgccagtcgtggaaagagcttgacttgcctctttttcctgttgttggaattagcaatacatagtgtgtgtttaaataaagtctgttttccaaaggaaacataaatccagctccatttgcatctctatagaatgcagcagtaaactagatttctagaatgattgccggaactctgcttgtgtacgtttagaaacattgtctctttgcaatgtcctttacstgtttttctgtatcctctgtttcttttagaccttttccttagacttaaagctccctattgggcttggataatttatctgaaatttggaaagcgtttacatagtgaaataataaagatgaagacatgacttcatcatataggattctttacaagacagaaaagaagtggaatatatgtattaatttttttkatattatcgatttttattaacatagcttatattttgtagagggctgtgtgccagtcattgtatactaagcactttacaaagattatccctttaatcctcaacaatgrtatgagggtataagcactgttaacctcactttatagatgaggaataaaagctttgagaaaatatgactcctgtggtctcaaaaatgttaggttttgaatcttggctttctgactccaaagctcttgttcttaggctcttctactgctctcaaggttttttgttttgtttaataattatttttaaatcaatgttttattctaattgttgaaaatatgttttgaaagtttaatgtatagagttttggagtagtgagcattgaaattttagtaaataatgttgggatgtttcatttgatagtagcattaaatattctacatagcttcaatattaattgctattgtggcggatgcagtactctactaggcttctgcttatggaatagtctgtaaattattgtaagaagtctcattttttctgaagtctctratttttttttctctttttgaagatattattacgatggggacatgatttgtaaagttcaaggcaaragatttgtgtacaagtttgtctgtgacttgaagactcttattggatacagtgcagcggagttgaaccgtttggtcacagaatgtgaacagaagaaacttgcaaagatgcagctccatggaattgcccagccagtcacagyagtagctctggctactgcttctctgcaaacggaaaaggataattgagccccaggacattctgagactccaaagtctttcttaaaatgtttagagcaagtatagctcttacctttattactgaatttgaatcttcttttatttctaggctgtacagtctgatgcatgatttttttataaatatttcatactcttgtgaatttggatctttttactttgagcatatattttagaatatgtgtrtgttaaaggatctccacaatgtctgcagtgtgaaggcaggttcattgtggaatagtttaacagtcaggaaggctaaactggtcagtattaatgtgtagccctaccaaaaatagccagtagtatctgaaaatgaaaaawaaatgaagtatctctaggaaacagtctggcttaactatttttgaaaatataactgtttcccctctctgctgctttagatgttgctttacatagaaccagaaaatggaatttctcagctaaagcatgtgtgcctgtttcatctaatcaagcagagctaaaatgttcataccgaataaatttatattaataaattactaaactaagagtatcaggttatttatatatttgcaagcaaaggacagtaagaagttgactggcaaaagagcagtgctgaaggaggagatccaggtttaaatctggcttattaactcaagccaattttaaggattttctgtatagattactcatgtcagaccaagaatttaaattattttgagagaggcatttaattctaataaaccagctgttataaaaattataaaatgatctctgtttttcctgtcagagatttaaaaaactgaaaaggtatacctcaacccaaaaataaaggtttgttttggtttgttatggcttccttttttaaaaaattaccctgtagtgccagtttattatgcaaagcagcttatattcctttgtttctgataaaatgaagactttaaatcagtcagtagtactttacctttcaaggcattagtaaattacttgcaaatagttttaaaaggaaaatacgacctttgttataggcagtcttctctttaagacaatacttttccacttgttttccttttccatattatatatgtgtattcatatagctgtatacatattcagttgatcattttataaacatatgaaggcataaagatatacagaagaaaaattattaaacaactcattttaagattcaaattaactaattcctgcatatatgacattccttacataagcgaacactaaacaaaaatggctagaaatgtctttttctttcttttctctctttgttgtttaaggtattaagcacgaattattacatgagactggcagatagctattaatcctcttacagatttgagaaagttgattctcaaatatttatgcaccttctccttcattgttttctttaaatctgtcctcttaaaaagcttcttaagagctcagttaatgcttttgacttaactaggagaaaaaggcatgataatacaggcaagatggcattgttagcaattctggtagtggtttggaatgaatcctaagaggcagggatcttaaggacaaggaagagaagagagagagggagggatctttgatctctttctctggtaatcttaatgcataattttactaawacatgttctcaattcattcatattattaagctcttcctgcagttgatatctgagcagagtaagatttgtatttccatttttacttttttgaaagagaatatatggacagattattartacaatttgggcactgtggttttaagaatatctgagtaaaataacaatatgaaataataaacagaagctctaacgtcaggtaacaaatagacagcaagaaaggttttgcaccatcctcttacggcctagagagttgacaagttgcttgtagttttaaaaaaataataaagtatacccttctggtatatcatcaagagcttaagaatcttggctttcatatttaaaatgcttttggggagacatatattaaaattttagccaagatgatrgacatgtctcaattatatatgtgtgtgtatgtttttaaagctaaaaacattacttttagatccctagaatgaaaatttttttctcatctatgcaattcccatatggtttttttttaaatcatattttattcattttctccctttagcaattttcattttatttctcataatttgaacagagacagttctcatacatgatcagatgctttttttttcttcttaccatcatttatgcatgacataggtaatgtgactaatttctccagttgattcaagaaactcattactttgcctcaaattatatgtaaaatatttgttttacttaggttacagttatcagaaaggtagtttttttcttctattaaaatataacattgtgaaagaaaataaaatttatgctattctttgctttgtttttataaatgaatttttcatagaatttacagtatattcaaaggaagaaagataaaattattggtcatcatttgtaccttagaagtacaagaatttaagtaaaagaaatgttcatttttgttttaaaatttgttttccatgtgaagtttttattgagccaactttcatacatatcttgctagcctaaagtctaaatatttgtgttggcatcagaaaaacaaatgaggcagaattgctatgtgtggttgatcttcagataaattgactgatcacagttatttttgtatcagtctatgttattaggaaaaattgtttagttgttttctcccctgattaatggtgatattcaagtatgatacaaaaagaattgtaccaccaaatatttttgtgaggtctgctgttttccatattcattttatgctactgcctttaagaaagaactagtgtatccttgaaatagcacaaaaatgttttaaaattcataattgcaaaacaaatctgtgactaacttaatgtcttcagatctaaagggtgtaaaaatattgatacttcaatatttcacttgctgccaggaaaaacaaaattctcaatcttttgtaaatgggaggaggacttttgcatacatttttactctttaaataacgacaacgacacttatactgtcataataacaattatgtatttctttgtggttttaattttttttgtaattttacataaaacagttattttctatttttacgcagataaatatttgtgcataaaatgtaaaaatagtaaaatgagaaaaataaaactattatacagtatgtttctgtgttgcttaaaagttttttttcctgaaaacaaaatcttaaatccccaggatattttgttggatagtaatctgacagtccacttatgatacgttgtacataggattccgatgcatttttaaacttaaaagctgtcaatttgggaagaacatatttcactgaactaaaattagtaggttcatctctttgaggaaattaatgaaattccatctacaaagccaagttgttttagaatagtaacagatgaagctgtcagaaggcaagctgatgattgctaaattgtaaacctttcataaagcctttttttttaacaaacaaaaaatcacctgttcatgttggctatcagcaggttgcttcagccagaatcagaatatagaagaatggaaagggttaggaaaaagtgattcatgcctgccttcatggtgaagcaatgatgaaagtttgattgacatgcttaaataggaagttatggttagaaataaatggctttaaaaatacacagtgtgattgtatctagttcgaagcaatcaaaaaccatcagccaggacgctagtgaggtatgtttgttctcccaggacttcagttttttgtgtgtacagcttcagagtttaatttacaagccaagtatgtgtttaaaatgctttttactgataaactgacaactttagaacactgcttttaaaaatttccgtagtgaaggaccactttcttatttccaatttgtcacagacaaacatctgtaaaataaaaactgaattagtacagggagggggaaatgggaagttactgtttaatgggcatagagtttcagttttgcaagatgaaaaacaagatggttacacaactataaacatgcttaacaataccaaaccgtattaaagatggttaagatggtaaatttcatattatgtatattttaccacagttgagttttttttttaaagaatgaattactataagaattttaaaaattcagtatttaccaaattaacaatacaatgggggaggaacacattcaactcaatagatgcagaaaaatgtacaacttgacatccattcatgattaaaactctcagcaaactagagaacttctttaacctgataaaaaggtatctgtggaaaaacctacaactaacatcacgtttgttgcccctcaccactccgcccccctccccacaagatttgggaaacgcaaagaggtacctgcttttataatttttattcagaattgtatcctagtctgtgaaataaggtaagaaaaataaaaagcatacatactgcaaaaaataaaactgcagaaggcatcagacatgttaaaacgccctcaagaatcaaaaagttatgagaatatagcaaggtaaggtacaaggtcaatatgcgaagttcaattttatttctgcgtgctagaaactaataaatggaaattaatatttaaaaaccaccatttacaataatattaacgtgaaatagggacaaatagagcaaaatttgtgcaagacctatcaatgaaaactatagaacttgcaaagaaatgaaagaatgtctaagtaggtggagatataacaccataattctggattggaagactcaattttgggttttcttgtttttttttgagacagtctcactcactgtgtcacccaagctggagtacagtagtgcgatctcagcccactacaacctccgcctcctgggttcaagcgattctcatgcttcagcctcccaaatagctgggattacaggcatgtcccatgacacctggctgattttttgtatttttagtagagttgggggcttcgctatgttggccaggctggtctcgaactcctgacctcaagtgatctgcctggctcggcctcctgaagtgctgggattacaggcgtgagcaccgtgcctggcctaagacccaattgtgtaaatgtaaatcttgtaaatgttagttattcctaaattgacctataaattgaattacaacaaaaattctgccagtctttttttgtagacaagctagttataaaatttatatgtaaatacaaatgacacagaatagccaaaatattttggaaaaagagaacttgcactgtgctatataaagctttgctatataaagctacagcaatcaagaggtggtatttaggtaaggataaatgtatataggtcaatgaacagaatagaatccagaaatggacccacatatatggctcattgatttttggtgccaaaatcaaaggtgccaaggtaattcaatagggaaagggtagttatttcaacaaatgttagaacaactgcatatattcatggagaaaaacccttgcctcataccacacataaaaacaatggattatagacctaaatataaaatctaaaacttattaaggaattttcataaccttggggtagataaagatttcctagatattaaagaagcaaaactaggctggatgtggtggctcatacctgtaaatacagtgctttggaaagctgaggcaggaagattacttgaggccatgagttttgagaccagcctgggcaacatagcaagaccctatctctacaaaaatataaaagttaaaataaaattagctgggcatggttgtgtacggctgtagttccagctactcagaaggctgaggagggaggattgcttgagcccaggttaaaattcgaggttcaagtgcaggttgagtttgaggttacagtgaggtatgattctgccgctacaacagcactccagtctgggggtgacagagtgagacgctgtatctaataaaaaaaaaaaaagacagtaaattggacttcatcaaaaatttttaaaacacctgttatttgaaagatactattaaaataaaaggcaaggctgggtgtagtgacacatgcctgtaatttcattgctttgggaggctgactggggaggactgcttgaacccaggagtttgagaccagcctgggcaacatcgtgagaccccctctctatgaaaaaaaaaaatttaattagccaaccttggtagcatggacctgtagttctggctactcagaagcctgaggcaggaacactgtttgagtccaggagtttgaggttataataagctatgatcataccagtgcactctagcctgggtgagagagcaagaccctgtctcaaaaaaaaaaaaaaaaaaaagaaaagaaaattaaataaaggacaaggtacagattggaagaaaatatttgcaatacacttatcttacctaggttacaaaggtaagataagtgtattgaccacactgatttataatattttgtcattaagcaatgagcatcagttgtaactgaatgattatggcaatattaatatcttacaaaggtaagatatttaatatcaaaatatatgataaattcttttaactcactaagataatcaaataatttatggtcaaaggatttgtacagacacttcataaaaaaagatatacatatggccagtaagcatatgaaaagctatttggcattattagttatcacgaaataccaagtcacaatccagtaccactaaaaacacattacaactgctaaaagttaaaagactcacaataccaactgttctcaatgacatggaccaaatgaagtcacacacattgctagtggaaatgtaaaatggcacactactttggaaaagttaaacacttttgtcacgacacagcaattctaatcctaggcatttattttatgtatttatttttttgagacagagcttcactcttgtcacccaggctagagtgcaatggtgcgatctcggctcactgcaacctccacctcccaggttcaagtgattctcctgcctcagcctcccaagtacctgggattacaggcaccagccatcaagtccgggtaatttttgtatttttagtggagacagagttttgccacgttggccgggctagtctcgaactcccgacctcaggtgatctgcccgcctaggcctcccaaagtgctggcattacaggtatgagccaccgtggctggcccaatcctagacatttatttaagagaaataaaatatgttcactgaaagacttgtacacgaatgtttataacagctttattcataatgtctccaaactgttaacacaaatatccatcagcaggtgactgaataaacaaattatgaatacccatagaacagaagtacgactcagcaataaaagggagtgaacaactgcctcatcaacaactctggaaaaggcaaatctcattgtaaggatagaaagcagatcactggttgcctagggctagggataatggttgatttcctggattaggcataaagaaatttgggaggatgatgagcatagcctatattatgctttgttgacgattacatggatgaacagatttgtcaaaactcatctaaatgtatacttaaaataggtgcatggggttatgtaaatttcacctcaataagcttaaaaactgaattactagagaaatgaaatttaaaagacaaaaatacataaccactttttaaaaattattagattccacaagcataagattgctatatcaaattatcaaaattgttttaatgcttgctcttatctccctgtggactgatgacaaacagttcacggactgaccacactgatctacaacatttcatcaactgatgagcatcagttttaactgaacgattatggcaatgttaatggtatttgaaaatttctctgtaaaccttttttttttttttttttgagactgagagtctcactctgttacccaggctggagcgcagtggcttgatcttggctcactgcaacctccacttcctgagtttaagcgattctcctgcctcagcctccccagtacctgagattataggcctgcatcaccacgcccagctaatttttgtagttttagtagagacagggtttcaccatgttggccaggctggtcttgaactcctgagctcaagtgatctgcctgcctgagcctcccaaagtgctgggattacaggcatgagccaccatgcccggctgtaatgtgagaaaagcattttctcatgtctgctaacaagatagttgatttgggaatcttatttccatgatactagtaacacccagttagcacctatgctatttttataggtaacaccacagtaactagacatgaatgaaatagaacactgaagaaaaagttatttatcatatctatgagcaactctttaattcacttccttagaaaactatgcaaaaaggtttgctctaatactcacagtacgaatagagaaagtaagcttcctatctctaatgttggttttactttgtgaatgagagggcatattgcatattaatacactgataaacatcactgaatagttgaactagaatgttcatttgacttaatggttaaaggaaaaagctatgcattaagaactccatactaggattcttgtctccagctctcaaatcataaaaatagaggatttttgtttgtttttgagacagagtcactctgttgcccaggctgcagtgcagtggcacgatctcggctcactgcaaccttcaccttccaggttcaagcaattctcctgcctcagtcttccatgtagctgggattacaggtgtgagctaccacatctggctaatttttgtattttatagagatgaggtttcaccatgttggccaggctggtctcgaactcctgacctcaagtgatctggccaacttggcctcccaaagtgctggcgagaggtaacagcctgctagcagccctcgcagccctcactcgctctcggagcctcctcggccttggcgcccactctcgccgcgcttgaggagcccttcagcccgccgctgcactgtgggagtccctttctgggctggccaaggccggagccggctccctcagcttgcggggaagcgtggagggagaggcgcgggcgggaacccgggct

SEQ ID NO: 98144 - DNA, 76394 bp, Homo sapiens
ctttgggaggctgaggcaggtggatcacctgaggttaggagcatgagaccagcctggccaacatgacgaaaccccatctccactaaaaatacaaacattagccaggcatggtggcaggcatgtgtaatcccagttaatcaggaggctaaggcaagagattcatttgaacctgggaagcgtaggttgcagtgagccaagattgagccactatacaccagcctgggtaacagactgagactccgtctgaaaaaataaaaattaaaaaaaaaactaccatagatccataaaacggaatattatttggttactaaaattgttataatgcaatatatatataggaaaagacactcatgacaagatgttaagcaaaaaaaaagcaggttacaaccatatgtatagcaagatcccatttttgttaccagaaattgtatatgaatagccatatgcacacacacaaaaggatttgaagaaatatgtatgcaggtagtagacttacgggtatttcatagttttctactttatacttttctgtatttcaatttttctaccataaaacaattatctttttaaatacaaagaatattagttgctcatcataaactatattttaacctaaaagagatcaggagatttagtatttattttcaaaacttatattaatacatatttgatagcttattaaatactttcaatgtttagtctagtcattcaattaaaaaaattatacatagtaccaaggagttagcaataaacttttttttttcttttttttttgagacagggccttgctctgtcacccaggctagagtgcagtggcacaatcatagctcactgcagccttgatctcctgggttcaagtgattctcccacctcagcctccgaagtagctgggactatagacgcacaccaccaaagaaacttcttttttaagcaacagatttctacttactatcataaaagtccagtagtacaataattaaatgggttagcttttgagttttaggtatttttatacaccccaattctttatcatcactgtaactaccatttattaagtggatgtgtctcaaaaacttaggtaagcacttagaagtatgtgaactttattattactatttccatgttcagctgagaaatgaggcattgagaggttagatcaaactccctgactatgtgtggtcaaacacaatattctccaaagtttgagctcttaactacataatatctatggtgccctgtggtgaactcttgaaaagaaggtgtaaaggtcaaattttattagtatgaaaagtgaaattggaaaacataacaattttctctatttgctagaaaccaatttttatagcagtatgttggacttatggtttataaaatgatattttgatataagacaatataccaaatataagtttgatatatgatttaccactacactgtgacttaaatttacattttgactctctaagcaaatgctttgttctgaatcttctttctggctaatcaccttgagcacactacgcctgggaaaggctctctcctttctaaactaaccaaacttacagaagtcactggggtatagtgcttgtggctcctaatttataaaatcagtgactactaaaaaaaatttttttgtaatatgctgggctttaatatgccactaactgatagattaatttgacaagtaacttttaaaagattggcctcgctgcaatgtaattcacgtattcactcaacaaatgtttaattgagttcctccaggcactgttttaggccctggaggtagaggggtgaaccaaagcctctgccttctgaaaggtgtacgacaggtaaaattacgcaatcacagtcaattgttttttattagcagcctaagggataaaacttaatctgctacttgaaaaactttctatccacttcaggagctagtctcaggagatgctcagagagaaggaagccagtggtttccaacttccctatgcaggagaaattcctggagaatgcattaacaacaccaattccagggccccacctctagctgtctgattctgaagcgaggtgacagaaacccgtatttatttttatgtatttatttacttacttactttttggacacaggctcgctctctctgtcgcccaggctagaatgcagtagggcaatcatggctcactgcagcctccatctcctgggctcaagcgaaccagatcctcccacctcagcctctagaaaagctgggaatataggcacgagtcactaagcccagaatattaaaaaaaatttttttttagagaccaggtttccctgtgttgcccaagctggtctcaaattcctgggcccaagctattcctacttcagcctcccaaagtgttgggattacaagtttgatccaccatgcccaaaacctatatttttaacaagtgcctccattaatgctgatgtaagtgatctgaggcccacactttaagaaacccaaccagttaagtggagccattcaggaggaagtgatcattcagaagggaacagctctatggcagaagaatttgaggtgcataatataatcccaactctcgtgtcatcaattctctacaactcacaaatgttagcaaattaaaaagataatttagagtagaggaatttggacgaagcatggtggctcattcctctaatcctagctctttgggaggctgcctaggtgggagaatcgtttaaggtaggcgttttagaccagcctgagcaacacagagagaccctgtctctagaaaaaattttaaaattagctgggcatggtggcgtgcatctgtgatcccagatactctggaagctggggtgggaagatcactggagcccaggaggtcgaggctgcagtatgccaagattgcgccactgcactccagcctgtgacatagccagaccctgcctcaagaaaaaaaaaaaggaaaggaatttaccagcagctcctccttaatctcttacaggaggcttgatagtttgtcccagtctaggcacttggggaaaagataaacttgagcagaggttctactaccaatattgaagataagctttagggaaaagaaaattgctagtcgactgccaaaaaaaaaaaaaaatgctaacagcgacaaacatttcacagaactaacttgctaccactcattttatgccctatttcacaatgcttagtatctgtgcaatccgcagggttccaaagtacattaaaaatttgttcatttcctctcttactcaggcagaataataaaagagttttgtgacggtaccatgcgccgtagcaatttcaacagaagcattcctagataaagaaataccatttttttaaaaaaagatcatactatcagaaatgatctccactggactacttaaaggtgtctgaaataattttaacaccatcatcaaattagtgtccctcacttcttaatttatatgacttaaaagtccctggattctttacaaacccatctgcactaaggatttttctttcatatgtatgtatttttcaatgtttttacttacaaggaaactcccatcaaaataacgtttcaagcacaccagtaaaagaaattttaaacagaaacatattttgttctcagagataaactaagaaataataactatgaaggatgtttaagcttctgcactctcaaccttaaagtcatctaaaaataaaggtatcccaacaaatacattcctcctattcatattttgggggtttagagtggcaccatgcaaaccagctggcctgctgggtcctggccccagttcctgccctcacatcctgtccactacataatccatgagatctctgtgcctttcttttcatccgttccacgggattagcaaaactgcctccccgctgacagaactgagaatttctagaggcatttgtttgtatgggatttgctgttattatctaccctcttcattggccttgcctttattatctgtacgttttgatcaagaggagcagcaagagaagaatgccaacagacaagcacaaagaaacgcatctggccggagcctgcatgtatctaaatttccaggttgctgctgccctcagaatagcactgatgatggcaaagttctagaggaaactttcatattgaagaggctataaaaatctctatagcctccaactccacagagaagccgctaatctatttcttccaaagcaaagccttcttgagtctgaatcacaacaaaagattgcccataggaaatgtaatctccgaagttgttttctaatcccaaggcaagcagaagcgcaggaaggtgcggccgattcctcgccggtttcctttttttgggaattcggattgcattcgtgcaagcaagggactgcaattgtgtcttgggtccacaccacaaaaccgtgtcggtgcgtaagaagggaagggacgcggcggacccggggacgcgctcacagggcgcggaagacgctcccctttaaatgccttcaggggcggccccgcggcgcgccctggggccgaacggcattgcctgcccttcactgacccaggattctgcaggcttgcgagcgaggggccgaggaaggagccggggctccaggcagaggcggcgccgctcccgccaacgcgggtccccgggaggccggcgggaggcgaggccgggccgcccctcgccggcggccgagggcagcgaggtcagcccgggaaggagcggccgcccggggtccccgcgagaggagggagcccgctcggcggcggggccgcggcgcccattcatccccacgcccgtcccgcggccgccaccccacggcccaccgcggcccccggcctcccagtgcgggtccgcccgccactccgccgccacccccgaggacgggaaggacaaggcagaggggcagccgctgccgtctctcgggcgcgcggcgaggggctaagggcggccggggagacaagcgccgggcgcgggacggatgccccgggcagccatcgcgcagacccccgcgccgacccccgcccccgctgcagccgcccgtggtccaggccgccgccttgcagccctctcctcacctcatctccgggcgggtccgcgctgccgccccagggacaaatcagtgccgctcacgcgccgctgggagggacgcaggagccgcagccccgcacaccatccccgcccgcctctctgtccgtcccggagcccgctcgggattcttcctcgcgagccgccgtactacggagcaaccaagctacgctccctcccctggcgcctccactcttctctacctccttcgctccctccctcgctccctcgctcccgcctatctcctcatctccctccgctgcctcccccgccccccatccaccatccatctccgcccataagtgggtggggaaaccgccagccaattggaagaaggggcccgcaccttctcaccaccccctaccactggccccgcccaccgtgcgaacccaaagagggtgagccaaagaaatgtaagacaacagagtgacaagccgaatgagccaatcagcaggggctgtgtgggggcaggattagcactctccccctcctccccatgtaggcgtaacaggagatttatggtctgaggttgcctatcgtggtttatggagattttgttgcacgatttcggtgcatctgctcgttgccgtgagagacactagataggatgcacttaattgacttaattattggaggttttcaaggagagaataatgtggaaaggaaaaaggcgaagcacaacccaaaggggttggccgggcctatggttggaatgaggaagggtgtggtcttcggctaaaatttgcataaaacggaacccatccgggcgattccaacttcgcccatttattggtagtccttggggcggggcctcgcctctttctccgcccccgagcggaacatgacgggagatgtagttccgagaccggttgccatggcgttctggacagcctcgcgagtccgaccccgcccttcaggagtgacgagcggcctgaccaatgggagcagggggcgggctctctgacgaaggactggaaggtggcggtggtgaaggtgcaggccgttggggcggctcagaggcaggtgagccccgggaaacgcgtcctgtgtcttgggaaacgggcctttaagcgaaaggtggagagatgccccacagaaccgtgcagccctggggaggatggtggttcgcgtcgaaccctaacctgggacttgttcgggcccaggcctagcttagctgaggccgctgaggggtgggtaagactagatttgagggacagtttcctggaccttgacgggttttgattgtaggtcttatctcagtttgcatctccctctacttttatggaggcagaggtctgggagtgcccttccacttaatctcccaggttgggtttttctcctctgcttcttgttcctagaatttgagtgtctttttctttctctgttacttcttctcagccacttctttcttcctcatcactttgctgttttcggaaagcagttagtagttattcgctgtatgtggcttttgagccagatcggccctcttcattatgctaaacggcggaatcatctggagcgagatgtaagcatcgccttgggataggtctgggtcggggccgaacatctgcgtttctaagaagctcccaggtgctgctgtccacgttatgagtagaaaggttttacctgaactctgtccagtacaaatataatgcgagtcccttatgtcattttaattttggggtagctacatttaaaaagtgaaaagaaacacgtgaaattaattttaattatatgtttcatttagcctagtatatctgagacattatcatttcaacgcttaaacaaatatttaaaaattgagattttacgttcttttcttcgtattaaatcttcaaaattaaattaaaaaattaattcttcaaaattaaatcttcaaaatctgatgtgtattttccacttaacagcgcatctcaattccgactagacacagttggagtgctcaatagccacctgtgctagtggctgctacagtagcctactgcagaaattaaaaggtgggaaaaataaggttgcattgaccaaaccctttgcaactctatgagatgggattcagaactactttagagattctctgtaattgagatgtgcccaatttacagaaataatagtcaaaatagccaacatttctgaaagtatgatgttgcgctgagtgctttgcaggtattatttaatccttatggcaaccctctgagataactgctattattatctaagatatgggatctcaggcccagaaaggttaaaattaagtagcccaaagtcataccgctaataagtaggaaagccccgattcaaactcgggtcagttatgacttctaaatcagatcccgcagccattgcagtgtataattactaccttttatcactaatttcccttatcgatgcctctgttccagcttacagcaggggataagacgtttagatttgaaagtgaggtagttcgccatacaagataaagctgccagccttgtgcaatgaaatatttctaagattaactatgctctttttgtagacccaatgaactacattgagctcaggagagttttatgagcagaagagcaaaaatacacatattggccgagcgtggtggctcacgcctgtaatcccagcactttgggaggcctaggcgggtggatcacttgaggccaggagttcgagaccagcctggccaacatggtgaaaccccgtgtctactaaaaatacagaaattagccgggcatggtggtgcacgcctgtaattccagctactcaggaggctgaggcaggagaattgcttgaacccgggaggcggaggttacagtgagccaagatcacgaccaccacactctagcctgggcaacagagtgagaccctgtctcaaaaaaaaaaaaaaaaatacacatctatatatgctaaaatatggtattttacaaaaaaaaaagtcttccattttatgcataataaagacatgaaattattttctcttgatttttgaattagtaaatatttaatcaaaattacaattcatatttttcatttgaagcaagaagtggtttctctacaatcctctagtgaactggaaaattaagcatttacaaacttcaataatgttagtaggtggaaaagaaagtcagttaaatggattggaggggagcgagtaactgttgtgtggtagagtttcgggaggatccctcaattagttattctcatcaccagaggcctccacctgcattgtcccagagtcacataattaagccaccttataaagggaagactcattcatcacaccgttcgctcccttgttccccagtagtacaatataggaaaataagatgctcattcaaaaatataaatgaaagttaagtttctgttgttctggatcatattatattaaatagccctacattgaatagtaactggatcagagattttcagatctttgggataatgaccatcccacgtctccaacccccagagatatgggtggggaattggtcatgtaagaaaccctagactcttaagtcaaaatgccacctgaaaatcaacagataataaaataaatccctcatggaggtggggaggtcatcaaaaattcttttgagatccaaaagagttctttgttgagagccactgtaggcaaaaaagaaacaattttccttttctgctcctttatctatctttagatctcaagttgcataagatgtagagattatgccacacatgtataaattcaatcgaatatgccttgataatatttatcaagattgtcacaattagaagagaactaaatggtcatttgatccacctgtcccactcagttgactctggaatctgctttatgaagcctgtgtaatatgtacccatcctctgtttcagtccctctagtgatagggaccatctaatgttacgcattttccatttagttttaagttataatgcctaaagttcttatattatcagctggaattgctttacaaggtttagccagatataagccactgtcacaatatctcctgtgcccatcttatataataacaggcacaaaagagcactgcagttgtgcacagcaaaacacccaaaacacctgtggactcattgctagtgcaaagtgtcctttgaatatacatatttctagagactgttgactataccatgtagagatatcctcaactgttataaccatgcattcactaccctctttaagaagcaggccaagtgcagtggctcacgcctgtaatcccagcactttgggaagccgaggtgggtggatcaggaggtcaggagttcgagaccagcctggccaacatggtgaaaccccatctctactaaagatacaaaaaaattagctgggtgtggtagcgtgcgcctgtaatcccagctactcgggaggctggggcaggagaatcacttgaagccgggaggcggaggttgcagtgagccaagattatgcagctgcactccagcctgggtgacagagcaaaactccgtatcaaaaaaaaaaaaaaaaaaaagcagacctgacccattaggactaccatcctccacaccctgcagaatatatttgagccaaacctccagctagttgctttgattatggtgactatattctttttaatcaaatatttgggcatatttctttttccaatgtgtgaatatgtacaaaaagtctcacagattaatgtgaacattgttaaaatttaacattaattcaccttttcccaaatgatcaaaatataactgaagatttccccctaacaatccagctagtattataatgctatgcacaggtcccaacgatggatgggtaatagggtattggatactgcccaagagagcctggcatggtgaccaggttgagcatacagggccacatttcagagttgacttcatctgtttttctcttgtctagctgtttatatgtgtgtgtgtgtgtatatatatatatatatatatatatatatgtttttctcttgtgtagctgtttatatatatctttgctttccttaaaaatgaaggtaggttagaaacattataaccgaactctgaacctggagtggccatagtattataaagtttgtgttggggactaataaaaatttgagcatgtaagaagaggagtttggactttcaggaattaaattaaccataggggaatagatgagttgaatgagggagagtattgaaagcatttggcagcctatcgccacagcccgagccccaggcattgaggtgaaggtgatgggatggatctaaggtactctttttttttttttttttgagacagagtctcgctctgtcgcccaggctggagtgcagtggcgcgatctcggctcactgcaagctccgccttccggattcatgccattctcccttctcagcctcccaagtagctgggactacaggcacccgccaccacgcccggctaattttttgtatttttagtagagacggggtttcaccgtgttagccaggatagtcgccatctcctgacctcgtgatccgcccgcctcggcctccaaaaatgctgggattacaggcgtgagccaccgcgcccagcgatctaaattattcttgatgactagagagtacagcaaaatcttgtttgggggaaagatgagtccagctttgtgtctgttaaatttgaagttggtctgatgctcaaaacacttttggcctgaaagtgtaggtaaggaatgatttgtagaggttttatttacaactaagaatagatgagttttatacaaaaaattagccgggcgcagtggcgggcgcctgtagtcccagctactcgggaagctgaaacaggagaatggcgtgaaccccggaggcggagcttgcagtgagccgacatcgcgccactgcactctagcctgggcgacagagtgaaactgtctaaaaagaaaaaagaatagatgagcttcttgggggattgagtgtaacagaggagcaagtggagttcatgttgctattataagaaggatgaaaccatttgaaactacttcccattgattttttagaaatcccttaacagatcagtatttttattaactactttcttgaagtgtttgtagtcaagtgtttaatttatgcaaagttctcgttctgcttttgctaaaaattattctaaattggtattatctccttaatttttgtttctccagattttttagtaagtttactgtatggccaatataaaaatttatagtattactaacataatcctcagtttgtggattaattcaaacattttgaaattctgatatacctgtaaaagtataaaatttctatgcttttcacaggctatatcagcctacatttttaaacaggtttattgtaattaaaaagttttgtatgtttaagagacagggtttcactctgttgtccaggctggagtgcagtgttgattatagctcaaagcagcctccaatgcctagatagaactacaggtgagcaccactacgccaggcttatttatttatttattgtattttaagagacagggtcttgctttgttgcccaggctgtggaactcctgggctgaagcagtcctcctaccccagcctcctcccaaattgttgggatgacaggtgtgagccaccactctgggcaaaaagttttatatcatacttttttggtatagtaaaatttatagtagaacttataattttgaagttacatgacttttcttagaaatgtcatattatatattttgttttatttatttgttcatttatttatttttgagacaaagcctcgctgtgttgccaggctggagtgcagtggcgcgatctcagctcactgcaacctctgcctcccagattcaagcgattctcctgcctcagcctcccgagtagctgggactacaggcatacgccaccacgcccagctaatttttgtatttttagtagagacaggatttcaccatcttggccaggatggtctgtatctattgacctcatgatccacccgcctcggtctcccaaagttctggttacaggcgtgagcaccatgcccggcctatacattttaatttatatttttattttataaaatgtttaatacttttatggccgggcgcggtggctcacgcctataatcccagcactttgggaggccgaggcaggcggatcacaaggtcaggagatcaagaccatcctagctaacacggtgaaaccccgtctgtactaaaaaatacaaaaaaaatttagccaggtgtggtggtgggcgcctgtagtcccagctactccggaggcggaggcaggagaatggcgtgaacccaggaggcggagcttgcagtgagctgagatggcgccactgcactccagcctgggcgacagagcgagactccgtctcaaaaaaaaaaaaaaaaaaaaaagtttaatacttttatgtcctatgtgcaaatgtattttaagtcaatacaaattttattaaataacatgagacttggcagagtgtgagacaaaaaacaaaaaataaaatgaaatacaattttgttacgtaatagactgttttatttaatctgcctaggaaaccatgtgggccttgaataccatccattctaccattttcctagtactaggaactcagtattctttttttgggctttcaagacaaatatttcctcagttttcttctggctacttttgtaaaaacacctctctttctttactttgtaactttaaggatatttttgttcccatacaattctcaattggaccaactgaacattacttttttccaccaaccagggcaattttcacctaatttagagaaactatttaggatgatgtgactaaaaatattgccattattttatatatatatatatatatatatattgttgttgttgtttgttttaagggatactaggggtacaaacaagcagttatcttccagggtctttgaaattggggcacagtctaaggtccatgtgactgcttatctgggagacatgccatatatttcaagattcaatgggcagagaaaacagtagcttccagtatcacaaagcaagatgctttgaaatcaaggcattgatacgtaattgttccacttctcaaaaaggcaattctagtaactccagactgagtaggaacagagttgtttttttttttatttaataataatggatatatttcccaggcaatggttgggaaagcccgctagttagtaaataaataaagcaaggtttcattagtgtgtaatgaaatcgggaagcatggaacaaatggagtgagtgtcactggggatgattccagagagggggtagaacttgaactttatttacttagcagaatctaaattacagcattctgtcagagaacaggccatgcctagaagctctgagatggggtaaccatatgatgtaaagtcatactaactagatagagggtatgtgcttggacattgtggaagcagtaaggtagagtagggagagagagtatgcattttagagagccttcaaaggaggttagatttaatgctggagggaatacgtaaatgttgtatccatgcttcggttctccccagcccccaaacaaaaacattgacacaaagaccttctgcaaccaaagcgttagaattaatcatttaacctagcttaatcctgcttttatatacttcattgatacatgctacatacgtaatttctatatatgtcttgaatgtgtattcatttctgttaattccagcgtttgattatcacgtccgagaaaccaacaaccattgctcaactacactctgtaaaaactctttacgtatttggatccaagtagatccactaacattcaacacagagggctggctttatggacatatggcctatgcagtctcactgacctcagattcagaagagacttttgcttgatttcatgctctgctatcttgaaattctaataatttctagacaaggcttcccacatttccattttgcactaggctctgcaaattatgtagccagaactatcaataggtacttaattattatcttaaaggtattccactttaggccgggtgcggtggctcatgcctgtaatcccagcatttcgggaggccgaggcagacggatcacaaggtgaggagatcaagaccatcttggccaacatggtgaaaccccctctctactaaaaatacaaaaactagccaagtgtggtggcacgtgcctatagtcccaactactcgggtggctgaggcaggagaatcgcttgaacctgggagatggaggttgcagtgagccgagactgcgccctccagcctggcgacagagcaagactctgttgcaaaaaaaagaaaaaaaaaaagtattcaactttaattgatatatctaatgttagcagctcagtaggaaaccattaaaagccatggttaggagtaatgactttggaagaagtagcacctagtttatatcccagttctggcccagctggtgctatgagacaccagctacatgctttaagctaagactcactttcctcattcatagaataaatgaaataatagtattcttaccaaaaagtatatacaagaatgtttttaacagaacaattcataagagccccaaactggaaacaattcaagtgtctgtctatagtggaatggataaatagcaatttgtttatacagtggagtactatgtagcaatacgaatgaatggaatacaactacaagtaacaacatgagtgagactcacaaacctaatatagaaagaaagaaaacagacattaaagagtataattttatttatataaagttcaaaagcagacaaaactaatctgtgctgttaaaatttaggatattgggtctccttaggaggagaaggggacacagggaacttctggaggtgtatgatgatgtgtctcctgccatgatgtgggcatattcacactgtaaaattcaacaagttatgcgcttcaaggatttgtgtacttttctatattttatacttctgtaaaatttgcataaaaaatagtcttaccacataattactctgaaaattaaagaaacaattgtggaatctttagagatacctcaagaagttcacagagccgggcgcggtgactcatgcctgtaatcccagcactttgggaggccgaggcgggtggatcacctgagatcaggagttcgagaccagcctggccaacgtggtgaatccccatctgtactaaaaatacaaaatttagccgggcatggtggcgcgtgcctgtaatcccagctactaggggggctgaggcaggcggatcgcttgaacctgggaaacggaggttgcagtgagccaagatcgtgccactacactccagcctgggcaatagggcgagactccatctaaaaaaaaataaataaataagttcacagaatataagtttatttattttattttattatttttttgagacagagtttcgctcttgttccccaggctgaagtgcaatggcgcgatctcggctcaccgcaacctatgcttcccaggtttaagcggttctcctgtctcagcctcttgagtagctaggattacaggcacgcaccgccacacctggctaattttttttttttttttttttttagtagagatggggtttctccatgtcggtcaggctgatctcgaactcctgacctcagatgatctgcctgccttggcctcccaaagtgctgggattacaggcgtgagccactgtgcccggctataagtttaaatacttccattaaatggtttatagactgatacagaagaattagggccacaattttcaaccggtgtcttggctgttcactttctcctttttaatgatctttaagacttcgaaagcctttcataaacggtaattaaaggaaaatttaataaaaggtaaataaaattgagtttctctggccatcataaggcttcttttaagtaatcttttttattgtataggaaagtaaaatgaagcatgtttgcctttgtagtaaaaggttgaactgtaaacccattctcagtaagacaggtgcccagagagtgttgcatattctcttatttgatcactttgtgaaagattttttaaatttacttatttgaaaactacatttgtagttgtcgttttatcctttgccagcactgtttttccatttttgcttacatttagtctggaagacttgttattttatttcatttatatatatttatttttaggtgactatgaaaggcttatatttccaacagagttccacagatgaagaaataacatttgtatttcaagaaaaggtaagaaaaaatgtttaatcattaaagtagttagtgtatttttatctgcaataaacccacttttaaatgacgttattttcagtgagacttaatgaacaaaattactcaaatgaaactcctcaaattacagtactttcctttaaattttatgtgaaaatggtggttcatatagtagtttaactattttttaagttttattttgtttttaattggcacataattgtacatatttatggggtaccctgtgatgttttgattcatgtataaattatgtaatgatcaaatcagggtaattagcatatctatcagtaaaatacttgccattttgttgtgtcatttaaaatcctctcttctagctattttgaaatatgcaatacgttgttaactatagtcaccttgctgtacaatagaacaccagaacctattccttccatctacctgtaactttgtacctgttgaccaacctctgtccccagctcccacccctttaatctccccagcctctaataaccattattggactctctacgtctatgcaatcaactgtcttagattccatatttgagtgagatcatgtaatatttgtcattctgtgcttagcttatttcacttaacacagcgttctcaagattcatccacattttcacaaatgacaggattttactctttttatggctgaatagtattctgttgtgtatatataccacattttctttacccattcatttgttgatggacgcttaggttgattccatatctttgctgttgtgaatagtgctgcagtaaacatggaggtacagatatcactttgacatattgctttcatttcctttggatgtatgtatacccaggagagggattgttggattaaatgatagttctttttttttttttttaattgcgacagagtctcactctgttgcccaggctggagggcagtggtgccatcccacctcactgcaacctctgcctcccaggttcaagtgattctcctacctcagcctcctgagtagctgagattacaggcacgcaccatcacacctggctaatttttgtatttttagtagagacagggtttcgccatgttggccaggctggtctcaaacccccgacctcaggtgatccgctcgcctcagcctcccaaagtgctaggattataggcatgagccactgcgcccagcctggtagttctatttttaattttttgaggaacattcatatttttgtccataatggctatactaatttacatgaccaccagtggtgtataagagtttccattctccacatccttaccggcatttgttacttgttgtctttttgataatagccattctaatggggatgaggggatatcttcctgtggttttgatatctatttccctgacggccatgatcgagtggtgttcatcccagggatgcaaggatagttcaacataagtaaatcaataaatgtgatacatcacattaacagaatgaaggacataaaccctctgatcatctcaacagatacagaaaaaccatataatgaaatgtaacatcccttcatgataaaaatcctacataaattaggcatagaatgaatatacatcaatataataaaagccatgtataacaaacctgcagctaacatcatactgaacaggaaaaagttggaagcttttcctctaaaatctggaacaaggcaaggatgcccactttcactacttctattcaacataataatagaagtcctagccagagcaattaggcaagagaaagaaagaaagagcattcgaattggaaagaagaaagtcaaaccatccctgtttgcagatgacgtgatcttatatatagaaaaccctacagactccaccaaaaaccagttagaactaattaatgaatcagtaaagttataggatacgaaataaaaaatcagtaggaggctgggcatggtggctcacgcctgtaatcccagcactttgggaggccaaggcgggtggattgcctgagctcaagagttcaagaccagcctgggcaacacggtgaaaccccatctctactaaaaatacaaaaaattagccgggtgtggtggcgtgcgcctctagtcccagttactcgggaggctgaggcaggatcattgcttgaacccaagaggcagaggttgtagtgagccaagattgtgccactgcactacagcctgggcaacagagcaagactccatctccaaaagaaaaaaaatcagtagcagttctttgttgttgttgttgttgttgttttttgagacagggtcttgcgccatcacccacactggaatacagtggcgcaatctgggctcactgcaacctcccccagcatcagctcccacctcagcttcctgagtaactgagactacagacatgtgccaccatgtctgtctgactaacttttttttttttttggtagaggcaggttttgccatgttgcccaggctggtctcaaattcctgggctcaagctatcctcccacctcagcctcccaaagtgctggaattataggcgtgagccaccgcgcctggccgagtagtagttctctgtagcgacagcaaactatctaaaaaagaaattaaaaggccaggtgcctataatcccagcactttgggagaccaaggatggaagatcacttgagcccaggagttcaagttcagcctgggcaacatagggagaccctgtctctacaaaaaaaaaaatttttttgagttaaccaggcatgctggctgacacctgtagtcccagctacttgggaggctaaggcggaaggatcacttgagcccaggaggtcaaggctgcagtgagccgtgatcttgacactgcaccccagtctgggcgacagggcaagacttgtctcaaaaaaaaaaaaaaaaagaaagaaattaagaaggcaaccccatttataatagctataaaaaataaaatgcccaggaataaatttaaccaaggaggtgaaatatctctacgatgaaaactataaatattgatggaagaaattgaagagaacagtaataagtggaaagatagtctatgttcattaattggaagaattaatattgttaaaatgtccatactacccaaagccctctacagactcaattcaatccctatcaaaatgccagtggcattattcacagaaatagaaaaataatcctaaaaatcatatggaaccacaaaagactctgaatagcaaaagccatcttgaccaaaagaataaagctggaggcattacactaccttactttaaaaaatatttttaaaagaattactgcaaaagagtttttagttcctcagggtggtagtgtaaaaggtattaggaagacagaacaaacttaatagtcttacatgttgtgaaagtaacccaatgtattccgaataccacaataatgcaagtttccagaaagtagccatgtttcagaaaagaccttgtctcggccaggtgcggtggcttacgcctataatcccagcactttggaaggccaaggcaggcagatcatgaggtcaggagatcgagaccgtcctggctaacacggtgaaaccctgtctctactaaaaataaaaaaaaattagccaggcgtggtggcatgtgcctgtagtcccagctactcaggaggctgaggcaggagaatggtatgaacccgggaggcggagtttgtagtgagtggagatcacgccactgcactccagcctgggcaggagagcaagactcggtctcaaaaaaaaaaaaaaaaaaaaaaaccatgtctcatatgtgaaatggaagaggtagaaagatattattttccatacacatttcagagagtgctgaagttacctgatttactaagttttaaatgatcactcatattcatattatcaccaagttttttattactttaagcatagatagtagaattttcatatacagtattggtgattattagaaagatttgtggcaagccaaaatcattcttccataaatttagggattaaaagtaagtgttatatgtaaatcagtatttcataataattatgagagttttgatcgtgaacacaatccagttttctctcttgtctgtcactaactcctaaaacatttaggccaggcacagtggcacacgcctgtaatcccagcactttgggaggctgaggcaggaggatcacttaagcccaggaattcaagaccagcctgggcaaaaaagtgagacccctatttctaccaaaaaaattagctgggcatggtggcacccacctgtgtaggtcaaggctacagtgagccatgttcacaccagagcactccagcctgggtgatagagcaagaccctgtctcaaaaaaacaagaacaattaggccaggagtctgtgtttcagacagcttggcttctatcattgatcaggatgagggtcaggggttgattggctcttgggaagaaacatctccaggttcacaaaatcatgagtaaaattcacaaactcaccaatattaatgaacatcttcatattatcaccaagttttgtcaaaactgtgatttaaaaagatgttctcagattgtgttcatgacaaaacacagtaatccctttgatacatcacaggaggggctatgtaagtggctattcttggctagcttttcatctaattgtgggcatattgggtagaggagactgatttaattattagtaccaggttcagttgtttagatgaggtgatactgtatttaataatataggtggatgacattgagtgtctgaatttggactatttttgcctttgaatttcttttctttttctttttttttttttttgagacagggtctcgctctgtcacccaggctggagtgcagtggcacaatatcagctcgctgcaacctccacctcctgggttcaagcagttctcctgtctcagcctcccaagtacctgggactacaggcatgcgcaaccatgcccagctattttttgtatttttagtagagaccgggtttcaccatgttggccaggctggtctcaaactcctgaccttaagtgatccacttacctcggcctcccaaagtgctgggatgacaggcgtgagcccccatgcccggccttgcttttgaatttctatctagaagtggaatctgagggataattaggttcaattacgttggtatgttgagcccagaatcccatggggcatgatgaaatgcccaaggcacatgttaaggaagagttgaataaaggacgctaaagaattccactggctagccaggcacagtggcttacgcctgcaatcccagcactttgggaggccaaggcaggcagatcacctgaggtcaggagttcaagaccaacctggccaacatggtgaaaccccatcttctactaaaaatacaaaaaaaaattagccaggcatagtggctcatgcctgtaatcccagctactcaggaggctgaggcaggagaatcacttgaactcgggaggcagaggttgcagtgagctgagattgcgccactgcactccagcctgggtatctcaaaaaaaaatgaaaaaagaatttcactggctgggcacagcggctcatacctgtaatcccagcactttggaaggccaagacaggaggatcactttagcccaggagctcaagaccaacctgggcaactcagcgagacaccatctctatttttttttaattatatttttaaaaaagaatttcacttatagcgttaagaaaatttaagggctgggcactatgtcttatgcttttaatcccagcactttgggaggctgaggcatgaggattgcttgagcccaggacttagagaccagcctgggcaacatagcaataccccagccctacaaaaaaattaaaaatcagctgggtgtggtggtgcatgcctgtaaccccagctactcagaaggctgaggcaggaggatcacttaagccttggaggttgaggctgcagtgagctgtgattgcgccactgcattcccgcgtgggagacagagtgagaccctgtctcaaaacaaaaccaacaaaaaaaggaaattctaaaaattagtaaaggcctgctgggcgtggtggctcactcctataatcccagcactttgggaggccgaggcgggcggatcacaaggtcaggagatcgagaccatcctggctaacacagtgaaaccccgtctctactgaaaatacaaaaaattagctgggcatggtggcgggtgcctgtaatcccagctactgtggaggctgaggcaggagaatggcatgaacccgggaggcagagcttgcagtgagccgagatcgcgccaccgcactccagcctgggtgacagagcaagactctgtctcaaaaaaaaaaaaaaatcagtaaaggttatacgttatgtgtatatgtgtttaaggatatccctgtaaatgtgaagagccggtgttctgagattatttaggttgaaataaaggagtacagtatttgctgctttactttgttatcctaactttattgtctacatatatatccatattgttatttgagtacttttaaaaatatgtatccaaaagcttttttaaaattgtacccccaaattttctttatttttttattatatacatttctataattacttatagttgttaaaattagctgtgagatttagggtctgtctaattttgtttaattacatgtaaaaattttcacagcataaagacatattctcataggaatgtgtaaaataacatattgttttgttatcatttggttctaggaagatcttcctgttacagaggataactttgtgaaacttcaagttaaagcttgtgctctgagccagataaatacaaaggtattggttcttttattatggcacaaagtaaaatgagagtttcttagtgtatttagtgtataaatataacgataactgacctctcaatgtgaagaatttattaccatcttcatttttgttaatttttttatttgagacggagtttcactcttgttgcccaggctggagtgcagtggtgcaatctcagctcactgcaacctctgcctcctgggttcaagcaattctcctgtctcagactcctgagtagctaggatcacaggagcgcaccaccacacccagctaatttttgtatgttttttcataaaaatgggttttgccatgttggccaggctggtctcaaactcctgacctcaggggatccacctgcctcggtctcccaaagtgctgggattccaggcatgagccactgcgcccagcctaccatctttagaatagaacagctaggggaaaaaatttagtgtgcttttgtatatttctatataagggacattattagtctgattgaagttacgtattttatatgaaaatacaaatattttataagaaaacagacataatgtaaatattttataatattttataaactcctttacattgcaaaaaactaagagtttataattaacaaagcctattattaaggaagaaataaataataaaatagaaactagaaacctaatcagtttattagctaccaattagatatttaactaatattactagttatggttcatatttctcttgtcatttctttttgtgtcgctctctcataaacatacatctttacctcacattaccctgcagtaatctttcattattgaccatgaaatacatagaatgttttcagtggtaaataaactgtggttaaatgtgccatgataaattgagcaggtccatttactccgtttttttgtttgttttgttttattttttaggattaatgccatagtttacatgacccgtaacttattggattataatgtgactataatttttaggaacctaaaagtcttctttgataaagtcacacttaggaaattacagaccaggtataggctttcactgggcaactctgtaacatgagcatgacttgagaaatgcattagtgggatcccctgaagtcttttcacaagagtactagtactagaccttgtctgcagacttctgttttcagatgtttttattaaaatggaaaaatccattaaaatccaagtctaagaaataatctccttgtctaacagaaataaatagtaaattatagtaaaatcggttgaatgaaatattgcacatctgttaagcataatggttatgaaaactgtgtgggtaatgtaagaaaatgcttatggtaagtgaaggagccaggatgcaattgctaaaaccatagttttaactccatacaaatgtgcataaaagaaatactgtggccaggcacagtggctcacacctgtaatcccagcactttgggaggccgaggcaggcagatcatgaagtcaagagatcaagaccatcctggccaacatggtgaaaccctatctctactaaaaatacaaaaattagctgggcatggtggcacgtgcctgtagtcccatctactcaggaggctgaggcaggagaatcgcttgaacctgggaggcggaggttgcagtgagccgagatcacaccactgcactccagcctgggcgacagagtgagactccatctgaaaaaaaaaaaaaaaatagaaaagaaacactgtaaaacacccagtacttctataagaatgtcatatgaacatcttaagaaaagtattatgttccacattgaaaaagagacttctgaccatcaagtatacaatacaggagatcagaaaattgaaaaataaatatagaagagaattaatttctttttacttactgttcctaaaatattgtggtatctacaaatacgttcagcatctgtagtgttaagtgccaggagcttaaaccacgggcttaaagacagtataccctgttacttcaaaagacaagtacttacagttaatttggtcacaatctaataaaataccaatctcttaaaaatttagccttaaccaaaagaaactccagtcaccatgaatctgaaattatatggcagattacctgttaatatccatcactacttctcacccactccctaacccaaggcttttgagaactcaggtgattttaaagggtataggaatggagaaccctttgttctcattggccacacccccttattcaacagtcttctctccagactaccctcccttcacctgagtaagatgactgatagtgtttagccaatcaagaaatgttttggccataatttcccttcatacttggcagagtaaagatgttaaacaaaggatgttaatggtaatttgaataataatattcattcctaagtcctgcagaacaactaatgcctcagtaaattcttggtttcctaccctttagagaaacctattttgtgaagttatttgctttgtctcagttccaaaacttgaaccatatttgctctttctgtgatttgacttttactctcgctttcctcatatataatggagtccaggatttcttctgacaatagtatgttaactgcctttgtcatgatttagcttctggcagaaatgaagatgaaaaaggatttatttcctgttgggagagaaattgctggaattgtattagatggtaagtatacagatgtgagtatatgtatttattttctaaggtaaaagagattaaatgtagctaattggtttactggtacataaaattatatacagcctttcaaatttaaatttaattatatgaacatgtccttttttatttttatttttattttttgagagacaaggtctctctgtgttgcccagcctgatcatagctacagccttaactcctgggttcaagcaatcctgctgcctcagcttcctgagtagctaagtctacagcaagcttgtccaaccagcatgcagcccaggacagctttgaagtcagcccaacacaaattcgtgaattttcttaaaacattatgtgattttttggccaggcgcagtggctcatgcctgtaatcccagcactttgggaggctgaggcgggcggatcacaaggtcaggagatcgagaccatcctggctaacacggtgaaaccccgtcactactaaaaatacaaaaaattagctgggcgtggtggcatgcgcctgtagtctcagctactcgggaggctgaggcaggagaatggcgtgaacctgggaggcagagcttgcagtgagccgagatggcgccactgcactccagcctgggcgacaagtgcgagactctgtctcaaaaaaaaatctattaatttgaaaaaaaattacatgatgtttttttttttttggttcatcagctgtcatttagtgttagtgtattgtatgtgttgctcaagacaattctttctcttccagtatggcccagggaagccaaaagattggacaccccggccgggcgcggtggctcacgcctgtaatcccagcactttgggaggccgaggcgggcggatcacgaggtcaggagatcgagaccatcctggctaacacggtgaaaccctgtctctactaaaaatacaaaaaattagccgggcgaggtggcgggcgcctgtagtcccagctactcgggaggctgaggcaggagaatggcgtgaaccccagggggcggagctgcagtgagccgagattgcgccactgcactccagcctgggcgacagcgagactccgtctcaaaaaaaaaaaaaaaaaaaaaaagattggacacccctggtctacgggtacacgacattatgcctggctttgtctagcttctttggtttttgttttgttttgttttgtttttgttttttttcagagtctcactctgtctcccaggctggagtgcagtggcgtgatgtctgctccactgcaacctctgcctcccagattcaagcaactctgcctcagccttccaagtagctggggctacaggcgctcatcaccatgcctggcaaatttttgtattttttggtagagacggggtttcaccatgttggccaggctggtctcgaactcctgacctcaagtgatctgcccacatcggcctcccaaagtgctgggattacaggcatgagccaccatccctggcccctttttttttttaattgaaaagaaaaataggactcaattggtattttataagtgaagagcttattacagtggtaaatatttaggggttatatatttaaatccacaagtaatcatatattgaatagaatgaccaatattgtctttttatgatgaaataatgatctttacatacagaacagtaagccttatatcaggcatttgatataatttgtttctaaatagacctatacttaatattcactaacaggtggttcatgattaacgtgtttgcttttacctcctatgcgaatgaataaatgtgttaaggtatgttagagtatatttgagttttacctgggattttaacgtagaatagatttgatactctatgtaatcttctgacatagctaaatgataattatgtttcttttttctcagactgtagaaaaataaatacaataactagatgatcattcattttacatttaatgagcaattgctaactgcttaggatataagtgaaacgaactccttgcccttaaacggttcactctctaggggagagacaaatatacacatgagcagattattatgtaagcttggaagaaagttgcttaacctggccagaagaaacaggaaaggcgtcttggagtaagatgtccaaatcataaggggcaagcatgttgagaatcacacctagcagggaggatattatgagcaaagacaagcaagtgaaagtgggatgtgtataagaattacaaagagtttggtattgctagagcaagataaagtcctgggcaggcgtcaagggtatggtacttggtagcagagaaacattttgtcaagaaaattctcctcctaggctgggcttggtggattacacctgtaatcccagcactttgggaagcagaggtgagaggatggcttgagcacaggagtttgagccaacagagcaagaccctgtctcaaaagaaaaaaaagaaaaagaaaaaaaaattatccttcgaatattgcagaataaaagatattgtacaaaatactttcatgattatgtgaacactaattcctgccttcctaaaatgaagcaggaggataggcaagggccagacctttggttgagccttagatatcagattgtattttagggagattattagagtaggcatttgaaggaagggtggatgtaaggcaaacgagtctaaaggcaagaggactggttgggttgtagaccaagaggcaagaaacagcaaagtccataacctcaacagtggtggcagaggtggagaagagggatggattcaagacatattgaggaaataaagtctgcaggacctagtaactgggaaattaaaaacagatcagaaccaggaatggcttacagagttcttgttcaggcttgaattggaaccaacatttgataaaggaagatgatccaatttggaggaatattatgagtttagatttatacttactgagttcaaggaacttaagtgacatctcactggcaatatctagtaagcaattaaatgagttaaagctcaagggtgagagatctatgctggaaagtacatatttgagaaatgtcagcatgtaggttgtatttgaaataatagaattgatgagttctccaagggatagagtagaaaaggaggagagatgtaaacaaagaaccctttggaatgcactgtttgagggtcaattaaaagaagaggagtatgaaagaaaccaagaaaaaaagagtcagagtgaccttaggaggacagggatcagcagtagaagggaaagataaaagtatagtgaatcagaagccaaaaggattgggggatgatggcacaggagggagccaaagaagaagcaaactccaaaagaaagacttgaaagtagaaataccaggcttcgaattacttgctagtggcaacaaatgcactctggggccattttgttgacagagccagtcaaaggggccatttccagattcaggtttccagcttacttcaccgcttcatgtcagcttccttgtctgttaaatagaaataataatacctaccttattggtacattgtgaagtttaaatgcataaacacacaacaatgctgggcacaaggaggcattcaacaatatttggagttttttcctcccctttcctcttgtaactcattgaatgaaactactcaaatgaattgactgatagtcgaggctttttctctacatatgcagagaaaatgtaactatatcatttcttttttttttttttttttttgagacggagtctcgctctgtcacccaggctggagtgcagtggcgcagtcttggctcactgcaagctccgcctcccaggttcacgctatcctcccgcctcagcctcccaagtagctgggactataggcacccaccaccacgcccggctaattttttgtatttttagtagagatggggtttcaccgtgttagccgggatggtcttgatctcctgacctcgtgatccacccgcctcggcctcccaaagtgctgggattacaggcgtgagccaccgcgcccggccatcatttctataaagttccagaaaacttcttggtaccaacctgaatttatttcccaaatcaaagtaattttaacgtcactcttcttaagggaggagaccacccctcatcttatgcccaatttctacttccaaagaaagaggaagtaaaaactaaaaggcagaaatgaaatccacaggcagacagcccagcgccacgccctgggcctggttaaagatcgacccctgtcctaaccggttgtgttatctgtagattccagacattgtatggaaaagcattgtgaaaatccctgtcctgttctgttccgttctgattaccagtgcatgcagcccccgatcacgtaccccctacttgctcaatcgatcacgaccctctcacacggacccccttagagttgtaagcccttaaaagggacaggaattgctcacttggggagctcagtttttggagacgtgagtcttgccgaagctcccggccaaataaagcccttccttctttaactcagtgtctgaagagttttgtctgcggcttgtcctgctgcattctcagaattccctgttgtatgagattctgcaacaaaaataaagacagattgggctagccacaggaggagtagaaaacaatataattatcatagaagctatagaatagattagtttctttactccttcttccttaaagtcagctaaatagaggccagtcacagtggtttacacctgtaatcctagcacttcgggaggccaaagcgggtggatcagttgaggtcaggagttcaagaccagcctggccaaggtggtgaaaccctgtctctactaaaaatacaaaattagccaggcatgatggtgcatgccattagtcccagccactcgggaggctggggcacaagaatcacttgaacctgggaggtggaggttgcagtgagccaagatcgtgccacaaactccagcctggttgacaagagcagaactccatctcaaaaaaaaaatgaataaagtcaactaaataggcaaagagagagatacttctcctggtcacaataatcgcatggcccaaatatctagagaatccagatttgaagtgctgtatatcctgtagtctttacagaccatcaaaatgttattgacattttggtccttttttccacattaaacaaaatcagtctttttacaaatccacagattttaaaaatgtattttaatagataagaattatatttaataaacttgtaatattaactattaattttcttcactctttagttggaagcaaggtatcattctttcaaccagatgatgaagtagttggtaagttatagttcatagtcttatttcaagtcatctattttaccgtcatctctgttttttctatataactattaatgttcactgtgaccttgcttcatatagaagtactttcccggctgggtgctgtggctcacgtctgtaatcccagcacgttgggaggccaaggtgggcgaatcacctgaggtcgggagttcgagaccagcctgaccaacatggagaaacctcgtctctactaaaaatacaaaattagccaggcatggtggcacatgcctgtaatcccagctactcaggaggctgaggcaggaaaattgcttaaacccaggaggcagaggttgtggtgagccgagatcacaccattgcactccagcctgggcaagaagaatgaaactccatctcaaaaaaataaagaaagaaagaaatgctttcctggtttttggaatttactgtcaaatttctattgatgataaaaattgggaccttgattgcaatagcagaacatttaaaactcacaagaacaaaaaaccaaacaccgcatattctcactcataggtgggaattgaacaatgagatcagatggacacaggaaggggaatatcacactctggggactgtggtggggttgggggggggagggatagcattgggagatatacctaatgctagatgacgagttagtgggtgcagcgcaccagcatggcatatgtatacatatgtaactaacctgcacaatgtgcacatgtaccctaaaacttaaagtataataaaaaatatatatatttagctgtagaacagttttatagataaaaagataatcatagttgctatagtgcttggtgtagcctttttctggcagatgcttagtctgtggccagactgaagtctttagggagaaggaaagttacaagtcacatgcttgaaggctgctgactgactgggccatatagaagctccatgcaccgtttcaactgaaatcatacagagcttttctcttacaactcttgtaaaactaaaaattgacttaaaacttttattgttttttaaaatccacagtatttttgcaattttgcaacctgtgtcctagacagtcacacaaacataggctatgacttttatagttgcaacctgcatcctagacagtcacacaaacataggctatgacttttatagtaatccttgaaattttcatttctctgtggaagacataaagttagaaaacatttatataacttgtattatatagggccatataatatatattatgtggtggctcacacctgtaatcctagcactctgtgaggccaagacaggaagatcacttgagcccagtagttcaagaccagcctgggcaacattgcaaaagctcgactctacataaaaaatacaaaaattagccaggcgtggtggcacacacctgtggtcccagctactcaggaggctgaggtgggagatcgcctgagcctggaagtttgaggatgcagtgagccatgatcacaccactgtactccagcctggtgacagagggagaccttgtccaaaaaaaaaaaaaaaaaagagagaaagaaaagaaagaaaaaatatttagccttatagcgttaaaattatagcatgcttgaaattcttaaaggatagatttgtaagaaagttttcatcagctttttatagtattgcctttgactcaggcattatcctggagaattgattatttctttcttgtctttttattctgctcaggaaatcagtggcactctgtattattcaagattctttttgtgagaaaccaaaaacaaaatcagactagcttagaagaaaaatgggattttattagaaacatactctggctgggtgtagtggctcacacctgtaatcccagcactttgagaggctgaggtgggtggatcacaagatcaggagttcgagaccagcctggccaatgtggtgaaactgtgtctctactaataatacaaagattagctgggcgtggtggtgcacgcctgtaatcccagctactcgggaggctgaggcaggagaatcgcttgaacccaggaggcggaggttgcagtgggctgagatcgcgccattgcactccagcctaggcaacagagcgagactctgtctcaaaaaaaaagaattgaaacatactgaggtatgtcatggaaccaaactataggaaggtagctatgcatcaaggacaattttgtttatttgtttcttagtttgagacagaatcttgctcttgtcacccaggctggagtgcagtggtgtaatcatggctcattgcagccctgaactcctggactcaagcagtcctcctgcctcagcctcctcaatagctagaactacaggtgcataccatgatatccaactaatctttaaatttttcttctgtagagatgaggtctcactatgttgaccaggctggctttgaactcctggcctcaagcaatcctcctgccttggcctcccaaagtgttggattacaagtgtgaaccaccatgcccaacccatcagggacaattttttttttttttttttttgacacagagtctcgcactgtcggccgggctggaatgcagtggtgtaatctcagctcactacaacctccacctcccaggttcaagcgattctcctgcctcagcctcctgagtagctgggattacaggcgcctgccactatgcccagctaattttttatatttttagtagagacagggtttctccatgttggccaggctggtctcaaactcctgacctcatgattcacctgcctcggcctcccaaagtgctgggattacaggcgtgagccaccacgcccagcccatcagggagagttttaacaaggagtccagatgctcccaagactctgactttgttctataacatcagccatcatcttactgtcactcagaggggaaagaagaaagcgatagcaggagtggcacagtgcacttcccatcccatttctgaattttttcttgtccacactagtaattactggaaccttcctcaaaatttcactgaacaaaatttgtaataatactggcctctcattaggaatgaatttttgacttacatccctttaatttcttgttttgatttttaggaattttgcccctggactctgaagaccctggactttgtgaagttgttagagtacatgagcattacttgggtatgtagcaattcagtactttggagctcacataagtcttacttcactgacatatggtttaataacattttaatttttttgaatctaccataagtgttgtacttaataaagtatcattagccagtcatgtatgtaaaaaatgttggctggtcatgtgaatacttctagcttataattagtattcataaaattcatattcagactaaacaatatatagacctttaagttttactaacactgctcatggtaagatctttgaaaagtgatttctctcttggctcttaaattatatacctaatcagaattaaaaatttttttttactcttggttattgactgaaacaaaaaacatataaaatttagacagtacatggagagtttgagacgggaaagaatcaagaacactcatctcaagctaggtgtggtggctcacacctgtaatcccagcactttgggaggccaaggtgggcaggtcacctgaggccaggagtttgggaccagccaggccaacatagcaaaacctggtctctactgaaaagacaaaaaaattagctgggtgtggtgacacgcacctataattccagctactcaggaggatgaggcatgagaattgcttgaactctggagatggagctgagattgcaccactgcactacagcctgggtgacagagcgagactctgtctcaaaaaagaaaaaaaaagagcacttatctttggtttctaatatcttttgactagtgttgagtttaactgaaatattcgtttttaatttttcttatggtaatttattttttgaatatttaaagtacatgtacacacacacacacttcatgaaaccatattaaacagttgcttcatctcctaagtaatcaggggaaagcaattaaaaccacttagagataacattatgcatccaccagactgacaaaagttaaaaagtctgaccatcagccaggcgcagcggctcacgcctgtgatcctagcactttgggacgctgaggcgagcagatcatttgaggtcaggagtttgagaccagcctggccaacatggtgaaactctgtctctactaaaaatacaaaaaatcttagctgggctgttggcgcacgcctgtaatcccagctactcgggaggctgaggcaggagaatcacttgaacccgggaggtggaggttacagggagccgagatggcaccactgcactccagcctgggtgacaagagtgagacttcatctcaaaaaaaaaaaaaaaatgaccatcccaaagtgtgggaaggatgtggaatgatggaacctttcatgtgctggagtgtaagttggtacaaatatgttagaaaacaatttagctttatctaattaatgatgtatatataccagacctagtaattccactcatgtagcctatggaaatttgatgtgcactaggaggcatactgcataagagttgatagcagcttatttgtaatagtgaaagaaactggaaacagcccaaatgtccatcaccaagcaaatagataattgaaaatattcatagaatgaatttctattgagcagtgaaaatgagtaagagctaaacatatcaaagtggatgactctcacaaacagcattgagtgaaaaaagcaagttacagaagaatacaaacagtcccatgccatttatttatatacagttcaaaaatgtacaaaattaagcatatgttatttaaggatatagagaaaaggtagaggatggaaagttgggtggaagttacctgtgtgagcaggggaggaagatgtggtcagtggatacaccaggactccagtggtacagccagcatatatttcttatgctggaattcattatgttcttcataccatatccatagtagcaaataccttctcttatgttcttgaactattgaattaaaccttttcctaagttcttttcttaaataatgtgatctctaatcagaccttttggggacagaggctaatttggatttgggtcttccaaaaatagtaatcttactcagttaagtccttacagtaacttgagctaggctaccaaatctttggcatttcatttctaaaattataaatttaaagtaatttttatttaaattaatgtcattcattatatctaaaatttccaataatactttattattttattaaaaattaatttccaaaagacactttttcagagatctgagggctgcacttattggaacgtacatgaagcctagtgaggagccaagtgtgtgtcttcctttgaaagataaagacctctttcaaataccacgcagtgagagtctctaatccagagctatcttgaaattgtgcagtttgaaatttgaggactgccacgggctcctttacaggaaactatcctatttttggccccagagtttccttgaatggttggccttattgccctgttctttcgagtacgttgtgaatatggagtcttttcattaagtaaccaaaactaaattgctatagaagataaattattaaaaacaacaacaattggctgggcgcggtggctcatgcctgtaatcccagcactttgggaggccgagatgggtggatcgcctgaggtcaggagtccgagaccagcctggccaacatggtgaaaccccgtctctactaaaaatataaaaactagccgggcatggtcgtgggcgcctgtaatcccagctactcgggaggctgaggcaggagaatcgcttgaactcaggagacggaggttgcagtgagccaacagtgccactgtactccagcctcggtgacagagtaagactctgtctcaaaaaaaaaaaaaaaaaaaaaaaacaaccaaacaaggcccattcctttaggcactgatgaacactggagaattatgacatggaccagaaggagaaaagcaaattagagcatccattttctagctataaagtttaagctaagaccggcaaaccacacaaatggcctttttcttctaccttatttataaatcaggaggatggattaaagtccagaaatccattaaagtatatagagaaaacaattgcagatattccttgaggaagaaaacacagcaaaatgtttctttaaaagaagtacgacaggcgtggtggctcatgcctgtaatcccagcactttgggaggccaaggcaggtggaacccctcaaaagtttgagaccagcctggccaacatgacaaaaccccgtctctactaaaaatataaaaaattagccagctgtggtggcacatgcctgtagtccgagctactcaagaggatgaggcacgagactcgcttgaacccaggagacagaggtgagccaaaattgtgccactgtactccagcctgggcaacagagcaagactctgtctcaaaaaaataaaatagcataaaataagtactttaaggctgggtgtggtggctcatgcctataatcccaacattttgggaggctgaggtaggaggattgcttgagcccaggagttcaagaccagccttggcaacttgcttgtctctaccagcaaataaaattttgtaaaaaaaaaaaaaaaaggctaggcatggtggctcacgcctgtaatcccagcactttgggaggccgaggcgggcggatcacaaggtcaggagatcgagaccatcctggctaacacagtgaaaccccctctctactaaaaaatacaaaaaaattagccgggcgtggtggcaggtgcctgtagtcccagctactcaggaggctgaggcaggagaatggcgtgaacctgggaggtggagcttgcagtgagccgagatcgcgccactgcactccagcctgggcaacagagcgatagagcgagactctgtctgaaaagaaaagaaaagagaagagaaggaaagaaagactttaagaatgggcaacatagcaagatcatctcaacaaaaagtttgtttaaaaaaaaaaagtactaggccaagcacagtagctcacaccaataatcccagcactttgggaggccaaggcagagccaattgcttgagctcaggagtccgagactagcctggataacatggtgaaaccccatctctacaagaaataaaaaaaataaataaataataactagatatggtggtgtgtgcctatagtcccagctgcttgggaggctgagaaggaagaatcgcttgaacctaggaggttgaggctactgttagctgtatttgcgccactgcactctagcctgtctcagaaaaaaagtagtactttaagaaggagctcttacacagcaaaggaaacaacagtgtgcagagacagcctacagactgggggaaaatgttgataagccgtacatctgataaggggttaatatagtgatatagaaggagctcagaaaacagcaagaagaaaaaaacaattagaaaagggtcaaaggacctgaatagacatttctcaaaagaagacatgtgaaaaaatactcgacatcagtaatcattagggaaatgcaaattaaaaccacaaagaaataccatctcatacctgtcagaatagctgttaccaaaaagatgaaaggtaagtattggcgagaatgtggagaaaagggaaactttgtacgctattggtgagaatgtaaactagtacagtcattatggaaagtgtatgaatgttcctcaaaaatcaaaacatagaattaccatatgattcagtaatcctccttctggatattttcccggaagctttgaaatcagatgtcttgcactcccatattcattgcagcactattcacaacagccaagttgtggactcaacctaagtgtccagatgaatgaataatatgatatagatatacacaatggaatactgttcagcctttaaaaagcaggaaattgtgtcatttgtgacaacacagatggaaatggagagcactatgctgagtgaaataagccaggcacagaaaggcagatacagcatgttctcacttctatgtggaatctaaaacaaactcatagaggcagagagtagaatggtggctacagaggctgcgggctggggagaatggagtgttgatggacaaagggtataaaatctcagctaaacaggagggatatgtttttatttatttgtttattcatgagatggagttttgctcttattgcccaggctggagtgcaatggcgtgatctcggctcactgcaacctccgcctcccaggttcaagcaattctcctgcctcagcctcccgagtagctgggattacaggtgccagccgccacacctggctactttttgtatttttagtagagacggggtttctccatgctggccaggcccgtctcgaactcctgacctcaggtgacctgcccacctcggcctcccaaagtgctgggattataggcgtgagccaccgcgcccagccaagggatatgtttttattttcagttctttgcacagcatggtgagtatagttaataatagagtattgtacatttcaaaattgctgagagtaaatttcaaatgttttcatcataaaatatgttaagtatttgagatgatggctatgttaacttgcttgatttaattattccacattgtattcgtaaatcatagcatcattttgtgccccataaatttatacaattataacttgtcaatttacaatgtttaaaaaaaaaagaatgatgactaacagtgtgacctttaggctagatcctaggcatgctgactgcatctataaatgaggacactcaactgaataacctgtaatctctgttgtagctccaaccttttgtaaaagggaataatttcagtttcccggcaagtttgtaggggaaaactttcagttcaccacaactctattttagtttctattactttcctggtgattttttttgtatataatttgtttttatttttaatttgtctttggtgttttgttttttgtttgcttgtttatttttgagacagggtcttactctgtagcccaggctgcagtgaagtggaattatcacaattcactgcagcctcaaactcctgggttcaagagatcctcccacctcagcctcccaagtagctgggacaataggcatgcaccaccatgtctggctaacttttttttgtagaaactgtcttgccatgttgcccaggctggtctctaactcctgagctcaagtgatcttcccgccttggcctcccaaagtgctggcattacaggtatgagccactatgccagccttcatgattgtttaatgagtgctcagtgctcagtcactttcaactcaaataagtctgttctttaccaaaccaaagagctatgtttcaaacattcccccaaaatgtggtgttagtcctatttctcaaacttgataatagagttaaagagtagagtaattcttccaactcttttgtacttttcagttcttaagcaattctgtcaagcctaaaactaattttatttttcattcaaaattttcagcattgttgtttttattcctttggagctaaactagaaagagatcaaattataattcttagatgctgaaatatggctcgcatttatttgtttaattgttttttgagatggagttgcactcttgttgcccaggctggagtgcaatgaatggtgtgatctcagctcactgcaacctctgcctcctgggttcaagtgattctcctgcctcagcctcccaagtagctgggattacaggcatgcgccaccacgcctgactaattttttgtatttttagtagagatggggtttctccatgttggtcaggctggtcttgaactcctgacctcaggtgctctgcctgtctcggcctcccatagtgctgggattacaggtgtgagccactgcacctggccttatttgtttagtttttataacataataaacacctgtggacccccaacacaaaagcaagtgtgttgacattaacccacatctaaccatgcaattttttttttgagacaaagtcttgccctgtcacctagtctggagtgcaatggcgcgatctcagctcaccgcaacctccatctcctgggttcaagcgattctcctgcctcagcctcccaagtagctggaattacaggtgcctgccaccatgcctggctaatttttgtatttttagtagagacggggtttcaccatgttggccaggctagtctcaaactcctgacctcaggtgatctgcctaccttggcctcccaaagtgctgggattacaggtgtgagccaccttgcctggccgcagttagcatttctttaaggacaacatgattgagtttttaataaaaatatggtagtcccaatccttttgatagaagatgttcccaataagtaaattatacgttgattgagcgtgcactgttgaaatagatgtgctttaaagtcatatattcaccttatgagctatgtggcattagacaaattaatcaattaccctgaaccctatttcatcatccgtaaaattgggagaatagctatcttaaagagttacctaaggaataaagtactgtgtgtgctatcacctggtgcttaatatgtttttactgttttaattctcagctcttgtctgagcatttcaacatgcatgtttgaatgctccacttcgcccactagatggcactagtttgttgctaaatgcagtgctgactactctggctagtccacatgaatcattgctactagaggaagcatttcaaagagctggtaaagactgtgaaagtgttataaagttgatcttaggtaaaatgagaaagaatttcttggccaggcgtggtggcttacacctgtaatcccggcactttgggaggccaaggtaggcagatcacctgaggtcaggagttcgagaccagcctggccaacatggtgaaaccccgtctctactaaaaaaatacaaaaattagccaggcctggtggtgtgcacctgtaatcccagctacttgggaggctgaggcaggagaattgcttgaacccaggagggggagggtgcagtgagccaagatcacaccactgcactccagcctggcgacagagtgagactccatctcaaaaaaaaaagaattcttgtactgcggaaaaattacatcagtgtacaacataaatacaaaacaaaaattaaatagtgaaacatgttaaggaatagtttcacggtcagatcatgcggaactttttaaactatattaggagttgcatttggttccaagtacagtgtaaagccattgataaattttaagcagggaattgttaggatgtcagttatctttttaaaatatcattctgatgattctgttttttaaagatactgttaaagagattgaaaacagaaggcacaaagttgaaaataatatttacagcacatgaacaaatgacttctctagaatatataaagaattcctgtaaagctctaaataagaaaaagacaaaacaatagaaaaattgattaacacttgaaaaaggaattcacaaaaggaattccagatggccagtgaacatggaaagatgctcaacctcttttagtagtcagagaaagcaaattaaaatcatagtaagaaactattacctacctacataattggtaaaaatatataaatgtgatcattccacaagttgacaaggacattcacagcaacaggacactactgtgggaaagtaaattgatgcaattactttggaaaggtgtagttaaggaacagataatatacctgggacctaggatttccactccaatttaagtatcctaggaaaacccatgcacggtgtaacaatatttttcatatacgaacacacttagcagcattgtttgtaactgacaaaaattggagacaacacaaatgttcatcagctaaacaatgggtaagcaaatgaaggtgtttttaatatattggaatgccataaaacaacaagaatgaaagtgctctaacagcctcatccacagaatggatgccttaaaaacataatatggaacataaaaagcaaggtagaaaagaatgcatatggtatgattccattcagataaagtttaaagccttggcaatatgaaatttttttttttttttttttgagacggagtcttgctctgtcacccaggctggagtgcagtggtgcaatcttagctcactgcaacctccacctcccgggttcacaccattctcctgcctcagcctctccagtagttgggaccaaaggcgcctgccaccacgcctggctacttttttttttttttttttttttttgagacggagtctcgctgtgtcacccaggctggagtgcattggcatgagctctgctcgctacaagctctgcctcccgggttcacaccattctcttgcctcagcctctccgagtagctgggaatacaggcgcccgccaccacgcctggctaattttttgtattttcagtagagacggggtttcaccgtggtctcgatctcctgagctcgtgatccgcccgcctcggcctcccaaagtgctaggattacaagcgtgagccaccacgcccggccagagacggggtttcaccgtgtcagtcaggatggtctcgatctcctgacctcgtgatctgcctgcctcggcctcccaaagtgctgggattacaggcgtgagccaccacgccaggccaggaaattgtattgtttaggaatgcgtactaatgagtgatacaaataagaaattgcatgagaatggtggtgacctttggtgaggagagaagaggctgctggggtgatggttgtgctctctctccaccaggatggtataccgttaactttgcatatttcctttatatttattcatccagctatattttatattttacatactttttctgcacattttatttcacaatataaaaagttttaaaaatacacacacactgactcctatatggagaattattcatgggcaaataatggaaagtattgtaggtgagagagaatgggagtaggggcttggaccagggccatagtagtactagagatggagagaaatagatccaggaggtaggacttgtgggacttgctaacagattgtttcttcttgttctttatgatagttcataaaccagaaaaggtcacatggacggaagcagcaggaagcattcgggatggagtgcgtgcctatacagctctgcattatctttctcatctctctcctggaaaatcagtgctgataatggatggagcaagtgtaggtgctaatggttttgttaagaaacagacaagcatacagtaaacttaggaaatttagcaatgagccatccatttgctaatataattctttgccaatagcttattgattgactttttttccagtgtcctattttgttataataagcagcttttatcaatagaagatcaaagttagatttagtgtgattagtttatgactttgaatctgctggtacattaaaaagacaagccatttttattcattcctgttagacaaagcctaagatgccacatgagcctttgaagtcatagtccagaattccctaatagctttgtagcctatttcccaccctcacacttacgttgatcaagtattggcattttatgtatagatggatcacacaaaagatcaacacgtcctaatttaaacatattacatatatcaaaaaatagttcaagacactaaaagaatacataaaatattgtcatctaaaaatgttaagaaaatcttgaaattaacttatagttttattttctaactggcttgtgatgaaatgctttcttcctgcttttctttgaagaaaaggcaaagctgtcttcagcactggcttcagcctgatatccaacatcaggatagtagtgtttccccaaacttaccctataggtctgaacaggatggagcttttgaagtgttttgatcttcaaagagagatagctggactcccatatatagtatataattagcttagaccatcgcattgacaaggcccagttttctctttgcaaggccatgtgtctgaatgtggccctccatccttgaaattatgtgctgtggtcagactgagtgacagcgtgtgacatgcagcttttccaccaccccttgtaaagaagaaagtcaatcaaatatttcccctattaaacttgcccataactttgctcttttcctattagataacattttaaaatatactaaagtaacactaaagaattatactttattaaataatataaagaaatcaattcgatatggcctctgttctataaccatacacccactgtatatttttttctacacaggcatttggtacaatagctattcagttagcacatcatagaggagccaaagtgatttcaacagcatgcagccttgaagataagcagtgccttgaaagattcagacctcccataggtgggtaatattatgagcacagactttaaaacaggaaattttgaaggaaaatcacctttaaaaatgtacttgtaaaaccaagtacaaaatccctggccaggtgcagtggctcacaactgtaacctcagcaccttgggaagccaggatgggaggattgcttgagcccaggagtttgagaccagcctgagcaacatagaagacctcatctatatataatcttaaaaaaaaaaaaaaagaatttataaaatcccaaatgaaagtcagtttcaaaatgcagtgtatgtgctatctcccaatttgcttttttttttttttttgaaacagggtctcactgtgtcacccagctggagtacaatggcacaatcgtggctcactgcagtatggacctccccagggtcaggtgatcctcccacctcagccacctgagtagctgggactacaggcatatgccatcacgcccagctaattttttgtattttttgtagagacgggtttagccatgttgcctaggctggtatcaaacttctgagctcaagcaatgcacccaccttggcctcccaaagtgctggaattacaggcatgagccaccatgtccagccccagtttacttaagtgatagttttaattttaattatttttttttaaacttacatttttcaatgttttttcctgtttgccccattgttttcaacaatttacttaattttgaattaggtgaactttgatgcagtttagaaacacctgatgcaggctgggtgtggaagaactagagacaagcctcagagaactagcttctccaaggatatacacctagtaaaggactggaatgagatttgaacccaggcctgtctgacagtaaagctcacattatttccactgttacattatgcttgtgacagagataaccaagaaatagaaggaaggcaatacaggggctggagaaaggaggagaaaaggaaaaagaagagatctgaaaatagaatggagaaagagcacaggctgggcgtggtggctcacatctgcaatcccagcactttgggaggccgaggcgggtggatcacttgaggtgaggagttcaagaccagcctggccaacgtgatgaaaccccatctctattaaaaatacaaaaattagctgggcgtggtggcagacgcctgtaatcccagctactcaggaggctaaggcaggagaattgctagaacctgggaggtggaggttgcagtgagccgagatcgtgtcagtgcactccagcctgggcaacagagcgacagtccgcccccaaaaaaaaaaaaaaaaaaaactttatggaccgggcacagtggctcatacctataatcccagcactttgggaggccaaggcgggcagatcatgaggtccagagatggagaccatactggctaacatggtgaaacctgtctctattaaaaatacaaaaaaaaaattagctggcatggtggcgggcacctgtagtcccagctactcgggaggctgaggcaggagaatggcgtgaacctgggaggcagagcttgcagtgagccgagatcgcgccactgcactccagactgggtgacagagcgagactccatctcaaaaaaaaaaaaaagcatgaatggtattaaaaaaaagaacatgaacgaagggaaaatttcttatttgttaatttgcctttcctagattgctttgtccccctttcccttttgtcctcttcctccttgcctccaagtcctagattactctgttggactacaccactaatctgagcagctctaagaggaattctcttcagctagaaggtgttgaaagatagagaaaggaaatacaaacatgttgttatttgccagttcaaaattctgagaattatttttaattctgtcaataatttatattctattaataggatactactaatatcctttaatgcagccaattaaaatctgtttaatttttactgacttgcctaaaaatcatgctccttttccttagctttaagatttttcttcatttgggagagtaagtggggaagagagggagatttctatgactgagaaagggtgaaacagcctctagtagataattaccatattatacaaatacagactgtccccagctgacagtgtttcgatttaggattttttaaatgttacgatcggtttattggggtatagagtgcatttttgacttacggtgggtatattgggatgtagcccatcgtaaagatgagcatatcatctgtatatttttatgttttttagctctaaagactattaaatatgaacatacttgagaaactacttaatctagctgggggtggtggctcaccctataatcccagggatttaggaggccaaggcaggaggatcacatgaagccaagagttcaaaaatagcttaggcaacatagcaagaccctctccctacaaaaaaaaattaaaaaaatagccatgcgtggtggcatgtacctgtagtcctagctacttgggaggctagggcaggaggattgcttgaacccaggagttcaaggctgcactgggctgtgatcacaccactgcactccattctgggcaatggagtgagaacctgtctgaaaaaaaaaaagaaactgacttaatcttccatttcatgtcgtattatatatgtacctctgtgttttcagattcctaattctggcaacatatcctataactgtagagaatagtgctctgtgtcaacagaccagccttggatcaccttctccacaaaatgttcacattttagttttattaaatatacaagtctcttcatttagactgctatatcccatattgggttagatgagaaaaagtataatttaaattgactttctccctttaaattcagtaattgtttgaattgcttaactcatttcaagaatagatatttatttgcttttctttttctttttccctgatttgtttgtgttgatcacatagagaacagtacaattgcctgatttcctgtcctttacagcccgagtgattgatgtatctaatgggaaagttcatgttgctgaaagctgtttggaagaaacaggtggcctgggagtagatattgtcctagatgctggaggtaggtaccttatgaaattagtagcctgtgtagtttttttagtttgatgaatttaagaaaaaaaatttaaccagggcataattattaatgcacttattaaaccagatgttcagttttaggttttgtttttaactgaagactttttaatttaaattggaacttccactttattctcattgtaagcgctgtatgtaagagagaacatgcttatcttttacagcgtagactaggggtgtccaatcttttggcttccctggccacattggaagaagaattgtcttaggccacacataaaatacagtaacactaatgatatcttatgagccaaaaaaaaaaaaaaaaactcaaaaatgtcttataatgttttaagaaagttacgaatttgtgttgggcagcatttaatgccatcctgggcaggctgcgagttggacaagcttggtgtagacattagagtaacaaatgacatatcgctacaagaaatctagaaacatggcctcctcagtggctcccagaaaacacagcatcattctcatgccttttcagtcccatctgctgtgtgtggctgccttcgattggatagttgacttctgcagtctctatttggaaaatatcaaaatttgttccagtttcacttttcttgaatgtttttagtttaaccagtatttatttaacacttactctgaacacacttaagtaatagcatgacttctaaaggataggctttacgagcctgcaaagtgcttctatttatactttggtaggatttatcttctaatgtgagaatcatggatgaatatggttatgactatagtgtggttttttaaaccagtattttctaagatttgaaaatagctcaggaaaatctgtcagtggaagtaaatacatactttattgcatcattttttcacatggacatttcagtaattatgttaagactatcttgagtctatgagttttttaattgggaatcaattcatctcactatattaagctatcagtgttaattgtcagatttggttatgtgttacattactttgcctggttttcaaatgaagatagactttttatctttatttatttctataataagtagatttacaataaattacaattaaatgttgaataaattttatgatcagtttaatgcaaaaagtagattttaaggtatcagaatacattgtgtgttgctttttctaagaaaaatatttcctcatttgtacattaaaaagtaaggagggctgggtgctgtggctcatgcctgtaatcccagcactttgggaggccgaggcgggcggatcacgaggtcaggagattgagaccatcctggctaacacaatgaaaccccgtctctactaaaaatacaaaaaaaaattagccgggcatggtggcggcgcttgtagtcccagctactcaggaggctgaggcaggaggatggcgtgaacccgggaggcggagcttgcagtgagcctagatcgcgccactgcactccagcctgggcgacagagcgagactccgtctcaaaaaaaaaacaaaaagagagtgccggcggacacagtggcctgtgcctgtagtcccaactactcatgaggctgaggctggaggattgctggagtccaggccagcctgggcaacatagtaagaccttgtctctaaataaataagaacttgtttgaagaataaatttttgtcagattattataaaatatatttcttctctctctctttttttaaaactattcccttgcaagtgagattatatagtaaagatgatgaaccagctgtaaaactacaactactaccacataaacatgatatcatcacacttcttggtgttggaggccactgggtaacaacagaagaaaaccttcaggtactatcagaaaccataaagcgttaccattacaccaaaggggtgtaattaacaaacaataatgcctaagttatttgaggcaaggtatgactaaattagtataaaatctgggccaggcatggtggctcacacctatgagtccagcactatgggaggccgcggcgggcggatcacttgaggccaggagttcaagaccagcctggccaacatggtgaaaccccatctctacaaaaaatacaaaaattagccaggcatggtggcacaggcttatattcccagctccttgagagactgagggctgaggcatgagaattacttgaacctgggaagcggaggttgtagtgagccgagattgcgccactccacaccagcctgggtcacagagtgagactctgtctcaaaaaaaaaaaaagaaaaaaatctgaaaaataaagaaatttagctttttttttccattccatattttatatcagaaagaaatgtagctttttttttcactttagcaacatgttggccaaaatgttgaaatactgcctagtagagacatcctttcaatgacgatgaagtgtaattttatttagtgatttagacatgtgacttacgaatttattttattttatttttttatttttttattttttggaacaaagtttcgctcttgttgcccaggctggagcacaatggcatgatctcggctcactgcaacctctgcctcccaggttcaagcgattctcctgcctcagcctcctgagtagctgggattacaggcgcccgccaccacgcccagttaatttttgtatatttagtagagacagggtttcaccatgttgaccagggtggtcttgaacttctgacctcaggtgatccacctgcctcggcctcccaaagtgctgggattacaggtgtgagccaccacgctggcatgaatttttaatagtatttcagatagcattttttctcggtgacattgttgacatatacttagcaaaatatttctatataaaattatcacaatttcctaattattcaaattggaattactatatatgtttatgtatctctcaaggttatatttttcagcattctagttacatatttacatgatggctgatatgcaaataccgtaattctcacctaccaatcttcactgattttccaacaccctcatgaagatggccagaaaagacacacacacacccctaccacttcaccaccaggattctagattggccttgcatctgccatgtacttatcacctcgctgtttcatcattttggaccatgaaatagaaaatattatcgtttacgttattaaagtttatgtgcatatttttgtgatttggacatcatttaatttgtgtagaagtttttctgactcgagataccagtcatcctgctgttaaactcacaataattgattagtctttgtttcattctatccaagttggatcctccagatagccactgccttttcctcaagggagcaacgttagctttcctgaatgatgaagtttggaatttgtcaaatgtacaacagggaaaatatctttatatcctttttatcgactgattgagtttctggcttgaactttgtactgtactaagttctttcattacgataataggaaataataatagcagttaagtttccttaagtattccaaacagtattccaagtgccttgcaagtattcatttaaacattaaaacagccttttgagatgtaagtactgttatcatccccatttcacaggtgaagaaacagaagcacagagatgttgatacagactcaaggacgcagcaagtggcggagcaagaatcacactcaggcagtctctctcctttctgaacagagatgagccctaagatacctggaagattttgtttttaacctcacattaaggaaagcacacatcaccttgaaaggttgcacacttactcctatgatggtgccattgcacagaaacatttcagaatacttttctaaattaaagagtttgtggagtgttttataaatatcaatgctaggaaatctttatcaaatgaagataggtttgactttttgaaacaaaagtcattcagagataagtctggtgtgattgaagccaaatcattccagttgagtaaaaataataaaaagtttggaatatacaaacaatttcaaaaagaaaggtgcaaacctctttagagtagggtcaacttaagaattccttttatttctaaaatgactggcttagaggcagcagcacttggtaaaagttttaatgtattggataaaaaaaaagttatcattacttgatagagcatatgtgtgtgtctgaagaaagatttacatagccttacacttctctctactgaatatcatacgttacttttcttaaatgtgtctagtcatatatgtgtgatatgtataaaggccagttccctccaggagcaatgacagtctttattcggagctttaaggtagttatgtaggccgggcatggtggcacatgcctgtaatcccagctactcatgaggctgaggcrgargaatcgcttgrrcctgggaggcagaggtttcagtgrgccragattgcactactacactccagcctggtgacagagtgagactccatctcaaaaaaaaaaaaaaaaaaaaaaagttacgtaattagtatactgcatgtgttaagttttaaggagtagatttcaaaaccccttcatgtagtgaatgtatgagtttaaagttatttctgattaaatatttcctattaaatttgaaaattagatttaactttctaaaaggatttttaattaatttcattttttaaaaaggtacatgagctggcacagtggctcatgcctgtaatcccagcactttgggaggccgaggtgggggatcacgaggtcaggaaatcgagaccatcctggctaacatgatgaaaccccgtctctattaaaaataccaaaaaaaaaaaaattagttgggtgtggtggcacacgcctgtagtcccagctactccagaggctgaggcaggggaattgcttgaacccaggcagtgaaggttgcagtgagctgagatcgcgccactgcactccagcttagctacagagcgagactctgtctcaaaaaaaaaaaaaaaagtaaatgtccaatccaataacattgtaattattaagaataacatggaatgatgctacagtggagaataccatgtggctattaaaagtaacagttaacaaaagtaacattagttaaggttagaatactatgtagctattagttttgattttttttttttttttttttttttttttgagacagagtctcactcttgcccaggctggagtgcagtggcatgagcttggctcactgcaacctccaactcctgggttcaagcaattctcctgtctcagcctcctgagtagctgggattacagacatgcgccaccacgcctggctaattttttgtattttttagtagagacggagtttcaccatgttggtcaagctggtctcaaacgcctaacctcaggtgatccacacgcctcagcctcccaaagtgctgggattacaggcatgggccaccactcccggctgtagctattagttttgaatcttacatgttggaaactagactgctctgcttatagtatataacttaattctctcaaaccacctctcccgatgagaaggcaattttaacctatttgacaaatccttggaccaagttgaaacatgacatgtgtatatgaaatactgtacattttccagaatcagaaatacatgctttgcacacaggtaagaattttattaacagcagtaggaagggaacttgcagggatgtgaattagtaaatttatattctttagtttccttttaaaaatatttttaggccaggtgtggtggctcacgcctgtaatcccagcactttgggaggccaaggtgggcggatcacgaggtcaggagattgagaccatcctggcgaacatggtgaaaccccttctctactaaaaatacaaaaaattaaccaggcatggtggcgggcacctgtagtcccagctactcgggaggctgaggcaggagaatggcatgaacccaggaggcggagcttgcagtgagccgaggtcgtgccactgcactccagcctgggcaacatagcgagactccgtctcaaaaaaaaagaaatgttttaaatgacttatatttgctaatttgcattttctttctttctttttttttttttttgagatagagtctcgctctgtcaccaaggctagagtgaagtggcgccatctcagctcactgcaacctctgcctcccaggttcaagcaattctcctgtctcagcctcccaagtagctgagactataggcgcatgccaccatgcccacctaatttttgtatttttagtagaggcaggatttcaccatattggtcaggctggtctcgaactcttgacctcaggtgatccacctgctacagcctcccaaaatgctgggattacaggcgttagccaccgcacccagccctaatttgcattttctaaagtcctgaatcatacagtagtcctcacttgtgcaaaccctcctcattcagttcatacaagctaagttgctgcttgtgatttaacagagacatctccttccaactgtgtcattctgggccataaataattcagaagtacgggcaattacatagaatcttgatcttagtattataatttcaattaaattagcaagatagattttttctttgatttttacatcattttctgattctcttagtgacatacgatcagccccctgtatctgagggttccacatccagggattcaaccaatcaaggatcaaaaatatttggaggctgggggcagtggctcatgcctgtaatcccagcactttgggaggctgaggcaggaggatggcttcatctcaggagtttgagaccagcccgggcaacatagggagaccctgtctatacaaaaataaaaataaattaacctggtgtggcggtgaattgctgtggtcccagctacttgggaggctgaggatcactagagcctgagaggttgaggctgcagtgagccatgatcatgccactgcactctagcctgggccacagagggggcccctgtctcaaaaaaaaaaaaaaaaagctctgaaaaagtaataatacgacaataaaaaaaacaaaaaaaatagcataaccactatctacatagtatttacattgcattaggtattataagtaatatagagatgacttaatgtataatggagatgtgcctcggttatatgcaaatactaggccattttttttttctttctttttttttttcttttgagacagggtattgctctgttgccctggctggagtgcagtgctcattccagctcactgtaacctcaaacccatgtgctcaagggatcctcctgcctcagcctccccagtagctggggcaacaggcacatgccaccatgcctggctaatttttaatttttttgtagagagccttgtttcccaagctgctgcactattttctataagggacttgagtatctggagattttggtcttcatgggggtcctggaaccaatccctcatggatgcgtgagggatgactgtatatcatacacacataaagtttactggcttctgcaaacaaattttgagcccattaaccaaccagcctggtcaacgaatgtacatctaaagtaagatatatacgtgctaaaattgtttttaactaaaaatgccatatgtagtgtagaaatgaaaactagacactatttcattcgcatccattgagataatagtggtgagcacttaggataagcaccaggcttgacttgctgctcttgtcacttgtccttggaaatttaggctctattacaccaccaactctcaaatcatttccctgttgtagagctaaacttgacgtcctacagaatttctctaacttaacrtgttgagtctctgagagtgcaaaacttgaaacaagagaaagtggcctgcctggcatcctctgcttattgaatggttttatttaattctcctttacattgccaccttaacaatccttccagctacgtatcttaaaggatgtgatggagaagttatcaactggtgttttcaggtacgctaaagtaaccaaatcattgttcttgtttgtttttctattttcagggagctaaggcaggcagtcccacttttgttttagctctcgccatgtacctgttgcctccatattttattattaggttggtgcaaacataattgtggtttttgccattgaaagtaatggcaaaaactgcatttacttttgcactgatcttatatttcgtttaaatagctgctctttaatatttatcaaagtgtatctggtggtacaccagtaggtactcgcagagatagaagtggcttgtgagttttcctcactccattatgtagtgtacctcaccctttgcttttcctcatcacccctcccaaagcaacttgaagtaaccaatagcttgaaggagagaaaaccatggtatatttgtttaaagttgaatatgtttatcagttataaaagagggagtaggccaggcgtggtggctcacgcctgtaatcccagcactttgggaggctgaagtgggtgaatcacctgagatcaggagttcgagaccagcctggccaacatggcaaaacactgtctctactaaaaaatagaaaaattcgctgagcgtggtggcgaacgcccataatcccagctactgggaggctggggcaggagaattgcttgaacctgggaggtgaaggttgcagtgagccgagatcacaccattgcactccagcctgggcaacaagagaaactccgtctcagaaaaaaagagggagtaaataaagtagataatttttttccttcaaaacttaaccacttttaacattggaaacactaatggacgaatttgtttgaattacttaaagtaatagatttgaggccgggtgcagtggctcatgcctgtaatcccagcactttgggaggctaaggtgggtggatcacttgaggctaggagttcaagaccagcctggccaacatggtgaaacccatctctactaaaaatacaaaaattagccaggcttgatggtgcatgcctgtaatcccagctactcaggaggctgaagtatgagaattgcttgaacccgggagccggaggttgcagtgagctgagatcgtgccactgcactccagcctggatgagagagccagactctgtctcaaaaaattaattaatacactaatagatttgagcactagcatttgtcatataccaccctgtttgttctacttatctttaactagacctgacatttctaatttcattccttctcagacctcagttggatgaacccattccactgtatgaggcaaaagtttccatggaagctgttcagaaaaatcaaggaagaaaaaagcaagttgttcaattttaattttcttctttctcagacctcagtcggatgaacatattccagtatttgaagccagaattttctttggaaattgttgagaaaaaccaaggaagataaaacaagttgcatttttaagcacgtttctctgctaagacaagatgctcagttgacacatttgaaaarwgtttgaaaaattcttgtgcaaatgatcaagataattctataattaacatcttaagggaatttttctaaaaaccttttcattgtttctatatattttgcccctgctataaaattccttccatgaagaaaactgctgctttcagcaaaagtcacactactcttgataaaagctgttgcaggcctttgctaagctatcaaagtaacgtattaattttgtatcaactccgttctcaacaccttccttaagtctttgctgtcataatttaagcatttgagtatattttgaagtcttaaaagacttagcccataggcacttaaattttgtgttttcaactattcattcactccggctttccccaggatcaaagaagatcccattaacttgccagtggcagctgcctggaagtctgagatgaccaggcactgggaacggggaagggagggatgtcggtaggctgcgctggcataggaagcgtgctgacgtcttatctgagttctctgggggttgaggaaggtggcctagtcccctctcctcgcctcttgagagcagtagccactgccctctcttaagtttatggaagcagcagcccatcgccgcagctcaagtttgtttccttttcatccaggcgccaaaccccgggctgatcacatccctgctgcgggcttaaatagagttaagctatttcggtgccccacagggtagtgcacatcagcgccctggatcgcatactttccagaagcgtcgctgaacctggcgactggactctggccgaggacctggcagaagcgccagggcagggtcaccgctgggacagtgggcgttgacggccacccgggatcgccgctgcgggctgcgtctcgcgggctgcccactgcgcatgctccgctcggaaccggcgggggcggaggcggggccgcgtcsggggcgggagctcggcgaggcgccacgtcaggggcgggcccggcgcgcgcgggaagtctctgtagggcggccggctaccctcagccgccgcgcgtcatggccctttcggtgcccggctactcaccgggcttccgaaagccgcccgaggtagtgcggctccgacggaaaagggcccggagccgtggagctgccgcctccccsccccgtgagctgacggagccggcggcccgccgagccgccctggtggcggggctgcctcttcgccctttccctgctgcggggggcagaggcggtggcagcggcggcggcccggccgctgctcggaggaaccccttcgcccgcctggacaaccgaccgcgggtcgccgcggagccccccgacgggccggcccgcgagcagccggaggccccggtcccggtgagtgtcttgtagcctggccgccaaggggctcttgtctttcgtgggttgagccagctgtgaatgggggatggaaagtcctcgcgttcgaggcaaggaaatgggcgcgaagacttcggccgcccgtggccttagggtaccccgccctgggagccgcgattctggcaaggccgggtttgtgggaagagcgctcccctggctaccccgctgcgggctgtgctcacgggacgcgttcccgaggaaagtgagggggccccagagggcagcgaggagccccttggagaggacttagaggtgacttggaaaagagctcgaaaaaccctgagagcccccatcttgcaaggacgctgttcgatggggcaggtgacaagccctgcttcccccgtgatttagggcctcccttctctcacgcactccaaattattctggagatgggggaatgtcgaggattcgtggggtcagaattcactagcatctgtcttacccaaagccttttggatctttcggtttgaaacgccggtccctgttcccctcaattttgatactaaagttcagacacaaaactgaagtgttgaaactcatagattggatggggtgcctctgaatttaggtgtacttgcgtttattgagaaacatgtatgccaggtgaggctctgtacatatttaacgcaaacttcagcatcctttaaattttaaaggagaatatatttaacctcagtttttagattctaatcaagaaaatgatttgctatgggaagagaagtttcctgaaagaacaactgttactgaattacctcaggtaatactttttaaatatcattagaatgtgtatttgtataaacttttttttyataggatttgagcctatttttaaaaatacatttatacttctcagaagcattttgcttggaaagtagttttacagagaggcttgatcatctcaaccagggatgaaaataccgcatcagccaaggtaaaggagttggtttgatacagtaatgatgactgtaaagatagccagcgctaaaataggcctgatagacgtgggggttttcttttactctctaacagtttttaccactcttctttgggcagttgacttctccagttcatcactcagagccagccctcctggcccacctccacaggttgtggcatagcactgaacctcgttgctcctctcccctaacacacacacgtttccattccccaactactaccattgtgctgtgtagtttgataaatgcggtttgtcctaatgggaacaggctagaagagttctccaagacccagtttctcttgtaaataagtgaccttcttatggtctatccaagatagttcccccttctctgatattttattgtgatataaaagaatgcttggccgggcacagtggctcatgtctgtaatcccaacactttgrgaggctgaagcaggcggatcacacctgaggtcaggagttcgcgaacagcctggccaatatgacgaaacccccgtctcgactaaaaatacaaaaaaattagccaggcgtggtggggcacgcctgtagtcccaggtactcgggaggacgaggcacgagaatcgcttgatcctaggcggcagaggttggtactgagccgagatcacaccacttcactcagcctaggcgacagagggagactccgtctcaatttaaaaaaaaaaaaattcttgtattgtggagaacgtcgacctgaagcagacaggttgaggggaaatatttgaagtcaggaaatgtttcttaaatatgggctttgttagccctggatgcagagtttcagaagcttaaaagatccaaaatgttttaacacttggaatatttctacttcaatacaaacatctatactaccataaagaactgtaaaaactaaaaagtgaaatctgcccctccaccacccctacccccaacaacaaattcccgcttcccataggtaaccatggttaaaagtttagtgtgactcctttcagacttttttacagtgtgtaatgtatttttcatgttayttattatacagcttatatgatttttacttttcagtgatcatgttagctgataaaatctttaggttgaaggttttttcttgatactcgactaatttttgcattctttgttttctaaagacttcacatgtatcattctccgagcctgatattccgtcctcaaaaagtactgagttacctgtggactggagtattaaaacgcgactccttttcacctcttctcaaccctttacctgggcagatcatttgaaagcacaggaagaagctcaaggtcttgtccagcattgtagggcaacagaagttactttgcctaaaagtatacaggtaactctgaaataaaatagttatgtgttaaagtaacaaattaagtgtgaaatgctctcctttgcaaaatagcagatgctgccttccattaagtttttctttggaaatttaaagatacaaagacaggaagttttgtctttcccagatggtgcttatggtgctttcataccttttttttttttaagtcagattgagtaactgctcatacatttagagacttgtcttgcaaattaatcagtgttgcaggcaagaattgttaaattatttttctctaaggctttttgagaaagaaaatacaaagaaagaagtgaaaagcaattgggtgggattgcaagggctgatggatttacagattttcttacctgtataagaaaaattttatgaattttgtggagtttgtgagttctagaatggttttagagatatacattttgattattttaaagcatcaactcaaaactaggaggctgggcacaatagcccatgcctgtaatctcagcattttgggggctgaggtggggggattgcttgagaccagcctgagtaacgtagtgagaccccatctctacaaaaaaaaaaaaaaaaaaaaattagctgagcatggtggtgggtgcctgtagtcccagctacttgggaggctcaggtaggaggattgtttaagcccaggaggtcaagactgcagtgagctctgattgtgccactgtactctagcctcagtgacagagtgagactatcttaaaaaaatttttttaaagtctcaaactaggttaaaaaggattaccctgaaaaaggtcttggtatattatacatcttttcaataaatagattaggatgatttgtgatttgccgtatcagtgtttactggctacttttaaaacagccttttggagagagggttggatgtagtgttacctacacacacatgcccacccctattcctcatgataaaaaaggtagtcattgtccttaaggatggtagaaacaggaaaatgttcccatctatgtttaaatgttctgatactacggcttaccattacatctggctcaaataaggataaactatgttttcgttcctataacaattattaatgctttcctatagaaagcaataaagattcttagacctaagtgtttggtaaagattgtctttaataaaatkctctatttctcaatgggcaaaaactgcccactgtcacctttggattttaggatcccaaactctcctctgagctccgttgtaccttccagcagagccttatctattggctccaccctgctttgtcttggctaccactgttccctcgtattggagctgatagaaaaatggctggaaagacaagtccttggtcaaatgrtgcaaccctgcagcatgttttaatgagtgactggtaagattagtaagagaaacttgtataattcaatagtgaattttattttagcagcattctctatcatatttgtgactggatacgttaatggcagaagggtatctagatccttgtgaattttatctgaacctattaataaccaacatataaactgtttactttttttttttttagctgttactcattctttacccaattgtggtagaatgtatataagtgttggttaaatatatacagacaggcaggccgggtgtggtggctcacgcctgtaatcccagcactttgggaggccgaggcaggcggatcacaaggtcaggagattgagaccatcctggctaacacggtgaaaccctgtctctactaaaaatacaaaaaaaattagcctggtgtggtggcgggtgcctatagtcacagctactcgggaggctgaggcaggagaatggcatgaacctgggaggcagagcttgcagtgagccgagatcgcgccactgcactccagcctgggcgacagagcgaaactccgtctcaaaaaaaaaaaaaaagtatatatatatatatatatatatatatatataaacacgcagccctaattctttaatgctacttcttgtcagtctctgcttccttttttagcagcagctcagagaaagtcagcaggcaattctcaattaagttttgtttaaagaaaaaataagtgtttaagtggtatacactatttgttaaagtattgagaagtcatcagcgagtcctcataaccaatttcagtcctttaaagctaagtcatacgtaaccacaaaaattaaaaccattatctaaaatatttgtgttgtgttttaaaccaggtatcaaactgaattattcagaattataaacattgcattaaatgtttaataataccttaagaaaatttttttacttcataggtctgtgagctttacttctctatataatttgctgaagacaaaactttgcccctatttctacgtttgtacctatcagtttactgtcctgttccgagcagcaggattagctggaagtgacttaatcacagctctcatatctccaacaactcgaggtttaagagaagctatgagaaatgaaggtaaaagtttaggtttaaagtgagaatactatactatatagtaaacctattttggcctaaaagctatttaaatttaaaatgccttttaccagttgattagcaacattaagaaatatattatttctttatttctggctttttttccctcccccacaattatttaatccagcagtccgcaaactttttggcactagggatcagtttcatgggcagtgaggaggatggtttcgggatgaaactgttacacatcagatgatcattctttttttttttttttttttttttttgagatggagactcgctctgtcacccaggctagaatgcagtggtgcaatctcggctcactgcaagctccgcctcctgggttcaggccattctcctgcctcagcctcccgagtagctgggactacaggtgcctgcaaccatgcccggctaattttttgtatttttagtagagacggggtttcaccgtgttagccaggacgatctcgatctcctgacctcgtgatccgcccgcctcggcctcccaaagtgctgggcttacaggcgtgagccaccgcgcccggacaagatcatcattcttataaggagggcacaacctagatgcctcacatgcacagttcacagtaggattcgtgcccctgtgagaatctaatgcgaccactgatgtgacaggagatggagctcaggcagtaatgttcactcgacagtcgctcacctcctgctgtgcagcccggtttctaacaggccacaggccagtaccagtccacagtccaggggttggggactcctgatttaaactgttccttccacatagtgttctctgatctctaaaataaaacacatattgggccagatagtcactatctgaatatactcttctagaaattcttctatagtaccaattacccctttaataacaaaattttcaaactgagtaaacccattagtggatcatgaaatctacttaatgggcccaatcagtactttttcaaaaagtgaactggaatacaatatgatttatgaaagagtgttacatgtatgtgttgtttcccgaacctctttcaaggagaatacgttttatgcatgtttgtaggtttgtgaagaaagcttgaaaactctactgccttaatagatcatttgtaaaaactaacatttcaaattttttacactctaaaagtacagcatgcctgttaaatactttaaatgacaactcagttacatttttgttcctcatataggtattgaattttctctgcctttaataaaagaaagtggccataagaaggagacagcatctggaacaagcttgggatatggggagtatgtgattaaaataactttatatcatccaytgacttatggactcatgaaatagatttgcasaggaacagcttgtgaaatagggactctaactgtagcaatttcctagggagcaagccatcagtgatgaggatgaagaggaaagtttttcctggctggaagagatgggtgtgcaagataaaattaaaaagccagacatactttctatcaagctgtatcctttcagttgttgttaactagaattaattttcattgaatgacgttagtgagaagtttaacattggcagttttatatgattayaatcttaaattatyttcaggtcatattaaaactaattctccattgtaatactaaataagcccctaagtatcaacaaatggtgaactattaaaccttttttaatcaaaacgttcaattatgattgtgggagaataggtgtgttttgactagagaagaaattaggtttaggtgtcagtttgtagcaaattcagattgttaacattttgattgaaacatatgccttatgattcggtaaagagaggtagcaagaggatttccatttcattatggagaaaaggagtctcaggtgattcagaatcaagataactgctttccacattaggtgagatttgcttttgcaatttccttgattgtcatcttyaggcgtaaagagaaacatgaagtacaaatggatcacagacctgaatctgttgtgttggtaaaaggaatcaacacctttacattgctcaattttttgattaactctaagagtttagttgctacctcaggtccacaggcaggacttcctccaaccctcttgtcccctgttgctttccgaggtgccacaatgcaaatgcttaaggtaataaaagtctgcataacctagcttttaagaagtactttactttgataggataaattcttgatttaaaaaaaaacctcctagcatttttacttggtacatattttcattttgctttcctcccattaaaaaaagaaacaaaaattatataagacagttatatcaaagaaattatgtggaaatatataaattatatgaaatcctttttattttcttttcgagatggagtcttgcgctgctatccaggctgaatggagtgcagtggcgtgatctcaactcactgcaacccctgcctcccgggttcaagtgattctcgcgccatgcctcagcctcttgagtagctgggattacaagcacacaccaccaagcctagctattttttttgtttttttttttcttgtttgtttttgtttgtttgttttaagagggagtcccactctgtcaccggctgcagtgcagtggtgcgatctcggctcactgcagcctccaactctggggttcaagcgattcttctgcctcagcctctcgagtagctggggttacaggtgggcaccaccacgcccagctaatttttgtatttttagtatagacggagtttcaccatattggccaggctggtcttgaactcctggcctctttttaaattatacgaacatttattttctttttttggttggggagacagggtcttgctgtagtgcagtggcacagctcactgcagcctcaaccatgtgggctcaagtgaaattcctgcctcagcctctcgagtatcggaccacaggactgccatgccctgctttttttttttttttttttttttttttgagggggaatctcactctcacccaggcgtgtgccaccacgcctggctaatttttttttttttttgtattttttgkagagacgggttttcaccatgttggtcagggtggtctcgaactcctgacctcatgatctgccctcggcctcccaaagtgctgggattacaggcatgagccactgcacctggccgccctgcattcattcattcattcattcattcattcatctatctatttagagacggagtcttgctctgtcacccaggctggagagcagtggctcaattttggctcactgcaaactctgcctaacgggctcaagcgattcttcaacctctgcctctggggctcaggtgattcttctgccttagcttcccaagtagctgggactataggctcacaccaccatgcctggctaatttttttgtatttttaatagagacgaggtttcaccatgttggccaggctggtcttgaactcctgacctcaagtgatctgcccaccttggcctcccaaagtgctgggattataatcataataaattatatatgtaaatacaaaatacatgctaaatcttagcaataaaattgaatggattttaaatttttgtttttccaatagtctgcattgacagtgtattactaaatcagataaaatactatatgaaaaaatggtattctctggaatatacttcacctgaaaatctcttaatatggaaaggttgctgaaaatttactaagtatttgtactcacataacattgttyagatgtcttgggaaatagttttattccataattgttaaaagagaggaaaccccaaatggaaatatattgaacatatttttggctaggcaaaaggttgagagatgatcttaattttccttttctttacattttcatgaaggcacggagtgtgaatgtgaagacacaagctctttctggatacagagaccaatttagtttggagattacaggtcctatcatgcctcattctctgcattcactgaccatgctgctcaaatcttcacagagtggatctttctctgcagtactgtatccacacgagccaactgctgtatttaacatctgcctgcaaatggacaaagtacttgatatggtaagtagacacctatgagcagactgttttagttgtagtttcctcaaactagctggagggaaattgagtcatttatgctgagtcactattgtgtttcaagtaattaaactgttacttaattatgaattactagaggaaggaataatgtctgtaagttgtttatgtgaggtagctttcatgaattcagtccaagtacaatttttttttttttttgagatggagtcttgctgttgcccgggctggagtgcagcggcgcgagtctcggctcactgcagccttagcctcctgggttcaaacagttctcctgcctcagcctcccaagtagctgagattacaggcatgtgccaccacmtctggctattttttgtatctttattagagacgggggtttcaccatgttggccaggctggtcttgaactcctgacttcaggtgatctgcccaccttggcctcccaaaatgttgggattacaggcttgagccacggcacccggcctcagtccaaatagttttaacagtgactgaagaacttcccattccaaaaaggggcagctttttcatttcctcttgcatccaaaactcaatagtacctgattcctttatagtttaaggaaacaattcactgtgggtatttaaccatatttgcctttaattttgaacatacttaaggtttttagagttagaattaagacctttaaaattgtctcatgcatctcagttggctagacttataaccattaatattttgggattttgtcactacaaaaattcttagcatcaacttctattaataggatgaatcacattaatcagccatttatttgtcagtctccatagtaattatttaactcttctgtgtttaaagactaatgtgctttttactgacttgtacacacatttccacaggaggttgttcataaggagcttactaactgtggtttgcaccctaacactctggagcaacttagtcaaataccgttacttgggaaatcatctttacggaatgtggtgctgagagactacatttataattggagatcctgaacaccaaagtaagcctaaaaggaatctttgaggaaaaaagccttctagcaaggaaattcaagattcttgaagttgaaggaatatactgaaatgtttataaacataacttttactacagtagcatctaaggttttaaatgtgttttactattttcagattagatttttagatataaagatgaaaaactcagataactcaaatgagatatytatatccctacaacctaattgtatattgagcagaaactgaattaatatgcttccttgcaaatgggaaatcacatagcagttaccccatggcattgtgactaatggcatcagggcaaaaatatgttactttacgatttacctgttagcaggttcttgtttcataaaggtagaaaataaatacagacaacatctactgagctagttgattggtgatgcttctaccttaatatctttcctactgatttataattcctttattttcacatatactaaaactttttaaatgcatgttaattcagataaaaaggcattttgtattccacatagaatagtgttaagaattgtgaagtacactgagctgtcacggcaaagtagtatttaatgtgcttataggggtgtgtgtgtgtgtgtgtgtgtgtgtgtgtgtgtgtgtgtgtgtgtgtgtgtgtgtgtgtgtgtgtgtgtgtgtgtgtgtgtrtgtgtrtgtrtgtgtagggggggactgtataattcacatttttaaaataaaagtgcttaaaaatcaaaagcattgggtaaagaaataatagtatctaagtatttgttcactttataacccagaaaataaaacaccacgtttwttccagagaagtttgtatttgggccttaagcttttgaaaataaagtttagagacatagcatatgaataccactgtaatacacatgaaatattctatcagaccctaaaaattaacataaacttttaactttctcatagtcaacaaaatagtggctggttgccaattttattagataagttggttacagcattttaattatcattttacgtctatctaggtgtagctgaaattcaaaatgcacatcaaagtaaaactatatcacaactcaatgccatactaaatgtactggcctctgcaatagaattctagtcagacttcattttttactcccttcttatgacccaagtggctttaacaggaatgcaggacttagtgctgatcatcacacaacataccactttctttttagaacctctacaaaattttgaggggagatggtggcattagccctgtggaacagatcttgatcacctcaataacactggcccattatctgtccagcagaacccattgtgaaatagtacaaggtgcacagcccttcactgattacaggcaagtgttacagtagcctagccataaggaaggggagttacatcatagtacaaaatacagtataaaagcgttatttaacattccacactgaagattactctgatgccttcaaacagtcgtttggatgttagccacttaaacaaatacatcactaaggtaaacaatataaacataccaaaaccctgtatggttaaatacaatttccatggtacaaaaatcaaagcctggagatgtttttacagattgctttttacacaatgtcttaaattgccaaatatttacaacattaaagaggaaatacattgtgatgcagagtaaaattctgaaatgattattataaaacctcaatctatctacgtgaggcactcctgaagcaagtggcattagccatgaggtcctttggtacaaggcccattgcttgaagaaccacagtagctgctgtggctttagcatgcttcttattagggctggcaaagctgggctggtaagcgcttccatttatcaatacctattcaagaaaaacatacaattgggtctggtaagggctccatttctcaatacctattcaagaaaaacatacaataagaacagcatcaaactttaatatctattagctttgtattttttcactaaatgctagaaaaataatttacaaaaatataaaacccatactatgtaagtcaaattataatctcaacccgaagaaccaaatcatttgggaaagggactgcaaattagagcaggtctccaaattgagaaaaagactgacaaaagtattaaattaattccccacattcaactagaaaataacaattgtatactatattttacccttttccaattttttaaaaaataggacattgacaagtcgtattaaagcacccttcagtgtttaaaaaccccaccacttaactacaaatacaaaccccccacccatgaacagaatcttaatcctgtgatcatgtttacccctcaccctctaagtcatcacattaataaatatatataattaatgcagaaattcatatttaccctaaagagaaaatgtttgcgatgatcagggccactatcatggaccaatagaaattcaggtggttgccaccttcttttattacagatctccatcaaagcagacacaggatgtttgcctgcaggggggagaaatacccagttttaaattatttccaccaacttctgcaacaaataatgaattcaaggtgggattagggtaagaggaaattcaaaaacgtgctctcacctgacagatctttcattgcagcagagaagttcccagacctcttttgtgctctttctcctactgcaacaagacctttaaaaaaaaattgttcactaaataaatttcaaagcaccactttaaaacaaagatccctctgtaggagtctgaacctcaaaatgtatgccttcaaataaaatcagcagattcctagtacactcgatttctctatcaatcttctctttcttctcttttactgtttttcagcatataaatttatatttaatattcatagatcttggtatgagaaattgtaataaataccaaatgtaaacagaaaacaaaaagttaagtatggccaggcacagtggctcatgcctgtaatcccagcactttgggaggccgaggcgggtggatctcctgaggtcaagagtctgagaccagcctggccaacatggtgaaaccccgtctctactaaagaaacaaaaattagccgggcgtggtggtgcgcgcctgtaatcccagctactcgggaggctggggcaggagaatcgcttgaacctggaagcgaaggttgcagtgagtaaagatcgtgccactgacagcctgggcaacgagcaaaactccatctcaaaaaaagaaaaaaaatagcttattgccaagtgatttctgcagatttactgtctcttaaaaaaataagcttcagttaagactcttccaaaaaaggttaggattttaagccaccaaaaaggtgaaaacggttgtctccaaataaaataggtcccttttttcctagcaaactctcctctcccttcctaacaaatgggagatgttctcaaaatatgaacataacctttctacataacctctctctccatagacttattacaaaggggattagctacattgctaaacccaaacactgctttcccaattcatatacaggttgagtattccttatccaaaatgcttgggaccagaagtgtgtcggttgattccaggttttcaaatatttgcattgtatttagcggtcaagcatcccaaatctgaagaggctgaaatccaaaatgcaccaatgagtatttcctttgagcatcatatcagtattcaaaaagttttctgttttaaagcatttcaggtttccagatgtgggatgctcatcctgtatgttacaggaaatttttcaacctttgctaaataattccatgctaatataagcttttctaaacctatcctgggaaatctgtggttctctgagagcttacagtcaggccatgtcccacaattccaaggacaatgcttcctgaaattgtacaatacttaacatcaaagtatttggtgcagagctagttcatttccaaattcattaagacagtttaactattgaagttagcttcaacttactgtttgattacaaagatgaaaataaatcccagttttacatttgtcagcttttataaatgaggtttaaacaagctatacaaaaatcatactgagctggcaagcctctcatgattccacttacattattccaagggaagaagttatttaaaagacgccaattagctatcatctgtgggaatgattaaatacttagcaactacatacaagctacatagaagacacagtgctgccctgcccaggtatctgaaggtaaaaggaaaatacagtcaatgctaacagttccaagatgccttaacacaaggcaacaggaagaagtaacattattgtcagcagctggtctactatactctaacccaacttaactactgagcttggaagaaaaaagcaaacagggtttatgaaatctagactaaaccagtattgtaataggaaataatgaagatgtgctaaaatatctaacaaaaaataaactaaactctagaaaaaaggatggttccttgtcaagagaaaataaaatggaaatcctgttttctaaacatgaaatccagttgaatttggaggtgtaataataaaattagatatatacacatttccatatttagcaactagcataacaaaaggtgccttttaaaagttcaaactggtgtctctatccatagttatataaaaataagctgctctgtgaaccccaaaaggggttaatgttttttctgacaaatacctgtatatatacaagaagtgccttcagttcagtatcactgggttcaaaaggatatattaaaggtaatgttaaaggagacgttaataaacattccaaaaaagaacttgttaccttttcggtctgtcttaaaatcaactaggatgggttccttattgccttctttgttttttcctaatccttctccttctctccagcccatttttctcatcaaaacggctcccattcctccagttaccggggctgctcttaagaactgatcctatccaaagaaagaaaggtaaaatgtccccattttacagttagaacttggtgacagattcattgtttactttctaaaaagaggaatcttactttacttctagatctgttatagcaattaaatgtaaattcctctatactttatacatactgtagtgtgtatgttctgattatttgcacattaacgtaatagtattttggaagtcaaataagacaagtaaatggcagttttgaaacagtagccctcgtgcccccctcaaaaaaaaaaaattagaacactcctgttttcgtccactatttaggttcactggtatctcttcttagcttgcaaaataaaaagaaggcaatgttaaaacaatcaatgatattaattgtcccaggtgtacctagtttatgaataaagcccagaaatcacttagaaatagtttagacactgaagaagcatactgttgtcatccaaagttttcttccccattctactataaagcaagtataaatattttacttagaaaatccctaaagcagaaaaaaaaaaaaaaactcttgaaatttacacagtaacaaatagaaaacaatcacataaaatatcctgtaagtatgccaaaatgaatttgaattcttttaaaacctagcttgatgttaaaagacttttaaaaaactccttaaatgtttacatacctaggcctcggtagcagcagtgttgtgaatagtacggctggcactgaccggggcaagaagacagctacaaggatttggccctgaaacaagtttccatacagaggggtgaaagttcacaggttattctgtgaacagtcatctctcttgtatccaacccactgaaccataatttccatcaaagcagcaaaccacttaatgtcctaagatgcacaagtatatatacattagcatggtcaacagttatttttacaggttaagaaatattcaatgcctcttattaaagggcatccatgtacatatagcaaacagtattaagttgtactgttgatctttatggtcattttttaaaaatttgaaacatatctccaaatcatgctttattttccccttgttactaaattttaggtttttatgttctcttaccaaatatatatatatatatatatataaatatataatatagcaaaagtcattaacttatcaacagagagagtaaaaaaacttcagtagctcaggaaatagtatgcacatctcctatattgataagttaatactgaatgtaaaaaagaaatgtttgtatgcagtagtaaaactgtatctatcatcttttgtttcccagctttgtaattaaatgctggggagaaaacatgccaatgacgtgtgactagacattaagttcatcaaggtgctctgatggaaggaggcagctgtggaggtaaaaacatacccctggttcagttccttatttggtgcaggccatgcagtgtagatgtataaagagaaagctgatgcttggatattaactgccttgatgctacacacctagaatgtcttttacttacttccaggttcatccgtccctcttttccagggaacacgcctaaaaaaaagggcaactgtgcagagtacaatataaatccccaaataacccaggtttccaattttgtttccattccctagtatcatcatctgtttctttaccccagtgtgaaaaagctgattaatttaatgagaccacaataacaaactgtatttatcaggtcacatccaaatcattccattctagaaataaaatttcttttaaacgaactactttaaatgttttactgattaatgagactactgataaaactttgctttttttgtaatctaaaaatacactgcaacaaactaaaaagaacacggaggatgttggtattccatgtgttttttaacacataaggcagatgctggactatactaaagaagagccaaaatgatcgtttgacaggttttcta

SEQ ID NO: 98145 - DNA, 302248 bp, Homo sapiens
ctggtgagggcttcccgcttcatagacggtgccttctcactgagtcctcacatggcagaaggggcgaaggagctggagcctcttttgaagagcattaatcccattcatgagggctctactctcatgacctcatcacctcccagagttcccacgtcctaataccatcaccttccgggttaagtttcaatatatggattttgaggggacaccaacattcagactctagcagtaagagaagcacacactaaaagataatgccagagaaacagtgactcagacataagaatacaaaaaaatatgatggcagaaatagaaacacaggaagaaaagtatggaaggaaataagtggaacaggttttgcatatcataaacattgctcatactccctgggatggagcaaggtacagttttaccttattttacattttggaattatgttccgatggaaaagagctctgtggaggagttaggaacttcgtaaaatggcctcaggcaaaaggccctttaacctccttgggcctcaggtggctcacctgtactatgaggggcttcctgttctgaaactgggtccttctctttatctagcaaagaacgtgaccagatctgcctacatcatttgcaagttccagtggaaaatgaaaatgtggggctgcttgttcaaaagtatgaaaattccaagatggcactgacagagtattcaaataggtgctgggctcttccaagcatggggtcctctgtgactgcaaaggaaaccaaccctaattgtgaccacaccatccctgatttctgccaagttctttctaaggtgtttgctccacttccagagactgtctttcctgtttggggtttaacttcaaaatccaagcagcattttgtgctatggtcatttctctgacttttcaccctgggacagacagaatgatggatggatggatggttggttggttggatggatggattgattgattgattgatttatctattgataaatttatgcaacgatttatggtttgcctaccagacaccagacactggcacatttgctggatttgtgggacttgacagcatctgctgcccttcttgcagtacagtttacaagagtgaccattttattagctgagatatctttgaaggcagatttggacttgtcttatctgtctttctaatgggcttggaagccagtaggccactggtaaatattgactagataagttattggatgaatccatcaaccaaccaattgacctaataaagccattgcatggctattatagctgtatgagccaaaggaaaatctaaagataatgctaaactaattaagtgcaaggtgtcaaattaataaatacgcaaattgaatattcttaagtataattcaaccaggagagttcaatgactaaatcacacccatttttccctgtggttttgctatccaaaacttttcaaaaataaaaccctctttagacctttttaaatttcagctttaatttcccttacttcagtaggaaatgggcagggaacccagagcccttcaatgctcccctgaagctgtggatcatcccggaggcaggagccctccccaggggatggtccagctaagccctcttctttatgagagatacccaggggctccaataaataaccacagagctttgttcatagactctgcattatacaaacagcaggtggcacagttggatggcctgtgaccaaatcctggttctgcaccttctagatgtatggctttgggcaactcatttaatgtcactttgagccaattgtgccctctggaaaatgagggggttaaatgagtgaaagtgcacaaaacactgagactagagcagaagttgttaataaatgttagttactactactgcatttcaccacaagcttcccaatttttgtttctaaaatggtctcacataggacaccaattacactgccatttgtcgaatatttgttatgtggctagcactgctctacgtattgtttcatataatcctcagaagaatcctggcagtttggtgtttttatgctccaactattctgataaaatggagagtctgcagattaaagcaactttcttgaggtcacccagctgataaatgggaaagacagcaatcaaaccttgttctcttggatgctgaggcccatatcttgaaacatccttgtctttttgatcactaagtatctattgcatgcttaccagggagcatagaactatacatttacttatgtcatttaccattcaaattttcatcttaagaatggaaagccacccacttcctctgtcccatacagtacagagctgaggtggtacatctctgcagaggagggctggttgagagaccatgtctctgtgcttgccatcagcgtctcctcagactgtctccttctttcttcaaaaatctatttttatttggaaaatatatcactatctctgcatttgccacgtggatcattggatgaatctaccaatattggattaatacaagttgacagacatgtatttttcctctactccatggtaagctgcttggtcatatttacacgcatacattcagcaaaattttatcaaatgccaactgtgtgtcaggtaccccagttctgagggtgcagaaaagaaatacatggtccccaccctcagggacagagaggaaacaacgtccatataaaagaataagacagtaactgtaatgcacagcaatgcttgctcacactgccacatggcaaagggccagaataagctgtgtagaatcatgtttgtaggaagggaaggtttgagctgattttgccgggaaaatagcttccaattgtgtaggaaaagcagggaagagcattcgatacccttggaacaaaaatgcaaaagtgtgctctgcacatgggaatgaggttttctgtacatggccagagtatggggtgccatgcttgggagagataagaggcagaggtagatgagaccagatcgcggagtatgttgatgttatggtggggtatggactttgtcctgtatatctgggagcaggagggcatcaatggtttttcagcagtgatgggcctctgacataatgtgcgcttcagaactataaactgtggcagtatggaggaggggtgggaggccagagatggaagggcccactctgagtggggtggacaaacagtaaacatgtgcacagtagggcaacaagagggggatcgcaggccaggctgctggtggggagcaggaagcggtgctctgcataaagataggagtggtggctggtgagaacatggcttactggtccttcaggatggttgaggcatccaggggacattcagcgagaatgtcaaacagatcactggggaatgggtggggtattaaggttggagattagggttgccagatttagcaaataggtgctaggttcaacttgaatgtcagataaacaacgaatccctttttaatgtatgtcccatgcaatatgtgtgataaagaataatttttttagcataattatgtctcaggtattgaatgggaacactgttactaatacaagatcagttgtttatctgacattcaaattgaactgggtgtcctgtatcttatttggctaccctacttgagagatgccaaggtcaagtgtcctggatcccccatgccacctttccccaccctgccgagtcatagaatggcctgtgtcccagatatgggacttttttgttttttcctaaactcggaacattcctggggaaactgggatgagttggtcaccctaagctgaaaagatattggttgaattgaacttagagatgcttctagtcctttggcgacctcttgggggcctccagttggagctgacactggatgtaccttggtgaattgagggtcacaccaggtcggggtgggtaccccagaaaccatggtctgccgtttgccatctccatgacaccatctgtcaccttgactgtgccgaagaagaattccaacctttgtccaaattttcccttggtttgtttttttttttttttctcttgaagaacatttgctactgatttagttctgttttaaaattctcagttgagatgtcctgttttaacctctgtgtaactcttcttcagtcatttcctttcttctcagttcagtataatctacctcccccagtttgcttatcagaccaacataccccacaggcctggactttgttctgacgtccctttatatttaatcccaatgctgtttctctgccaagcagatgtgtattaaaatgtgcataagaaaagaagcaagctgggtttatttagaaatttcctcaatttgcacaaattccattggtataagagggtttttttttctataaaaacccacaacaaacatatggtaatagctacttagatggatcaagacaaattcgtatttggccatttctgccatccccattctggcccctttgccagagacacaaaaacaatggctcatattgtttcaatgtcaatgtcagagtattcatagatggagaaacatatgtgacacactgaagcttttttcatgcttgttgaagctgtctgttcatggggaatgagtgacttgaacagccttttaaaggcattttggccagcttgaaagagttttttatttttttcttgtcaggtattatatcatttataaggtattagaaaggataatttccctcaggtctttgggtttcatgtacgattttttttaaactgcttattttcaatatgataaaggcatttaagaaacaaggcccggcacggtggctcacacctgtaatcccaacactttgggaggccgaggcgggtggatcacctcaggtcaggagttcgagaccagcccagccaacatggggaaaccctatctctactaaaatacaaaaattagccgggcatggtgttgtgcgcctgtaatcccagctactcaggaggctgaggcaggagaatcgcttaagcccaggaggcagaagttgcagtgagcacagatcatagcactacactccagcctgggtgagagagcaagactccatctcaaaagagaaaaagaaacaagctgtaactcactaagctaaagacatggcccctaagcttaaatgtacaaagagagggagagtgaatattgagatatatgtaaaagatattgtgagtcctgttttctggactgcttattttagatctattaacagatggacatacttttcgtgaccttttctgacacaggcatcaacttcagggccatttgatctggatgtttttttaaaaataggactactctagcaagaacatggtagaaagagagtcgcatttatcaggccatccaatctaggaaggagggaaagaactgatcagatcatggtcaaattcaaagccagggaagtagcatcagcaggagtaggatgagagtaggtggcacagaaaagccacctgcgatccacaaccaagcagcatttcctctggatcttgttgacaacttttggctgagtgtgggcagtcaggaagaaccagaggtctgcaggcaaatcctccctgagtcccagccagtggtggaagtgctggaccggatggcagagcctgaagctatctcaaaccattcccaaataagaaataccacatgccacttctagcttttattatttcggccctgaagcaaattaggcatctaaggcccacagagcaggtgtagcttaacaggaattgcgttgggcaacagctgcccaacacagttcaggaaactcaggaaacctgagtttcagtcctgtagaaaaccacctcttcaacagtcgaggaaatcagcctttacttgcaacaaattattatacatttctaaatgctttggtgtcactgagttgatgtcccaaagccatctgatatttttaaaccagcttttttgctatatatgtatatgcatagaattgccatgatttattacacttggatctgtggatagtgaagaatatgtctgaaatgtgatgcaaattcattcaagagatttaaagccaggaaacaaagcctttgcttaactttttattcatcatggcacaagatagaaccttaagaaacaccactgggaatttcatcaccaacatgaaaattaagagtagcatgttttwtaaaaaaaaaaaaaatctttttttataatacactttcccttcagaagtgaaaaaaaattgcataaaatactgaagcgtatcgccatctgctggtcaaaaatagttatgcacttgaaaaacttyaaactactaaagtacggtagaacattttacaatacacataaaattacgaaagaaaacatttcctcagcctttggcacaatgtaagtacaaagctgtaggccttttaccaaatgtgatttagtttttaaggaattgcatgtaatttggcaaatactgattatggggcaaagggaaaaaacatgttctataatttgaatattctgtgtagattcttaaacactttatagttggattccagtttgtagttttgaaaaatacataaaaattatacattataaatatatattatatatggcctatataaaactgaatttgatgtaacgtgggacggacaacttcttaatttctttgtgaggcactgcctttttcttgtttggttaactgaatcctttctaaacaagttctaaaaatatatttcgtaatctatcagatttagcattttcctgaaaacgtattcaatatctaaaagcattcagtgatttttctttttgtatctgactcctatgtaaaaatatggcttctcatattctgcttcctcttgttagtgtttggtatcgaaggaagggttatccccagttataaagctatggcaaaagcacagaaacccgcttgtgcacattctagaacattctatagaatctcattgtttagtatatctcattgcttaatataagtgaagtgattttttttttaaaagttccttttgttttctctttgtgaatatatcatatatgattatacataatctgttacagaatacacaatagtcaaaaccgaagacacataaatacggttaggctataccaagcaagagttgtatcttatattatagagccaagagggacgtttttagattggacattgccatctggtttgggttctgtttgtttttcctaaggctggctacgcaatggaaccttattctcaatggcgggggcgtgagtgctctacctctgtaggtgaactggatttctcttgtgtcacttttgagaagtgtgaaagaagaacactaagtgtgccagtggccaccacccacggtcccccctgggctggagggcggggggctcggggcagggggggctcggctgggtgcgggctcagaccagcgtctcgggcagggcatcggggttgtcggtcgacaggagctcccagatctgccagcgctctctctgccagtcgagccagccagcgtcccccaggcgcggactgtcctgctcgcccgctggcagggagttggcgctgctcagttttttctgcgtgacctgctgctctcgctcggctgcttggcctccctggtccgtgggtgtctccacgccttccgggggcccctggatccaggctgccgctgccgcgggcttccctgggcccgggtatggaggcgggggccgcttgtcatccctcccactcccatggggtctttggcactgaggtgtggcccggctctgcagcccggccacatccagctcactctcgctgaggtcgtgggcgccgctcagggtcaagtactgctccgacctggccgtgggccgctcggctttccctgccacctggacgtggggcgtgctgcaggcgcgcgacaccgcagggtgggccctgccctccgtcgcgggggctgcggcctgagtcctccgagccccctgcgtgtcgctstccagctctgcggggctcccctgccaccgaggccaatttggggacaggttcccttgagaaagggagcagggccccgctcttagggagctgctttcaaaaatgtctccagaggaacctggaagccagagagaaagcccaagaaatggaatcagtttgtagaatccttgctggggattcaaatcctgttatttccttcccacttctacgacgtccccccggacttctaaaactgaaacagcacagtatgctcttagctgctgctacctgaagaaaacaaccttcccagcaaaacaaaaaaagacaaatgctttttgattatcggctcaattcatatgcctagactctgacaggttagctgagacgtcagactatattaataattggctttgccaccaatttgtgtttcaggaaagggcccctctacatggctgggaaaacttttcagaatccagaaggtgaaagaagcattcccttcttgttcaatgcaatctgtaatccaggagagatacaaattataatgttttcatgtttctattgcatcaatgaagttacttgaatctcaagtaccccattccatgccagaaggcaggccagccactatgcatattctcctaccatcaatgcaggaaaggctgacttggtgatcacccaatcgttcccctttacttcctacatggcagtttccagcctctctggcagttaggagggccacagaaatgaggtctgggcaacaaatgtggacagatgtgatgtaagccatttctaggcctgaactaaaaaaaaaaataaaaaaaaaaattaaaccaccctggctaacacagtgaaaccccgtctccactaaaaatacaaaaaattagccaggtgtggtggtgggtgcctgtagtcccagctacttgggaggctaaggcaggaaaatggcatgaacccgggaggcggagcttgcagtgagccgagatcgcgccactgcactccagcctgggtgacagagtgagactccgtcacaaaaaaaaaaaaaaaaattaaaaaaaaaaaactaaacgaatgccttcctactgatctttgctttcccccttcccttaactaccagcccagcatgaagactctctaggctctgaaactcttggaagactcccggggctctgaggatggtggagccactggatatgtggagcctaggctgggccccttagtgactatgtggaagacagcattccctcccctcacacactcccgcccctcctcacccctcacagtccacactgtactgggacagtgagggagaaatccagttgtaataggttaagccactgccccatttcggagttgttacagcagttagctttccctaaaggatacaactttctttaggaaactgaagggaaagaaataacagtgcattttgcaaggcaaaggaggagtccttggggcatgtgtacccagactaccattttcctatgaatctgctctgccctccacttcttaaaaagcagacaaggaacaagaacaaggccatgttggggacaggggagtgggggatgtgagtatttacaaagaaacaaatgatagctgaaacaggtgacagctgaaactggaaaaggaaaatggagtaaggctcttcacaggatacagtgagatatagttagaaaaggaatcagcactagagggcattacatttaaaaatgcactgtgcttttaaaatgtaatatgggagatattacaaaacaatgagaaagggaatataaatataaatataaaacaaccaaacaaataatttacacattttataccatatataacatgtattccagatggattaaaaaaattaaggttgaaacaatgaaatgacattaaaaagaaacgcatacagatgactgactatccaacgctgaactgaagattaattttatgaaagaattcacagagaagagacagtgataaaattaattatgtaaaaaaagaaaatgcaagtaagtaaacaatatggaaaaagagttaacatctttattatataaagagttcataagaatttaaaaaacactggcatacataaataggaaatgatataagtaacaattcaatggggggaagttcagcaaattaatagaaacactgaaaaatactggtaggaaagaaatgcaaatcaaattaacaaatgcaattttgttttttaagttagcaaaagtgaaaacccactaacttgcaatactgatgagatttgcacacagcagtgtaaaatctcctgccatccacagtttacagaatgtaaggtagtgggtcccatacagcacaggaggtgactgtacctccagattcttggaaagccttgttatatttgacgcacttccctgtttgggatttataacctttgacttgctttccaaaattttgtgaatctattaataatttgaaaaattaattacataaaagaggctcctgaaagtgtaacttattacaacaataacaaaaaatttcaaatgacttagtattggtttgtaagctatgattatgcactctgtggaatacccctggcccttaaaaaggataatggagagtaactggaaaatggaagttagaaaataatacaaagttgcacagacagagtgactgtaactatgaaaacctttgcaaaggaaatggaaaaaaatatagtcaaagattggcatatttgggtggaaagcctaaggatagtttcatcccctcccattttcagcatttcccaagtaatgtttgacaagcatgtaatataatgatagtaaagaaaactttagaaaataattttaaaagtaaatgcaataaagtttaaaattaatacttcacctgtcattcctgggtctttggatccgctttttaatgttgaatgccaagttccccagatatcgaaaggctcctctgacagatctagggaaaaagtgtataaaaaggtatataacacaaaaggaaaattaaaaatcaatgaacattttaataacatctcttctgtgcaaagtattgtattcaagatcctgttgtatacaaaacagaatacaattcagatccacctttcagcgtgttcattctacttgggatttacaaaaaggccctttctatatcatgctcgtggtagacagaataagggcccccccaaagatatctgtgtcataatcccacaaatctacaaagatgttattttcgaaaagggctttgcaggtgtgattaaattatggttcttgagatggggagattttcctggattatctggatggggccaatataattacaagggtccttataagagaggggtaggagagaagatgttgctagactgttggcttaaaagatggaggaaggggcctcgagccaaggaatgcagcagcttctagaagctagaaaaggcaagaaaacgattgtgccctaggacgtccagaagggaaagaggccctgtggacccattttagacttctcacctccagaaccataaaataataagtttgcatgttataggaaatgaatagaagggtgatgggtgacaacagctttataggtgctaaacacattaacacagaactagaggaacaatagagtttctgtactatcctcaggaatactttgctattggtatcactggatttcttcatgcatgcattcactcataaatccccttagcttatccatcaatatttatggagtaaggcactacattaggctttttcaccatctcatttaatcctcactacaatcccatgatgggattataattacgatttatagcagcagacgtctactgggtgcctccacgtgttcagcagttcacatgcgttatctcacttcatccctaggaggttcccagcagatcattttacagacgatgcaactagcgtaaggagcaggtaagaaatgcacacaagattacacagcaagtattatcgagtgcgtattacatttgaagtgctgcgttgagggctttacatggattagttcattaaactcaatgaattaaatactgttatcattctgagttttcacagcaggaggaaatgggactctgggaagctcaatcgctcactggagatcctgcaggttgaaagtggcagagcaggtttgtgactcccagtatagtgctctcttgtcattggatactaacactatttggttctggaaggttgtcttcatacatatagtaggttcagcttgttttctttagaaatgtaacagcagtaattgggtggcacctcagactagcaaatatgcaacccaaatccagtatacataaagttcctaggatgctggagggaaaaagaatcagctgggaataggagtggctcctctgggcatgcgtttatttcccagatatctgagacttggagtgtggcctgcagggaccctcccagccaacgactgggctcgccataccttcctcttcctagagtaggcgttcagcaggtactcggtaaatgcaggttgaattacagaaacatcaaataagggagagacgaagagaaggtccgaagagccccacaccatgccacatgcaacaagaggagggtcgcttgttttggccagcgcctgctggccaggctccagttacctttcccaagccttggtccaggagaactttcccttgactttgacgacgacaagtggcccaccagcataaactgccctggcactctgtaaagcttctccgagccccccggggccgcgtcctcttgcatagccagcagggagcgctcagacagcactggggagttgttgtcataaggggagatgtctccgctggaggccttgttggagtctgtagatgaatgcctccctcccacggaaaaggaaacttccgactgcagcatgtcagggcttctggcacaatgagacaattacaggtgcgtgagtttgttaacaagtagtgaccagatttaaacaatatggctattacacaaatgactggaggagtatgcgtggacacgggctgaaacaaaaagaccattttgagcaatgttccaagacatgtacatccatgacgtgaaagggtttcaacgatatgaccagcagagggcagtaaaacccaacagatataacaggaaaaggcaatgatggagaaggcacggtgagaatgaaaccgacaaggagccctgcatttgccaatgggcatcgctaagtgcctcagggactcattcctgcttccatttttaagtgaaagtctgatgctcactatctattaggtaaggatacactagtagataactctttcactttcctcaatatcctgcattaaaaataattcagataaaactatggttgacactttgcttgaagttcattatggctttctggacaacttttccatcccaccaaaatacttactgtacttagtgtaaataaatccatccttcatgtgataaagatgttgatgccaccggtgggaataagtgtttcatgtataaagtagtgacaaaaacaataaatatatgaccctcactagactccattttattcaaatacatctaaaatgattctacaaggcactagtgcttttacaaactgatatgatgtactaattagtataccattatcatagttctgtgttcatgagttgtcacagaaacagaaataacagtgaaaatgtatgtggaacagaaaaatgagaacttgagcaacgtgaaaagagcatgggaagtcttacctggaaacatctttcttttctaccctcctcaaaactggccctgacaacatcttgaagggaaacaatcacagattgattaaaagttccagaacctacatcttttcccccttacttcacttctctttactagtctttgctctcttttggcttaatttttcaaaacaaatcctttttatttcttaaagaaggtaaacacatgcctgaacaacactttcctaaccaaatggttttgtgcatgcaaactggaggaagtgcattcacagggatctagcttcctctgaggtttccagcaggggttaatatcgccgggaaaaacatcccagcttctgtgatactgccacagccgtaactgaggcaaacacgggcctgaacccttttgctgaggacatttcctaccaacatggaataaagaagccccttccttgcctcctctttgaactctcatcacgtaatcttatgggaaggagccagaggactgctatgaggatgattttccaggtctgcaagatctcattgagtggttgtgaagtgcatcccagggtggctgcatctgtctcacctgggaacttgttggcaatgccaattctacagctccattctggacctactgacaggactggctacaccatttgtggagcccagtgcaaaatgaacatgtgatgccccgtgtttaaaaagcgttaagcatttcaagatggccactgcaaatcagtaaaccaaatgtgggcttcttctgagtgtggagtcacagccctgaaagtcagctctgcctattaaaagggaaactcagggtggggccagcaaattttttaaagaatccctccaggtgattctgatgcacggggatgtttgggaacctctaataaccaaaccttattttcctctctcaatctgtagatgtgacagtgggctaaaggtctgctaagagccaaatcaggagggaaaccaaagatggtagccaaaactgcagcattggctgccctgggagtgaatgtggtggtcctgaccttggggtgactgaggccacagttaggagaaggaggaagggtgtccccatcccagccgattcctggacctcctctgtctgccttaagcaggatccagacaactgaatgtagtgtagtcccattgtggatcagaacattttgaagtgaaaggggggtaggaagtaccagtgtagtgttctctgctcttctggttcagtctcctaagtcaagccggcaaagtgaccacagctgggccctccatcagggaggaaacagtgggggtggctgaagcgaatccctggaggtagaggtagatgaggtgtctcatagtagacacaggctctgaacctccttgggatggctggggtcacagccagggacatagacagagggggcatccaatgagagacgatgtcttcttttcacagtttccccaccccccagtgtatcccagccatgggaggagatacagtgtgagtacacatggcaagcagtttgggaaatatacttatgtgaaatatccccttggcctgtgaggagagtaaaagttaatatttatacagagttaattatgtggcaggcactgtactaagctactgttaacaactctcctttttcctgacctgagtctgggattgagtgaaagaaacaargagctgactgaatgctgaataccatgctctctagcagcagaggcagttagggttgggattcttctagaatttatttggtagatagtgttcaacattattacaaatcagtagtaaaatgctctttcttacttagagttaatagccttttaaaatgtttaaaatatttccctatcattttattgtcttagcagaggtcaggaagtggcagccaaatttgcctaagaacctatgtccaagaattatcttctcacatgaaagcacaccgattaaaaaaaaaagctgttttattcactcctcagaactctcataacaacataggcagttcatagattttttaaaaaaatagtgtcattctattgttttatatctgtcagaagcaaatccaggatcaacatatatacacatactcacatatacatacatacccaacacacacgcacatacatatacatattcagacataaacacatacatatacatgcatcaacatatgaacacatacatatacatgcatcaacatatgcacacatatacatattcataaacacatatacacacacacaaatatgacatagacatgtacacatatacacagacacatattacatatacacataaatgcaactatatacacatgcatatacacatacacccacttaggtgatacaattggaagtaaagacacagaacagagagagagtaggattgctgaatggaggctggagtccggagaaatttccagagacttggaagcagaattgtgagggcctttcagagcatgtctctcctgtaatgggggctgggcatccagtcattgtggataccttcattacacacctgtgcttcctgtgtctgtccattttccattttccacttctaaatctttctattctatcccagtttctgaaacatttctaagtttatggaagctattgtaaaagcagcttgtcaaatttataaatcaggtaaaatctataaagttctgtaagattttccatataaaaatcacaaatcaaaaaacaaattcttataatccagaaattctgcaagaagacagggtgtgaataaatccgggtgtagtgtagtggaaatgtggatggtaaaagtttataggaaaggaaatttctctgaccctgaaacctagagataaaagtgagaaaagaaagaaaaactacctttcaggctacaactgtcagagaagtggttgtctgccaggaccagggtgcctgatggtggctaaaacccatcattgtgagtcagctctgggagcttcttgagtgggcattaccttcctacaaaccagttccaattggcagcactctaatttctgaacactggtggagaaatgggcccaggaggggaggttttagtgattttccacaggacactcagtgtcaaatctagaaaaccataccatcttttggatatgtccgaaaaatgagataagcaaccacaatgttttctctcagatttgactctaggataatccaaccctaagaagatagttttgagttcagggtcccaaataaaggcattaaaatactcatgtatctatttacatgaaatttttactctgatcagtgattcactagatgaggaatagtctaaaagcacatagtgacatctctttgtatgtcttggagtttgatggattgaggttcagaatgttgggtgaatgagttgccagttgacataagttggcatccaaaagtgcctggtggcttctctttccagtctcagagcatcatggattgaggttgggtggacaggtcaccagtctacatgggtttgcctccatgcatggagggtttccccgttagacccccaaaccccaggaccatctacatacagcatgcatggccaatctcagctaaccagacaagcaagggatgggcatggagagcgagtcacattctcacccttagctggtccctccaggtcagggcgtaaacatgctggcagggtactgtgggcaggcctgcactgcagccggaagcacagaacttgttctggggacaaatggaaaactccggttcaatcaccggatggggcccgcccagcaccttgctgagctaccccagcaagaagaactgtggaggtttcaaatgtgtgttggcttcatccttggcttaatcatatgactgataagttccagtctgttggaactgaaagcattgtatcatccatcttggattatatcaatggtactgggaaaggaatccactgctggagcagctttggaatcatgaagaatgtgcacattaatcaccatcagttctacaaagcctccctttgacagattgctagggataaaggtaccccacttcaaagaggaactgacatggctctaaactctccactggatgatgaagctaacaccctgggcataagcctttggtgaaatttktcccctcatttttagtccttattaattccctcctaatgtctctggcaaatggagcacttatgacaggtgaagatcagacagtgttgtyttcattatttacagagggcctgataaaaacatcttcaaattaacattctgcaaatttataaagaagctgtgaatcatagtgaaggtgtgaggaaggaaggggtaatgtgatacattctccctccatcttgaatgcctttccatagaaggcatatatgcacacattttagaatttttcattatggaattctctattccacataagctttttctaaaactatctggctggaaagactttcttgaatggagtatgtgtgttgggggaggggggcaggggcagttaatgcttcataatttccagggtattgaggccaacagctaccgccactcaataggactctttgctgttacattgtrctggtaaagttagatttcttgtctgaaaatttcctgaaaccctttctgatatgaaaaatcctagtaaaagaaaaacagaaattataatctgtcacataacactccatgtttgtgaaaaaagatatttttaatgatgagctttgaaagattaaaagaaatgatctatgtgatatttggtaagttaaatgtgatacctttaaattagaagaaagcctaatgctcccccagaatgaagaaggcagatttgtcattcaataagatgaacatctagctaaacaatacaattatttttcagtactgaaattttattttttttcagactagtacagatcttcaaccatgctcttgatacactagtcaccagttttgctaatttttaaaattaattttagtttaattttttttccagtaaaaactttgtgaaggctactaatagaattaaccacaatgaaatttaaatatatatacctgagtttagttcatccatatctgccttctctccaaatgcagttaaatttgttctattttgatcttgtttccagagtatagaagggaagatactttacttagccttatttaattaatattctatttctggggagcccctgaggtttgatagaataagagcaaatctttatatgtttcctcaagcctatatttaaaaattacaagacctgttgctgaaactagttactgtgtcacagatgatctgagctctgctgagctctcctgagctctggatttatgggggattttcacattaatcatgcttagttctgcaaagcatcccttatgcggaacttaggggcccgagatgcctcaggcaaaagaaaactgtgtacctctatatacatggttttgtgtatatttttttttcccagaacatcaaagcagttgaaaaaattgaaaaattgaaaagaagatacattcgaacctataatatttatattaaatttaaatgttttatgtatgcccaaacagaatttccttattattttatttcaggttaatttagttagaacttatttaagattgtcacttggtcaagagaaactgtcaaacatagcaattctctcagttggaaccaagataaacaaagtagattttgaaaatcttgctttgggagctgaggcaggaagatcgcttgagcccaggcggttgaggctgcaatgaaccatggtcgtgccactgcactccagcctgggtgacagagcgagaccctgtctcaaaaaataaatatgacttatgagttgcttccatttaaggcagcagcacatattttaccttttgtttcaggttctatgactaagcatggctagtctttttaaaattttgatattttctttatcaaacatttttggcattagcttggatttttaaaaaatattacattgcaatataatcaattttgctgactgagttttctggcattcccttaaattctgtgtctaggcaagcgtctcacttgcctctcactaagtcccagtcctactgtgattcctttgttttgttgcaaatattcacattcaacatatcctgtcctgtttgattaacctcccattctcattccctatttcctcacatccttaaatcaaagggtaggggaactattttaagtacctttgaagaaaagagcatatataatgctagtaaacatacctgacaagtatatatttttaaaaatcaaagtcttgctttctttttttttttttttccccctagagacaaggtctcactctgttgcccaggttggagtgcagtggcctaatcttggctcactgcagccacaaaaccccgggctcaggtgatcctcctgcctcatcctcccgagtagctgggagtacaggcatgagccaccatgcccagataacttttaaatttttctttagtagagatggggtcttgctgtggtgaccaggctggtcacagactcctggtcttgcattcttagtcataaaaatctcttctaatccccctctggcatcccgttttggttgaagccaaatacttaagcagacaagcacgagaaaaaacaaggaattatcctttaactcctccaataccgatgttgcataaagaagtgaaaaacccaaatcaaaacaaaatattaagttcccaaatatcactaaatgtttgctctttcaaaacagaaattataatattttcttgttcttggttttacactcttttgaaacttgtttcttttcccctccaaataaaatcttgtgcagtttccacttggcctcacaggaatgtaaagctttgtttaggtatgtgaactggtggcagagaacagaagcttcaggaaaaaaaaatcaaagggttagaagcaaatatagtgtttgcttttagacacaatgctataacttaaagtgaacgggttctctcttgtgtcatattgcctggaaggttgctatctcatgaaaaccaaagtagaatctagtgatggccacgcctttggtaagtagttgtaaatgagcaaattggtgatgtttatgatataccagactatacactaagagcataattctgtatttaagttggtgctactttttatctctagtttacagatgaggaaactagagagagagatctatctatgtattaacagatattaactcttaactaatagaccgcatatataatagcaatagaaatggaattgaaacgtaggcaatctggctctggatctgaaatggtaaccagtctattaaactacacaagcatgtgttattgacagataactgactacacaaacatgtgttactgatggataattgacttgccaatgcagccagcaccatctggcagtttagggtactgtaatttactataatttagccttacagtaatctattgtcactgcttcttgacttaagcaccacccctcagcctgccatttaaggrcttctaccttcactgctggccagcctctttattgtgaccccagctagccaacatatttactgttatgtccaggtcctggtgcaagctccccaaatatccaggcttgtttatatcctccacagtcttcaaagttcactgcaaatccttcctcttctcagaagctatctctgagacttcaaatcacacctcttttccttctccaaactccaagtggattcatggtctggagcattgattcccttcctttgtcaacacaaggatgcctttttaatgtcaaaaatcacccagctcaaactcccacatgatagtaaatttgtgatatccaacgtggtagatctaagctagaggttcttaaccctggttgctcattaaaatcatgcaagagactttaaacaaaaatccgaatgtccagattgcagcctatgaaaatgaaccagaatctctgaggggtggcccaggcatagttgttcttcargctcccaggtgattccaaggggctggtgagtctgacagccagtgggccagcacctattgtttggcattctacccttggaggcctcctccaacaagtctgaaagctcctaaaagcaagaatatactttgatattttaagctttttaaactcaaagtgtggatcatggaccagtagtatcaggatcacttgggagcttgttagaaattcagattcatagactacctccccgagtcctactgattcagaaagagcattttaacaagatctggtgatacccatgcatagtaaagtttgagaagcatgagtgagtgagtttaaaacacaaaaagaccacctactttgggaggctgaggcggatggatcacaaggtcaggagttcgagaccagtctggccaacatagtgaaaccccgtctctactaaaaatacataaattagccaggtgtggtggcatgcacctgtaatctcagctacttgggaggctgaggcaggagaatcgtttgaacccgggaggtggggattgcagtgagccgagattgtgccactgtactccagcctgggtgacagagcgagactcgatctcaaaaaaaaaaaaaaaaaaaaaaaaaggcaactacagctagaggggtagcactctggagctcaagcctcaaaagaccactaaaagtaaacactcatttattaacatatgcatttttacttcatgacatcattctctgccttctgggctgttccttggcctgtacctagaggaacacaaacaaaaaccaaacactttcttctcctaagtaagtcttcccccagtgttttctgttcactgataatgctagtctctgacatacacagagctcctatgggctcattcttctttttattttattattattatactttaagttttagggtacatgtgcacaatgtgcaggtttgttacatatgcatgcatgtgccatgttggtgtgctgcacccattaactcgtcatttagcattaggtatatctcctaatgctattcctcccccctccccccatcccacaacagaccccggagtgtgatgttccccttcctgtgtccatgtgttctcattgttcaattcccacctatgagtgagaacatgcggtgtttggtgtttctgtccttgcgatagtttgctgagaatgatggtttccagcttcatccatgtccctacaaaggacatgaactcttcattttttatgrctgcatagtattccatgatgtatatgtgccacattttcttaatccagtctatcgttgttggacatttgggttggttccaagtctttgctattttcttggaagccctgacactcacctaagatcttggtctagggtctgctcacctacactttaaaattctacttcttactcttacggatagggaacagaaggggctggacaattgtacagcttggaatgggcttaatatgtgtgcttcttccttttcctaatagaagagaaagaaaggttcgctttttaccacagcatttatatgcaaagagtgtatttgaaaaccatgtaaaaaaacttctatcaactgttctttaaagtatagtatttatctatctcataatgccacacaaaagcagaaatttggccaggcaaaaatcagtggttttcctcaaaagtgtgtgttttgtagctttcccacacagtaccaaccatatgttataagtgcagtttaaatgaggggctcataaatggaaatgccagcatgtctcttttctgtacaagggagggaaataaatgagtttatcaaaattatggtggtgcatgatctgctgaaaagaaaagccatttgttaatataaattaggacttataccttgatgagggttagaaatctaggaaaaatttaaatgtaagcctaattctctgatatgaaaagcaagaccataaaatactagctcatctatacaatttgaatataattttattcactcatggctcttggggcttgaatccaggccttactttcaacagaatttggtcctatttgaatcagaatttggcctgataatgaatggcccagacacagattttttaaagtagatctgaaaggataatccaattaaaaggtcttccctgctaagctggaaatggagtgaagctgaatttagctgtgctatcaacgtaatgacctgggaaagaaggaggttgaacaacatggaattccttttcaccaaatttttctaaataatataactttttaagtatctgcaataatcatgagtgaaaattaatttatcaagttcaacaccaatatacaggaataacttaacatgtgttactgtttataagacaccatcgattaagacatgccattattttatttatttgtttatttatttattattatgagacagagtctcactctgtcacccaggctggagtgcagtggtgcagtctcggctcactgcaacttccacctccccagttcaagcgattctcccatctcagcctcaygagtagctgggattacaggcacctgtcactacgcctggctaatttttgtatttttagtagagagggggtttagccatgttggccaggttggtctcgaactcctgacctcaggtgatctgcccgcctcggcatcccaaagtgctggggttacaggtacgggattacgttaggagcttatcattggttataagattagtctcaatttcagagatcataggtcatgggagaaacgtatcttagaattgctgaaatttagtaggttaaaagtataacaaaagtgataattttgtaagagcatagcaacaacttttcctgtcacaaatttattgtttggtgtcctggtgatgatactactcctggttaatgatgctatattatgcccttaactggttatgccaaatgctcagcatccccacaccctctgcctctgcagcaaagattggaagtaaccataaaatctgactaatgcaaaaactctgtgctcctcttttgggagcaaaaatggcagcaagccatagcctgcagcatggcttgcattttactaattgcaaacatgagtgcatgtagaaacccatgtgcatttttatcaaaataatactagctataaaaagtgggagagccaagaaggtgcacacctctaatttcaaatgggcacctaggcctcagctaaggtctgtcttgtggtttgataatgggttaatcccactggtaaagctgcacaagcaagatgcatccaggcgcagccttaagggcccctatgcacgcttatcagaattctagaagtagaatcattgacgtgtattatagtcccttgccagtaatttgtgctttttccctgtaaatgaagtcaaaaggaccctgagaggctagagaaagctgaaaataaaacagaaaaatcttgtaatgtggtttctaatttggtaagtggattgatgggacccgaagcattttctggttagatggactgatcagaattgccaaagagttgccaaaattccacttcaggtcaccctgcatgtasttatgtaaacctttccaatttctcagaaatggaaatagaaatctccaatgcggctttagaagatggaacactggaatactcacgatgattgggaagcctttcttctgagtaaatagtccacgacatcaggatcggtctctaacaggctgatcagcacttcgttctggagatctgggggaacctgaaggagccaaatgttgaggcataaataaaaccattccagaaacaggcaamatatggtcactgacaattttactgtagcacaaaacagagccctaaaagctgcaagacagcagaatgatttgctggttaaaaccaaacctacgccaacccatgcagctgctttaattcttaggaccaactggatgattaccaatagtcatattcaatccaaaatgtcacccctcatatgcctggagatacaactgaaccacttggatgcctttattgctcaggttagattttcttggttttgaataaggaaaatatcatggttcagagaaatagtgtccataatttattgcccaatgggggcactttctagagttcacatttataattatgccaaggcagcaggcagaaatgatgactgtattgggcagttctggaatatatgatcagtttattaagaaggcaggcccttgagccagactgcttgggtttgaatcttagccacgccagtcactagctgtgggacccttgacaaygtacatcgacaaggatcttcctagatctcagtttgctcacgtgtaaaatggggataacaacagtactcaccacgaagcattgctatggtgattaaatgacttattatatgttgagactttaaaacagtacttggtcaatggtaaatactcaaaaaattgctggctactacatttgcatatgtcactttattattcggtgcctgcctttactcctttcttgcacctggtccatcagtgatgaaaagtttctcactttgtaatttgttaggcatccagtagagttctatagatgagcatcatatatttctctaagcctaatccatccacagtacattagaagatggcctcacaaccctaagtcatctgtgtggaaatgttctataagagatgattgaacccagctctgacttgtggtttcttattccatagaagctgatagctcaaccaaaggaaactcaaaactattgagagaaaataaaatttcagtctgattctctcacacatgagctcagagagaagactttttaaaactgcagggttaagtcttctgaaaataagtggttggtggaagaatttgcttcttgcctcttgcagaactctacagttcttgagctctgagaatctggaaacaattttattaataaaaacagggatgagaaagcaaggaaatgtgttctgtctcttacaaatctgttcctcctactttatcgtgaaccttcattaatgacattgccaacttctaatcacgcaagctcaagatctcagaattgtactaaagcttctctgcatcctctctccattcagagccaggaggcctactagacttcatctctgttacttcttttctcccttttccattccaactgcagagactcaagttcaagccctcattagccttttgtagtggtcatctgttcatcattaaaagtctccatttccctcctcttataatagttataccccacgttccctctggtaaaccaactgctacccaagccttagctcaagggtgaagtgtgtatcgtagtcaaagtctattgagcattccattcccagatcatcatagttgcctgagcaatgggcatgtgactccatcagaggcaatgaaaaccctggaggttttccctgagacttctaagagaggatacagggcctgtatccatatgaggcctgatgattgcgctgacaattgagcaaacaataccaagaaatagagataaaagggatgtcttgatatcatctgagtcccgggacaagctatgtctgaagccatatttgcttgtggattgttcagctatgtgagccttcaaattacttaagctagtttgagttttgcattgcaaagaaaaatacgtacttgatgaacctttgatacaacagctttcaaatttgtctgctatttccttaacatgtgcagcacatttcttctctatgtggttgtcagaatgccatggtcaagacactcatttactggaaactctttttattcccatggctgaagccatccacttgcatactgtcctcaatctgtctttcccatcttctcccctagcagtcattccacacaagctctacttcagcaccactgtgcttctccctcaggtcttctcttccctcccttcctttcattcattgcataaatgttgagtgaatgcttcctgagtgccaggtattggatgctgggaattcagttacaaaccaaacagacaataatccttgtcttcatgaagctggtaacaaatatggaaagacgggcattaaacaaacatacaagaaaaacatagagaaacacaaggcaaagaagggcaatgagaaatgcttgggaagacgcagttttcaataggattgtcagtcccagagaagctgacattttagcagaaaactcaaactgatgaaggagttggagaaaatcattccaggtagaaggaaggaaaagaaagccaatgataaaggtcttgagtcaagagtgatgaggaggtctgtgaggctggaagagagtaggaaaggaggcgggtggtaggaaggggtcatagggccaggaccaggtgtcatggagtcttatgggtcataataaggacttctgcacttacttgcagtgggtggggatccactggagattttgaacagatgactaacatgaagcagcatcactctggctgctgagttgagagtagaatgcatggagccagagataaagcaaggagagcagagagggcctgctgatctacccagataagatgatgggtcctgaaccagggcagtgaggtgatgagaaatatttccacagtggacatagtgaggatagaggtaatagcattaatttattggatggagagagagagaagagagggagagggagaagaaaggatgacctcaatgcttggggcctaggcaactagaaagatggagttgctgttgactggtttggagaagctgcaggaggagaaggttgggggtcaagttttggagtgtggttttgatatgataatgtttagaggtttgcaagacatccaaatgaaggaggtatcttgtagatagttggcaataaggattcagagttcataggagaggtctgggttgaacatagacatttaagaggcacatatagatggtatttaaaaccctgtgaccagctgcagtggcctgggtatgaaaatggggagaagggaaagggcaggatatttaggtcaagggtgagattattctcttactgtataaattaaacagaaagacatcatttttactgtattttttccaaagatcatcacccaacagccatgtgctattataacagtttttaaaaacgtaacacctaaagggtgaaaatgagaggaaagagaactcatatttttttaatgaacagcagagcaaaaaataatataggacaaaaatgtatgtcccgatctcttttttagaagaaaattccataaacaaattaggaaaagtacttgcattttcatccagttagtttaatttaaaacttgctaggctttgacatgtaataaaaaatttcgtggctgggtgcggtggctcacgcctgtaatcctagcactttgggaggccgaggtgggcagatcacgaggtcaggagatcgagaccatcctggctaacatggtgaaaccccgtctctactaaaaatacaaaaaaaaaaaaaattagtcgggcgtggtggtgagcccctgtagtcccagctacttgggaggctgaggcagaagaatggcgtgaatccgggagacggagcttgcagtgagccgagatcatgccactgcactccagcctgggtgacagagcgagactctgtctcaaaaaaaaaaaaaaaatttcgctccaagcactaatccattcttggatttaattaaagaataaacagttagagtgcaagcccttcagagtggtgcaagcatgacaatattaattctttgagagtatgtagtatgtctaagataaattatcaacttggatgcattattagaataggtttcagaagtatcattacttaaaaaataactttccataaatttttgtcaagctagtctgcaattcagaggttttcctcattcaactaggcgagcaatcataattactgaggtctattttatgtagcatatgtgactcttacttggtaacaaatgcaaataggaagggtcacagttataaatctatctacagtttccttttaaaaggcccatggtaccattttggcttggagacactatttacaaatgcataaaaaagacatagtttaaaattgtagatccatgtattacaggaaggcaaataatattttcctatgtattatgcaaaactaactacagttgtatataattcattagtttatttataatccattttgttacagagtgatttaaggcagcttcaaaatgtatgtgattaaaccacattctaaaaaataaaggaatgattcagaaaattggagtcagtgggaaaatgaggtaaaaaatttgaaatgatgcctgaaactgattttttaatgttcatacaacagcacccagtactgttttcctataattcttctaatctttggctataactgcacatttcgtttcctaacatttaataaaaatttcaaactactggctcagttatattggatgaacacttatttctctattaatttaggtacttaatggagaaataaaagtcaagtaaataaactgataggaaacagcagcttgaaataagtaagaaagaaatatctaggtagaccactgacttaagcataccttttcaggaattaggatgctgtaaaaaaaaatctgactgaggcaacagcccctgaaatccagttttggctctgctgtttataattratataaacttggacacatcaatcaccttctttaggattctgttcccacatctgaaaacatatgcatattcattttacttaatggggggtgttacgggaatcaaaagcgctaaaaaaaaatgaaaatagattaccaattgcaaagagatctagtaataaaatgttttattagaaatagatgaaataagtaagttaaacacttgaaaaaataaaagcagataacatggagatggacaatatttattctgcagttattagtttttattaacagtcatccattcgctttcagagaagaagcactctcttctcttttgcttaacacttcttttgggtaactcagttatgggattttctcttgctatgcctctgcttctaatccccctctgaatttctggagttacagcctatgacctcttggcccttcaactgcaatggtcttgaagtcagactctgtgtagcctcacccttccagttcctttggctagaccttgaatcttcccaccattcaagtcattagaaggtaaatttcctgaaggcagggattatctgatttgtttacccagaactgaaacaggctcagaaatttgtagttttctttcagctagcctccctcaaagctagggcaagatcacgtatgcacatgctggtacctgaagtggggcatgtaggagcttctggaaaaggttatcttccctattgaaaatgggtacatgaaaagaaacatcatctcttcattaattgatgcaatgatggctggaagagatgctgttatcaactgtagccattttgcagctgaagatggcagagcagagagagagagagcaaagtgctacccagctactgaaactgtgcccccccccccatatttactgtgtcacataataaatgctgatgtcgaaagccatttgcagttgattattgttctccttgccagtcaaatgtttcctaaatgatgtctcattttcctcctctaactttgccttcctactctttcctctctggaaggtcttacctgcacttctatgaccctcaccccgtcattcacttacacactctcttgctcaattttatgctctttcagaatacaagctagggtggtgatttctacccagtggatgtgcagtgaatgttgctgaaatggctaaaaataataataatctaaaatcacccaggattatggactgcatgtgttacgttgcccttgtctagatgtttctctctacttatcagtggtacctatgtcatgctgcagcacagtcttcttgctgttcatttctagagtgggaaaatacattttctttcccaactgattatcatcagattttttctaagttcttaagctatttttcttatcaatacaaaaacttcaaaactttttgaaaaagatagctcaataattaaacaacgttttcattttctgcttctgggatttttgtatatagcaaaatgggaactaaggagaagsgtagygaaagacatattacattttttaaaaaatcaagcaattctgcatgttaaaaagaagaaacgaaacccagcccaaagtgattcttcatttacaattcattgtttcacatcaaaatctctactgggctttagtcaaccttgtaacaattctagatattttctaagggtaccatttatggtcttgtttatctggagactcaactccttagattttaatgagttccttcaaagcataatgctgttccaaaaatcaaaagaactttggcccctcctgcttcagagaaaaaaatgtaaacactgcacatatgaaagaataaaactgtcacaattaaaatctacccgatcaaattaaaaatgaaaccttgaattattgcctggggtataactgctatgaggtagtttattccataaaccactgagagagaaaagtggtatgagttgagttttctccatttactaagtcaccacaataaaccattaagggctttttgaagagctattcccaggacccagccctactgcacttgtcactggatgttccacaccaatccaccactttgcacttgaccaagaaggatgctttagcatttaaaacccagcaaaagtaaatagcactggaaatcatgatggcattttgtagttaacaaacacactaaaagaaatcactttggctgtttatgggagcaaaagctcaaacaaggacaggcccagcttagaacctttggcgtggctctgttgtgacaggtggtttaataatttaaggggtctgggtgcacgggagggtcaagatgcattaaattcggcaaatatttctcaagtgcttgatacatgtcaggcagcatgttttggcaattcaggtacattagtgaacaaatacagtggaagggtccagggctcatggaacgatgttggaggataactcaagcaaagatgaaagaaatcagcagtctttgctccatggcaacaggttaaagggagtgggaaaggttcaggcataatttgcttctgcttccttccacctttgtgggacacaaacagtacacatgttctgtctttacagacagggccaagtgagcagactatagcagaacatttgctggctctggaagccatctgctggcctgaacatcaggggtgctatgattagtccagcagtattactgctgttaaaggtcttcattcctcatttccagattggctaaaacatattttcttgttctttccccacaaatggactccatatctgagataccacatcaaaatgcctcttcttttgtgtaaggaggcatcatgctgtagaaataattcatttagtcactgcatcacttgggcaaacaaacttggcttactcctcatgaaatggtagtgagatttaaacaagccaataatgtacgtaatgagtagcccaaccctggcacgtagacagtggtatttgtgatatatagaaaaggaaatggaaatcatatataattatgtggatatactgggaggggtggtttcttgcttgatgacctggatgaatgcttgactctttgacttggtgtgcaaagtggctttaagaaaatgcgattttcatcagggaatgaagagaacacaaagcaaagcttggcttctgactcggaatcctcatcacagcctctgacccttgctcccagtagtgctcatttgaaatttcccacgtgcactaagctggtccccagttcaggctgacaactcagtggggtgggaacacactggctttcccacgtctccactgcactccggacttttcatcagcttacaagggtggtgtcttctctttcttgcccctctcctaagaagaagtcctagtaagaatcgtttaatatcagcccttagaagaagctgacagttttctccattctgctctgaagttcttactaatcccaagagcaatgatgagttttctctggaattcccaatattagttacagaagtaacaactttcagaacaattcatgtatcaatgacttagtcagtgagaactttctggttaggataataccaatgactttgtgtagatattaatgattcttatccttgatttccagtgctcccacagagtatcattttatgttagccagtttttcaacaggtgttgatatcagaagtggagggtcatgatttaaaggtaagggaatataagcagtatggacactggacaaaatcgaaacaaaaatacattttttttctagtaatacagaattgcaatatttattcaacaaataattactgagcacccatcttttgccatatactttctaggtggtatgaatgtcagtgaacagaacaaacaaaaatctctgcctttataaggtttgtattctgttaggtttcaataagcataaaaataagtaaattatatagtgggttaaaaggtaataaatgctatggaataaaaagagcagagtaagggcctaggagtatatatgtgtgggatcaggtcacagcattatacacagtgggcagagtgggcttgatttccaagaaaacacccaaacacgctttgatagagcaggcaccttatccctttaatgtaataatagcagaaatcttcctttaatgcctaatatatgttaattctgttctaggtgccttaaaatgtcatttctaattcttataacagtcctgtaaattaggtcacattgtttcatcttttggctagggaagttaactgtggggcccaagattacatagcaaataagtggctgagcagggatttgaattttggtagctcattccaatgcacatggtctttctaccataccagtgtttcccaagatatggtttccaaaggtgtggttaggaaactaccagaactctgtggaggtcttcactagaaagtgcagattatttctgggccccatcccagtgctactcaatctgattctcgggagtgcatcctaggaatctgaatgtctaagtttccttgcaactctgctgcacactcaagtttgagaaccaccattataatctactgccttcgtattttgatatctgtggtcatgatatctgctattatgatctatttccagctcaaggatttccaaaccagtacctgaaaagcaaacaaccaatgcaaaagactgtcctagccagactcttaaattgtgtgtcaacctctgcatctaggttcctcttctgtattacaggacgaagccaggttcttttccgccctttcccattaactcagagagtggccacttgggagaggcagtctcagcatcaggaaatgaaggatgttagaacacccagaacaaattttgggtccctgccaggcctctgtgagcttctacatcccttccaccagttattttatggaatcactgcctccaggtctgttctgccttccaggacaagctcacagctacctttcctaacaagtcttcctttctaatgctaatagaagtgacacctccctttccgagctcttaaacccaaggactgtgaaactgcacaattactaactacttttaaccatcaggccctgactagcttcatccttctttgtttggaattataataattctgaaagcttctttaaaaagccaaacaaaacaaaacaacatagcgacatacaagattacatttttgtccacccatgcagatcagctttgctgacaaaccaccagccttggtatagccgactagtttctcaactgccaaatatgccaagataatctaaaatgtgatgagattaattttctcctgtgctttataaaaaggaaggaagggaagtcagtgctagggcatagcaccatgcagattttacaactagaaggggtcttggctatcattcattcaaatctagtatttgataactaaagaaatagaagaagatgaggtcatgtagccaatatataacagggacaggacgatagtaaattttctggttccagagtcagtttcttttcatagaccaagacttgagatatttgtctccctcttcctcccactccactgttatttttctgaatatatgattaccagaatccttctaaagaggtcaagaatgattacattaatggttaacttactccaagaaaggtatccttaatttctccatgcccaaatcttttcatacgtataaggagtaaggcttggtaatatggaaatcatatgtcacagaacaaccattgagtcattcattaattcaaccaatatttattgtgttcctaccatgtcccaggcacaggggtaatgcagtaaagaaagtactatagatagaaatggaccaaaaaaatcatcctgtcatgtagtttacatttctagggagtggcgaacataaacgagaaatttgtaagacccaatgttaacagtggtgagtgctaaggggaaaaagcagggaaaggaaatagggagtgatgatgtgtgtgtgtgtgtgatggagggtggaggtgcattttagacaaggtggccaggaaaggcctctatgagaagtaaagactataactggagaccaaaaatatgagagaatgccgacatcaatccctacagagaatggcaaacaaagatcagatttgggaaaagctggaaaaggtagaatactgatgtttttatactgttcttagtaattcaggtggcaggaaatggaaagaagagggatggcacaattaaaatggcagcagctatattttcaaagaagccaggaaaacttttgttggtatctgagttgaaaagaaatgctcgatgatatgtggtttcatataaaggagaactttgcttagataatagaattaagtttgatgagaagtattattttgttaaaaaaatccagagaacatgaagtaatgccaagactacttggcaagatgatatgtgacttaaacttgatgaaaatgttgaaaagttcagacatttgattcatccaaatatgtagttaattatgaggatttaggctgatgtgtaaattttatatagagtcaattattaattcaacattttttgagagcttagcatgtgcaacccagggacagtgcttcagagacacaaacaggaacaagatgccattctacctcagtgaacttttcatttgctcttcctcctggggatccaaccaggatacattttcaagcctcgcttgaagttaagtgtggcttgtgcataagttctggccaatgagatttgagtggacaagatggatgacctttctggggttgcccgtaaaactctaaaaaatgtcagagcctcaaaatacaaggagctgggattcctaaatcaccacctggaaggctgtccacttaacacctgattaaactttatgtcagagtgatatttatgtttgtgttaaagtactgacttttgaggcagcacgtgttacccaactaatataattactaattaacagttgcataaactgctacagtttgcacaatactttcacgtatcaaatgattctggtcaccaccctgagaattacatcatcattttgtttttcccatttctaaagctagaattgatgcataatgagtattgaattacttggtcacaatcacataggtaagacacagagggcaaatactctaaactgctgggtctcaaatttacaaaaagtaattagtataagacaagcatggacataaatctaatgcaaagcacttgataagtgtagacaaactactaaagaaatttaaaagaggtaactagaattctcggttgaaggaaggagccacaaaaggctctagtggaataggcaggctttatagcgtttgcaaattgacaagagaaatgggagaaaaaacatgaagaaggttcctgtaaattttgacatgcaatattagtggtgaacagaaatagaagagagttggcatttgttttaatgtttcaagggaagttgtagcaagcaatgcagtttgatgaaggaaaacaggaactggtaattcaatacaaatcaaaaaaatatttattgagtgcctgccagatggagggctttccaaaagtgtacagaggatatggagaggagataacaatggtgcagtccttgttttaaatgcatttatactctactaggggaaatggtcataaattactatacacaatgttgggcaagataaacatcagtaagaacagtaatggagttcaggggacagagaagtggcatgggaaggacaaaggaaggagaggtgaagcttcatgtaggaggtaaaatgtcaagattgaccttggaggaggtgaaaccactgaggatgcttatgaatacatgaattcatgagggacacaattccataaagaagggttttattaatgtcttgagcaaggacactgctttataattaagtgactccaaaatgtgaccatggtttagaggacaacaaaatgaaaattataatttggcatgtttgtttaaacatggagtcacaaactcaaaatgacatcatagttgtgcaaatttctactcctgctgaaactgcctgacttccaatgaattcagtgagcagcactgcaccccagagggtggtctactagaatttcatcctgcctccagaggaaaccaataggcagtttgctgtgatgtcctgccacagaagggccacctaccatgaacagggcttcataattttcaatcatcttttgcacaacagcgatgatggccgtgctctcctcagcccgggctgaactctgaactgagaattctttgtctgatgacttctgcttgtgcagcaggttgggtccaaatatggtggctaagtttagagatgtcattttattcccagtgacctataagagaacagaacacaaggactgttgttatgtttgcctttcaagatactgggtgattcaacaatcaatgaaaccttttactctccttttttttttttaatcctgcaaggatgccatcctctctgtcagaatccatggagggcatcattattttccttttgctttaatatcttggattgaagctcacagttcagtgatcatctcaatagcatattgaataaaaatttgcaactctaagttgtttattgtaaaatgggtactacataaaatttctatcctgtttgcacttaagaaatattgacacccatccatccatctatccatttctccatccatcccttcattcatcaacccataatctcaccactgatccatccactcagcacctatcataggctgggcatttttcatatattgtaattattttaaaatttttccaatgattacaacatagtccttattttaaaggtctctcattctagggaggaaataaacctatcacttacaggtaatgagtacaaagtataaagctctcaactccaaaggccccagggtcactaccacagaggcggaagcatttgcacaaactctcaaaagaagaatagagtttgctaggctgaaaagcaaaggatctgggctagggggtaattttacaatggagaaagcaccacacatgcaaagacagaaacatctaaaatacgtcatggagccccaggaagctcagtgtggtagggagttctgcaggaaaggcaggcaagggccaggtgagatgatcttcatgtgtcagaccaaggaattcaaactgtgatctaagggcaagaggattctgaacagagcagaatggaaatggaatctgcatttcaggaagagcaatctatggaacaggggatgggggatgcaaggaagtaggactacctgggacataccacaacagtctaggccacagcagctagcatctgaactaggaaggaagaagtagggatgaagagcagcttccaaagttacggagggggtgaagaggataatgcagagggtaaggatcttgtgttttaacaaatgaaaaaatggaaggacagttaagtgaggaacatgaagggctgaaaaggggttcctggagactccagcacccttaaggagcagctgatgaaggaggccaataatgggtgagaagttaccataaaagaaacctgtgtccaagaagaaatgacaggggagtttcaagtgagttatcaactgtggcagagggtcatcgagatgtgacccttccctccagaatggactctctgatggttctgatgtcccagctaagagtcatgtcagtggtgtggcaggaatgagccacagttgcagaagtggaaacagtgaatgtagacactttcttcaaaagatatcacagagaaggaggaagaagaaatgtaggaggagctaaaggggagtacggggtgaaggaagggaactattttttgcttgaagcataaaaaattattcacattcaatatattaataattagaaagcacaggtaagccaaaagaaaaaaaaatgcccataatttcaccactgccaagaatcagccattcctatgccttcctgtgcacatatatacatgtacacctgatattttcttctttaaaactgggatcacatccatatattattttgtaacttgcttactatctcttaacaacatgctacaataatctttccactacaaaaaaaaaaaaaatcctgtcttcaggcttcattggcccctagaatcccactgcacgaataaaccatgatgttttttaaccacagtcaactaataggcattgatgtcgtcttgaattttctgttattataagcaatggtacaaaaaatatccttgaaaagatattttgtgagctcgggtgagcactttttaggagtaaattcctacaagttgaattgttgtaataaggaatatgaacgttttcaaaggtttgggaattttttctacttgtctttctttcaggtgaacgggagagtctgagtaagtttctctaggctagggtttctctacctcgacactagtgacatgtaataccagatcattctttgctgtgggggctgtcctgtgcattacaggatgtggaacagcacccctggcctcagcccactagatgccaggagcacccctgccctcaacccacagttgtgacaaccagaattatctctagacatggtcgcakgtcccctgtggggtaaaattgctcctggttgagaaccactggtctatgtgaatttttatttctcttgtcaatatcagttgagagtcaggataagtatgggaactgcgtctgcttggtggggatcttttgcctgggaagatctacatagattttgagaaacacctgggtgcccagcatagaattcaggagtcccaatgaacagctgaaacaaagccctctgaaccccactctcatcctgtggcgtcatgagctggtggctgccctgccctgcaatcccagcttggtacacgagttgtattatttttagaaggcaaggctgttttcaggtgaatgattggcctccaagggatatcatttcatgtgataaacactgacaatttcaaagaaagtgccctttatgtaggatcgtccaatcatttttctttgttttatttcattggtaagttttttatttcattgacaagttttcatttaatttttcttttcctggaaattcatggttaaggtgaaaatcaaatacgtgtcattttcaaattcctccctttagaactcagaggtatttggagtgtttccccttacccctgtaaagtcatattagggttttctcattttttaaaaaaaacattaacaaatggaagattttgttttcttttaaaagaatgtttcatacgagaacaatctagagctctgtttccgctctttccttctcctgttgctattctgggaatggaatacaacccatctgtaaaactgcacacagattccagctgcagaccaagctgctggggtttgttaacacttttggggtttcttttgttttattgttttttaacagggaaagaagagttgctcccaggcaacatccaccttttctccatgtgtttcagcatatatttatatatatactatacggctgtgtctaggtaatacaacgtacactcgagccaggccattacttcattttttaattagctagcaattcaagaaaacttttatcttcactaaatgaacatcctagatcatttctaagcttcatatgaatagctcatatctgttaaaagtctaatatgtacaggtaccaggctaggggctttccactggccatttcaattctttctcactataagcttaagaaacagctgctgctgttgtccctattttatagacgagggaagtgatgtccaaagctcagagccaggagatggtatagaaagaagcgaagctggtggccccactctaggcagccctactctcttcatcccattgctacatctcttcctgtttcctcttgctgggcagacccagccatggcatggggaaacgggaaaacgagctttaaaacagggctgaatgagggtgaggggagacacaggtcttgctaagttccaaagccaaccaccatttcctagaggcatgtacctcctcagagattagtaatcatggccctacactggtgatttgtaacttctttttttgcctcatagaccctttgagaactcaatgccagctacggactctcaccaaacaagtgcatattcacaccacattttccaggcagtgccagggggttcttgaactctgaaaaaccactgctcaggaggtttcaattttgttcctgctatattctttcttgaagaaatgcaatgtttcttacacttgggaatttctcttttccctaaggagcaaagcaaatagcaaactaaacaaaatagaagaaaacaaaacaaacacaagatagcaaaacaccacaattcaataaaatactgctattttttcccaaaaaagcactgattggtcaacaatttttctcatgcccttcttttagacatctttaaggtctcaccagtgaatgatgcattgaattttaagcacatatcaaagagaaaatattatgttcattttgtagatgaggaagctaagaccaccccccatcccaactctgttttccttcctcttcctctctttcataaagacaagttatgcagcaaggtgctggcagaacctgtgtgagctttcaagcttcttgacaatctgcttcaggtttcatctatgttgcaatccccccaaacaacaccctaacaaatagataatacatactaaaaaaatagggaagagaagaagttgaaaaatattggtttttgaccatattttacaatttggtatttagttttactccagtctgcccattccatattctctacctgctcatgccaaatcaactaaaaaataataaataactcctctcttgatcctctccctctacccttgacttctaacagaaggggtttggctaactcccatcccaatgctgtgcttatgtggtccatgtactcaatccctacacaccctttgatgtgcatcttaaattcaacctcctccatgaagccattcctaacttttctggcccatgctcatcacttctccgaatgtctgcaatgactctgcagtgcattccctaattctatatttgccttgtgtcctcacctcctccacctcttagatgccattgtatcctgaggccagtcattagaaaatttctgagcaatagtcgttggtttacaggaacctagggtagatgctcaggacatgcatgattcaaatcccaaggccattctttctttctttccttccttccttccttccttccttccttccttccttccttccttccttccttcctttctttctttctttctttttctttctttctttctttctttctctttcttttctttctttctttctttctttctttctttctttctttctttctttctttctttctttctttcattcatttatttatttttgagatggagtctcgctctgtcacccaggctggagtgcagtggcgtgatctcggagcactgcaagctccgcctcccaggttcacaccattctcctgcctcagcctcctgagtagctgggactacaggcacccaccaccacgcccggctaattttttttgtatttttttagtagagacagggtttcaccatgttagccaggatggtctcgatctcctgacctcgtgatccgcccacctcggcctcccaaagtgctgggattacaggcgtgagccaccgcgcctggcccgccaaggccattcttacatggaaatgtttataataggaattgctgttgtccatattactattgatacaaaagcctcctaactcactctccctttgtctctagccaatctacaacgtggatcatatcacccattagttgaatccttccaaggattcacagcttaaaagaatcaaccacctgccctgcacagaggcattcagcaatttatgaacatggcccaatttcccattgtctccctcagtacttcactgctccgtagcctttactacagttcacaatggctgtgagagctgcctgctctcctgtcactgctaacgatttcacggaagcaatgctttccttatatttctcctgctgctttaatctttggctattagtctttcattttgatgcaatgttcaggtcaagagtgtctagaaaccctcgtaaaccctggcttccttttacaacttcactgtcaccaggataattccatattccttacagtaaactaggtctctcaaccactcttcaaggctggttgaagaattttcattcctcaagttcagatgaggagacccaggtataggaaggttaatagatttttctaacaacacatggtcagtgaattaaagagctatcaagcgctctcaaccaggggtgattttgaacccttctcctcaggggagacctggaaatgtttggagatatttttggttgtcacaacttggtgggagaggagatgtactgctactggcatctagtgggaagaggccggggatgctgctaaacatcctacaatgcacaggacggccccatgacaaagaattcctagctccaaatatcaattgtgcagaggctgagaaaccatgacctagaccccagtacattttttttttcttctaattcctattctgtacgtcttttctcttagactggctcaggttctatgcacagcttggactttgctagtaaggggaccaacccaacccattaaccagtataacgacattgtccttcttcaagatctttttctatcatccactgggatactgtcctaataactctgcaaatctccagtgactatggggtccatggcacctcccctagagttgtgaaatgcactaatatgccactcgtacaaccttaagtggaagctctctgtgggttgctaggtaagttacttagctcccctggccctaagttttcacttctgaaacatggagacagtgatatctcttttgcctgttaagaggatttgcatatatatatatatatatatatatatatatatttgcatatatttatatatttatatgtatttgcatgcatatatatatatatatatatatatatatatatatatatatatatatatatctcccctagcacaaagccagctcatggaaggagagacataaatggtagctaatattccagcatgctgtttcatttacacctgtccaagaatattttcttctttttggcataggcaatggagacttgttcagcaattgaatggaaagaatgtctgaaaatgattctaaaagggcaacaatgagttcgattggaacttttgctttcctcaatgccttcctaattacctgagacccaattttctccttctcacacagtacttaagaaatgtcagagaagtaactggagtacctttaaacacagagctctgctttcccccagcaattaggcagatcatgctacagcttctgttataactgtagttgatagaggttggcatccaaatgagtaataaaactacttaacaattatgagaattatagtatgcccatcaaagagctgtgtatgctgaaataaggtgtcagtgccacattatgaaacctgaagccatctggggcttcactaattataactgctatagagataaatggctaagtcaggagagttccattctcacacccgtaaggaggaggacgagaagaaatgcagaattgcctttctggattagagtgaaaaaaattatacataaccacgttctttgggaaagaaatttgacaaacacagaactgaagctgcagtgcagctgagctttgtttaacaagaatttacaaaaaagtttctgtggttaagtaagtttggaatgcctctggccccttcttattgatttacagtgcatgttagcttattaaggagtctaaaacctcctgaggaatccgaggtcagggagaggtataactgcatggtatcaaagagggaagggggtgtctcttgttaaggtgaagattaaatacgttgcccataagtaagcaacttaaaattcaagccagcatctcatttgtccaagggtgaaacaaaaaaaaaaatcttgaaatatatgagtgtaaccaaagagaaccagaacccaagatcttagatttggtgggcggggsggrrgcacactggggcctgagtggggatcagatccaacaagaacatttctaaagagtctgtgggactatgtacaacctgctttgagcagttgataccatgtgacatcaagacacaatggcaatggtcagcagatcagacccagtttcctccacacctggtttggaagcaggactgaccctcccttgcatcgagcaagtccctgttttggggggagagtttaagaaaggaaaggatcccttgaaagggagacactagacttcttgctcatagtgcagatgggagctccagggataaactggaagaataaagaggtgacatcatatttgggctccaagttatagaagcaggtaaaatcaattataaggataacaatctcctcccacccccatcattccacttttacatggttgcaagcacttctgtagttcactgtttttcttctttacaaacggaagttcagagtcttgagtaaagcctcaccatggaaaatgacagcctcatttggaagcatacttgaaacatataaggaggctcatggcccatgcacttttaggaactgtgcctycagagaaggccctgcattagtctcttcctacagagacagctaggttggagaaggggagacatcattacctccaggcaaaatggccattttggtggtatgcccttttaaaataggggagaggaagagtcacggcatctatggcagcaaaggcatcttacctcttgcccatctttgctgatgttgtcatcggcatgcctggccacgatggagaggaactgtagcaggcggtggagggtgtcgcagttgcagggaggtagaaggtatatgaggagctgcaaggtgcccagctgttcctccggctccaacactaagcaaggcaaaaagaggtactcaaataaaaggggagcccatactattcaggcacagaggaaaggcctcctctcaattgtcttaagaaagggattatcaaggcaattcccatttcatgccttcactcatttgcccattgctttagcaatttaccagcaagattctatgaaagatataaagccaaattagacctcgagaagtgtaatacctagaaaaataactgtaatccaggtaaaaaaaaaaaaaaggtaactcaatttcccttactttcttctccccccttccctggcattactcatcacctagtttaaggatttcagtcttccatttttggtaaatatttattaacaatggctgaaaattggtgaacattctgaaatttgagtttataatggatttaaggctcttttctgttgagcaattcacaagggacagatattttgttggcaataaccaagatacagcaaagccaatgtcttctctctccgttgtgatcctatttgaatggcagcattggaggaagaaatgtatggaggttgacccaggtttggcctatctctcctctacctcctcctttttttcttcttcatgggatctgtagctacagcccagaagcagctatgttgaaagccctggcactgggctatggcatcttgcttctcctggaatgttgctgccctcctttctcactctgggttctcgtggttccctccttcttcgtaccagaaacacaaactcatttttaggcacagactcaatgtgaactcttgttggtactctaagcactaactcatagtactttttactgttcttgggttatttgaaagcatctcaaattcttcttggctatttccatttgttttattgtaactttcttcttgctaattattcccagggtaaatctgagaaattccctcaaatagctcactctttagagattgataaataaggacaaaaagttatcaggaaacatatgcataaagttatgatgaatgagttggacatcttagtattccagggccactttcccacatatggctgtattacgcacagagagtgttgatgaaagctgtgtacagctccctggtgagaagggggtctggcatgtccctcaggaactctttcagcaaggctgccacatcatgaacactgtgctcctcctccagagagacatcaatcccacggtcaaattcctcacgtaactggaagaacaatggttcgagtggcagtcacataacaccatacctcaatgagcagtgcccagcaggagaagtgctgtgacacgtagcatctggaattaagactgcacagaccccaagaaggggaagcaaacaacatcctcaccttgatctgccgagttgacacagtccagctatgaatatgtgtgtgtgtgtgtgtatacatatatatgtatatatatgagtatacacatgtatatatgtatacatatatacaatatatgtattgtatatatatgtattgtatatgtatatacatatatatgtatatgtatacatatatatatatatatataagcattattaaataaaactatctgtggatttattgttaatgatgtatgcagaagggcttggtaatgacaaccaggttaggaggaacacctaagaggtagaagacaatttaggtcagctataaatgtgggagggaggaattaatctattacacagcatttctgtgtgtcaccaatcctgccatgtttggatgttgatattttactgagtcactctataagaaagcaaagagattttttttttctgcaaaaatgaaattaagagccctgataacacatttatgactaagacttaaaagatgacaataactaaataaaagctgtcttagatttgtcaaagtagtcttattaacaattaccagaaggattccctgccttaatcattatactaggtctattatcacttgcagcagcaagaaaacacagtagcaagggagtaataactccacaccctacttttatctctagcagctcaacttttcgtatgcattgttctctgctgtagaaataattatgtaacttcataaacctacactatgcaaaaaacttctctaagagttcatttgttttcaatctttcatccatccattcattcaacaaagattactacgcatttcctgtgtcagaccctgttacaggctcacaaaatacactagtgagtaaagaggcaaagtccctctagagaaacaatgtgataagcaggtaatcccacaaataattcactcttaacattgtggctagtgatctaaggaaaaagtgcagggtgctaaggggttatataacaaagtaaaatgatgagtgagttagggcatatttcatacttgaaatctacttctaagtaaacactaattatatttttattgggtaatccttaaatacaactccatgcaaaggtttcccctttaatggatcccgatataactgatgagtaatttctggcactcgctacctgtccacctgatgagaatgaatacccatcactgtcctgaactactcattgattccagacagcacgccatcagcgtgtgtcaggcagccaaaacaaagaagacttccactggcactcctccaacttgtgatcattcaaacacaccatgcttcttttctgagtatacgtacatgcagaaagaatggaacatgcaaagagtttggcctatgaagttaatggtgactggttaaactgtgtgatcttgaattatgtttcttaatctctataagccttgacagaagtgggtcaaaggggctacactcacagccggttggcagattcagtgagataatatttgtaaaaatattctgcaattctgcacagaaatgttactgtactatctttcttcctgcaagttctgttgtgaaacattaaatgttgatccatttaatgtttcttgtgtaactattaagaataaaaaccaaccaaccaatcagaaaacatatttctgttgaaagccttttttgtcttgacaaaaaagataaatgaggtatttatttcaattactttcaataatatgaacaaatatcatttcttcagcttcttccaactaaaatttattttcatttgaattcatttttgagttgctgagttccttatctccttccattgaaaacaacaggaagaaaataatgctttaattttccttcaccaacaaatgaactcttttctcaaaggatggtttgccttttatgaagccatcatgaacacaaatacctgcctcatcacaggaacctattgttgaaggtctaatatcaaacttcagttgcaggaatgttgcacagggctgaaggaaacaaaggagcacagtctctatgtgaaaagcaaactgggggtcaatggttctatggaaacttcataagaattatttatttttgataaagtaaagctataaacatagcatcttatgtgaagggaatgttaatggcatttttcatatcacattttagtaaaagcgggtgctacatacaactttatatcatttattgatcagtcactctgaatttcctgcttttgcaattttcaataagatgtttataaattagttttgtttggctgcacgtggcacagatacatccagacattttgctttcaagtgtttgatcctaactgtaacaacatttctgagttgttgccttttacctcctggaattcaattatattataatagcttggagggtaaaaaaaaaaaaaaagataatcaaaatggaatttgcataaacttgaactttgcaaaaggtaattcaattgaaagtcatgtgaaacaaaatataatctttacttttcacttacttgtctcactctcttttttgagcttccaactcggaatatccccactgtctggaggcctgcaaataagcaaacaaaatsaacagtcttgtttcatggcttgagaccctggaggaaatcaaaatacagagcagaatgccagcacagtgccgtaacatgtagagcaatagtaacttgacagcatacagtaatgcttctttcatctcacactatttctattatccagatacttaaaggtcagccctttaagcaccagaattttacgttaaatgtttctgatcaaatatttttcttgtgatattttatatttctaatcttctccttatcagagaaaatgagcttttgtccattatccagaattattacctaaacacacattttatagggattctaactctttattaatttctaaaagatatttcttgttcgtctgatcataattaaagtgtgcttcttaaagaaaatctagaaaatgcggaaaaatgtaaaaataatatacttttagaaatacctgatgcagaaataatcactcttcattttcttttcttttctttctttcttttttttccttttttcttttttttttttttttttgagatagattctcactttgttgtccaggctggagtacagtgacgtgattacggctcactgcagtcttgaccttctgggctgcagtgattctcccaccttagcgtccagggtagctggtactgccagcacatgcctccatgcctgactaatttttgtattttctggagagacagggttttgccatgttcccaggctcaagcgatccacctgcctcaacctccaaaattgctgagattacaggtgtgagccactgtgcctagctaatctttcattttttaaaatccagccttttctacatgaatgtaggtatttttacatagttgagatcacactgcatatatataatatctattgacagagagaatgttactgccttccctcactatcgtgtcgcatgaattttcactcatgctagtaacaattccttataaatgtcacttaaaagggacaaaagactacaaattgggtgtagtgtatactgctcgggtgatgggtgcaccaaaatctcacaaaccaccactaaagaacttactcatgtaaccaaataccacctgttcccccaaaatctatggagatataaaaaagatgcaaaatattctattgtatgaatgggccataatttactccatattcccctctgaatggtgcacaggtccccaaaatatacatgcttatttttctactataaatgaccctattgtgaacaattctgtgcacacgtttttgttcacatttctgattgcttttcctaggatcatgtcctagatgtgaaaatatagtgtcagtgctgaggttgagaaactcatttctaaaaaattaggtctcttaaaaacacaagtaatttcactatcacatattagaaatttcaacaatagttccttaatagcattaaatttccagtcaacatccacataaaggtcacacactgtcatatggtcgatgtgccttttagtctcttaatctgtgtttcctccctctgtctcctttttccttataattgttttggtgaagaaatctcagtgatttcctactgtagatcttcatattgtttggatttggacactccatagtgtcatttgtatgttcttctccctcttttattttctgtaaagagatagctagagccagacattactctgattgcggtgtgattttatagggcaagaatacttcacaaaaagtattgtgtacttcctttgggagcatgaaacgtctgaatggctctcctttttctatgccagtcattgatcattgccattgatgagcatcatgtatattaattctttcattggtggctcattttctcttcatttgagacaatcagttatgagagtgatgggatattggagctgctaaccgccatttgaagccacatgaagagaactgtctgagaataaagccagcaaacagaggacactcatgacatcgtttgaatcctggatccagccgtgcctaaatctagatcacgctcccagtatataaagattgttgttgttatttgggggaggtcactttgcttaatctagttttttctgagttcctttctcttgccactgaaaaatttatgactagtacaatatataattaaatcagaaagaattgtatttttttaaatatagaattggggtcttgctatattgccctggctggtctcaaactcccaggctcaagggatcttcttgccttggcctcccaaagtgttgggatgacaggcgtgagccacggtgcccagccttaaatctttataacattatttctttacatccagaaacaaagtaaacatctcaatttgttttagttgtgttttctatctcttggtagaaagagaatagtcccacctgtgtagaaaatgtccttatgtgatatcttgcttctgtagaaattttaattattcagaaaccatgtgaaaataaaaaaataaatgcagccaaaattaaaattactgtgacctactattgaagttttctatttcgtacatagaagattcattcagttcactcagagtctatttctctctatataataatatatgccaggtactattctaagtactgtatgcacattaattaattgaatcattgcacaacttttgaggtgggtacttacgttcattttgcagatgaagaaatataatcctgtattttattctaaatagtgtgattatccggttttcaagcttccaaagtgatagaagcaataaattaggcaatttcattattgtgcaaacaccatagagtgtacatacaccaccctagatggtatagcctactatacacctaggccatatggtagagcctagtgctcctacattacaaacctgtacagcatgcgactgtgctgaatactgtaggtaactgtaacaaaatcttaagtatttgtgtatctaaatatagtaaaggtacagtaaaaatacagtattataaccttatgcaatcaccattgcctatgcagtcagtcaatgaggggaatgtcattatgtggtgcatgactgtgtgtgtgtgtgtgtgtgtgtgtgtgtgtgtgtgtatgtgtgtgtatagagaaagagatgtatattcaagatacataggtgatacacaggcaagtgaaagataaggtgaaaaaaattaaaagaacctacacttaaaattttgtataaacaaataagattttgctacattagttttattaggtcatccatatgttatcctatgatttccattgtaatgaattaagaaatttaaatatatccttaatgattttaaaataaagttccatttttattagaaggaaatagatgagaatgttaacagtagttatatctatatggtagcctcagaattttctttgctttcacgtttacttttttattacaatgagcatattatttttacagttaaaaaaagtaattaagcttttcccatgtatataaaacacgtgctaacaaacactatagcatacaaacttagtttatgaaaatggcagttaataagccagaagtctaaatttcagaaacatttttgaagaactgtatatcattcttaagtcaacttagtaactagaattgagttgcaaagggtggcttggagaaattttaagtggacagcttccacaaaaatgcaaatagcaatatgtaaacctgttgtcaaaaatgatgtattttctattcacttaagcaatgattccccaattttttttttaagttggactcttactttttaaaggaaactttgtgagtaacctcctaggctacttttatgtataaacaataaaagtggctctggtctgtttgaaagaggtcctggtgacaaacccagcccaacagatctgatcattccctaaactgcttggcctccaaggtaacttctgaggactactgggagctaagcagtctgaatatcatcaagttgattcaccctcttctccaatcttgtttagccccacaatctcttaagcaaacactcacatctgtacactttcacacagtaaatttcagttcagagcttgatcatttgatcaagcagaattgacattgggtacttcagtgaatgatgcttgaataaatgaaagtccttagtactttagacagacaagtctacttaccatgtttttctaggtgctgacagcagctgtccaccagcctagggacctgtctgtaaataggattcagactgagtttcttatctctggctttttcctttttactttgagcctcagcaggcaaggaaagttgtaaagcttctagtagtcgagactgattgtcatcaagatcggtgatagaatccactgacatggcaccctgcaagtgacacagagccgtgaacataaagtacagatagccaaaaaacccagctgcccccagatgctaaccaatacatacttttgctcatgactctttatcacacttgaaatactactgcttgatttctttaattgttctgtttgtaaattaaaagaaaaaagatgccttttgaaaaagttagaaaacctctacaagatttcctcaagctaatggcagttacaatttcaacaatagacaacattttccaaatggaagaacaagcgatgggaaacatataattaaagtattttggcccaaccacttcatttcttgaaacaagaaaaaaattacatactcaatcaatgaggtagtcagagaagtcttgtaaataaaaaactcaactatggctctaggaagtatatttttaaaatagaatgattccacaaaacagccttagcttagttttcccgagaaacaacacaaagtgctttattagagaagtggtcctgggaaacacctgtaggggaggggggaaatgagacaaggaaggaaaggcagctgatgaagggagcattatcaagcctattatcattgtgggcaactggagctcaatctttctggggagctctaggagacagctgtagatcatgcaccttagagctatccctatcaagtgagagagctggggtatttatacaccaggcctcaggaatcactgcttaagggtagcctctggtgggggcagagagataatattatctcctaagtacttacagcctgccatttggataggctgggtgcctctggcatcagagaaagccctcagcaaataaataaggtgttggcagatggaagatgagctggcatgctaggaatggtaaagggtcagggaaagggagcagggcaccagtcgcatttgccgcacccatacttgatgaagcactgagaaagcagttggctagccaggcctggacagacgagagggcatttgggaaaaccattgcctgagtcctacattcccagaaagctaaaatttagagttttagtgttattgttgtacgacaatacacagtctgagacacaatgacagaattagaagaacaattccatcatgcaacttcaggaattccataattttgtaatttcttcatttttaaacatagtcaatactgcaaaaacagcaatggatcaggtccccctctaccttggacaagccctaaatgttaggggctgattgaaaaatgttggttttaagtgggaagtgtctggggttttaactagggcagtcttcaacagctggaggtggcaaaaatttcaggtctccacgtgacagaggaaaaagggagagagggtcaggcgtggcggctcacgcctgtgatcccagcactttggatcacttgaattcgaaggttcaagaccagtctgggcaacacaatgagaccacatctctactaaaaataataataataacagctaggcgtggtggtgcgcatctgtagtcccagctaccggggaggttgaggcaggaggatcacttgagcccgggagattgaagctgcagtgagcagtgatcatgccactgcactccagcctgggcaacagagcaagaccctgagtcaaaaaataaaagataaaaataaaatgcagatttgttttacaaaagggagagaagatcttccagtgacctggaagctttagagatgcttatcaactgactcagccaatcaccaaccagtttgcatgaacaattcaaataatagcacagtacctagaacatagtacttaacaattggtaccatatagttagagtatttgaaagaggatatatagaggattctatggttctgtttgagaaaaagaaatgctccattgataaagaaaaagctcattgtttatgaagacccaccgccaattcatttggccaggcatgttctcagactggtgatgaagaaagtattaatagctaaaacaccaggccctgccctcgagcctcacagtctagtgggcaagtatggcaagactgacagattacaagagaccagaattaatggtgatattgccgaatgtttaggagagcatggagcaaagatgtgacaaaggagggacacccaacagcttcaagaggagtcaggacaaggtctgaggctatgcaaggtgccacgtgcccagtgcacattcttcattaatggcattgttgacagatacctgaacaccaactacatatccagttttcacatgaacaaaaacgcaaagaataactgtacatcttcagttttcctagcactggtgtcagagcaaatactggccacctcaccctcctcctagcccgaggagccggttccggggtgtttggggacgttgactcattcggtgtttctgaggttgagctgagagatgagttactgcttgagagttctttgttttgtcttttatttccaaatgggaggagggaagccacaaagtcagatgcatctttctgctcgtccctctgcaagtcctgcttgagtttataggccctgtcattcgcaatgacttgggataagggcattccaaatgcctgtgggatgaattctggaatcaaaaaacagacattcactttcagagactgactggtccagtgaacactctcatttatgtttcagacctaagtaagaacagacatattcaaaggaatgttttctgaagaattgactcatcaatcaaaaaggtgacatttgtsttaatcagaatggcccaagtttccatttcaataaagaaaactagtatttataaacacacatcttagacatttaggtctctagtttttctccatgtttcaagtctatccattcattcaacaggcatttattgaatgcctactacatgccacaacaagctaggcaatgggaggcgcaaagcttataaaaggtacagtcctttctcctgaggtgttcagagtgtgggttggggtgaaggagtggataatcagaaatgcaaatcatgataacagagtgagtatcaggtgttagagagatgcatgaaactaaggctgaaatttagttaactgaatacactttgaggttcccagtaagagttagcatgtgaaatgataacctgacaggcagaggagcagcttgggaactggttgggaagaagtccactctgttttcgttgtgttcctcatccctacattctatttccagccagctatgttggggctgtcactctcgtgatctacactcaagccattctactggccacatgcagagtggactcagccactaaatatctggtgggaggcccaggaaacaatttgttaaatcctttagtaaggagaatttggggaaaggggcatagtgcagaaatcaatggctttatttggaracatacatagagttcctttctgaatttctgtcgtaaatctgtttgtatacatgtaccttggatccttagggccaggagttttattggcaatattttagattcatgctgaaaggcactaaataatgtaatcaaatgtattattctttttagactccaaattaggtctcctagcagcagtaagttggaatctaacctctccattgtttttataagccctatgaatgaaactaaaatgatcaagggaaaataattctaaggttggttgttctttgaaagaaaaagctaacattaaatcaggtagaaagagactttaaaaggttttcctccttgatccatggcaatatttcaaacatcactgggctaatgaccaagtctacattaaaagcagaaatgctacttgaaaagcctgcacctctggttctatcaaagcatgcaatttgttttgaagtaaaaaagtcaaaactttagtatttcgggattttcagaggatgcttgccattctttagcaacaagctaggtgatatatggtaataaaaaataattaggtacttctcctttgagtgatcaatttagacagtgtagtgaggtgtaattctcactattgataataggctgtgtctactactagcaaaattagaaaccaaaggggatagtaccagacctcctgttatgtaccctgaggagatatatatatatatatatatacatatatctatatagatatatctctatatatacacatacatacacacacacacatacatataatcttgtctgtagaaatgatcaaatattacttttaaaaggttggaagagtctggaaacatgtggatggtaaggctgacagctacatgaaataacagaaacagaggggataataagagtgaaaagaacattgataaatgtagcaagtgacatgtctgctcaggtgggcatatgcatggcagggatttactataagatagggactactgagccctttcccagtcatttttttccatctaaggaaaaccaaccagactcgtttagagacttcttatacctctggggcagatcttccccaccagcaaataattctgcctcctgtttcaggagaagagcaaccagcaggtgcaaaggctccaactcttcacacctgctgtacctgtgccctccaccaccctcctttgcatgagatgtaggtgtgacttggcatcctgccagcctttctgcctctccctggttcccatgctttcccacctgccattcaactatggataactttaaaccatggataatggtgtactgcactcaagagctcaaaaaaattatcctaatactcttaggtataaatagcgttcagcaattttctgtaaagggccagatagtaaatattttaggctttgtggatacggctggggcttagaatggctaggatgcaaaatgataaggtgctcgcattcagcgtggggcaagtgcagagtcagcatgcagacttggcatttctttcaattctgtagcctaggggctcaatttgtctcactccagcctccgcactgttggcaggttgcagtctttgtagcagctactcgacctgccagtttagcaggaaagcagccacagacagtaagtaaatgaataggcatggctgtgttctagtaaagctttatttacaaagacggctggtgggccacccctgctataaattacatcttcttgygcctgtatcttcaacctctttttttctactagatattttgtactaaatttattcaagcagctatttcttaaaaaaataaacaaccttcgacccactcttttcttttctccatggtttaccccctctccttttgccacagttaaaattgtctaaagtgttccctttactttctagcttataactttctcacctaccactctttcctcacttcatcccgtctagctggtacctccattagattctaaagcagctccctctaaatcattgctgtcttcagggtcattaaattcagtgtttttgacagctctgtttcatttgcccttctgtcagcctttaaccctgatcgccatttcctgaaatgctccctgtcctttgcatcctggatatactaactgggtttttctctacctctctggctacattcttgcccctttttctggcttatcatcttctacctgggttttcaatgtggaaggtcctcagagctcaatcttaaccatcctcatcactctggtctctctctgtaagtgacagcacgatgcccgtaacttaaacttccatccatagatatttcacacctcattgctacctctagctcagaccccttccttgagcaccaaccacttcttccaccttcatatctggatgtcccaaaggcatttcttattcttcatcttcccttatcaggtcttactcagatttccaaaagtttgcctgttcttcatgtgggagaaccagaaatctgagagtcatccttgatacttcattccttcttacatctcattttcactccgtcatcaaatctttatcatgtcactttcacattatctcttttttccatttacttctctccacttccacgatcactcccaccctagcctaaggtaccattatctttctcctgaacttccaaatcagaagtcatgctgtggcccagtactgtgtgagctggccccttcctaaccttctcagaaaccacacactccctggttctttcttctcttcttatcctagaagtactagcactcaatgacaacattcaatatatgttctttgagaatttctacatagtgataactgataacttgattattctgctatttaatgtggagcaaaattaaaagttgtatgagctatttgtatatagtgttacttcacagctcacatacagttacatacctagacagtgaggaaaasaaaacatgatacaatatgctttcaccaaaaagaacagtgccagaattgaactctttccagattgtatgtagayacatatatggcataatctgaaaatgtcctggcaggggttgtggggggtacaatctcccagagttacatcatagtaaaacctattccccatgtgctcagtttaggaagcacattaataaaacaaagtagctatttttaaaattacttaattttaaaattacttttgacacagaaattttctgaagttctgaaagttttaaaaacacttttggttgccaagaaatataactaagagaaattaaggacttggaattattctgtatgaaaatatgttttctgatcagtgtcaatcttgaattagttcccatatgtaaatcaaaagtcacatgggcactgcctaagtggcatgaggaacataggagtgtcacaagatctgctgtatatcaaggcaattaaataacatacaggatatgattcattctgatgaaatcaattaatatggtagcatatcaaccatttatgaatcactattgggagagcaattcgattctaaaaggctgcttctatttatttttagatgacctaactcaagagatcatttagagtttcctgttttccttcttttactcttggattcaaatgatcgtttttcacatgtgcagctgttacaaatccaaatgctaatacgcaactggaaggaaataatgtgaatagattacatctgtgccagaccggcaccccgtcctcctcacaccctggttcccaggatatccatgtaatgactctcagtgttgacatggacagggctttatgttctgaaaagatgccatgtaattaaccttcacttaagcctaggttagtttgtttttaaacattaaagctacttaaaatttttttgttttgttttgccatgaagcctgatatttctccccttagttgggtgggtgatatgtcttttctttggaaccaccaggatctgccttccttttcccacttagctaccttcgaggcactatagaacatttcagagttttcactgagcctatgtaaatatgatttagtttaaaaaatctataatggcccagtatgtattgttcgattacttccctagcccttccttccatgttaattcaaattcttgcttcctgctgctttgtatatataatacatgcaagcwaacatacatctccttctgttgagggaacatctcatcattctgttgagggaacctcctgcaaaaatgctcattctgcttagtctagccaaatggacactttctgaaaaatcacctaaagtccacattagatgtatttgaatcccaatatcaatatcatcatcctagaataaaccaagtttaaaagagaatacattactaataccaacctgagtgatccctttaatatgctctatacatatggaaaattgctctaatcyggagacataaaagtgctctactgcaggaatagaatgagcaaaaactctagtttaaaagagcaatgctggctattaatatttaggtcattacaaaaataagggcacaaacatatcaacaattaaatataacacaatttatcagactataatagctagctggacaacccttagccctcattattccagcagcagattctgctgtgacagaatgtggcctggtgagtatcctagttaatatggatcaaaattcttakctagaagttgcactttagacgctcttaaaaacacccatgcctgaggtatccctgaagaacacgaactcagactccctggggtgtgggtcttggacttcttaaaggttccacaagtgattctattgtgtagtcaggggtgcggatcactgacactttcaccttcttttttccaatttgagataaacatttgaaatgtctgaagatatttgggttgagggtggtgtcactggcatctaatgagtagaggccagggatgctgctaaacatctcacaatacacaggacagcccctaccccagataattatccagtctaaaatgacaacagtagcaaggttgagtaacctcactccaaaggaagtaaaacaatggttttccattctttagaattcttcacctttttttagtctaaagaaccaaatgtcatgactgttcaagatataggtgtagagactgagatcaatggtatggaatagctcttgtccaatactgatcccaatgcatgttttaatacccttggtttcatcgccttccattacttttaaagcagaaattctatcattatataaaaggactccaagatgagatgtgtatggctgttctcattcaagactcgttgactgtgtcacataaagtgaaaataaatgcatacaaccataccattcagcaaccacttcataacagactataaaaataagcagcaaaaagtgcggtggctcatgcttgtaatcccagcactttgggaggctgaggcgggaggagcacgaggtcaagagttcaagaccagcctggccaacatggtgaaagcccgtctctactaagaatacaaaaattagctgagcatggtggtgcgtgcctgtaatcccagctacttgggaggctgaggcaagagaattgcttgaacctgggaggcagaggttgcagtgagccgagattgcaccactgcactccagcctgggcgacagggcaagaccctgtcttgaaaaaaaaaaaaggcacaaaaaattggactgcgtcaatggggctcaggtgtccattatgtgagcttgaatatcagttttaaatgaccataaatacctcagagagtggctaaagttttagtttcctaaatatatgcacaaggggacacaaaacagtaagatgagagtaaacaattcccaaaacatatgaagcaaaagatgagtatactgtgatctaacataaaaatgctgagaattcacttacaagtgggagctaaacatgttcatatggacacaaagaagggaacaagacacactggagcctacttgagggtggagggtgggaggaaagtgagaattgaaaaaccacttattgggtactatggtgcttacctgggtgatgaaataatctgtacaacaaactcttgcaacacacaatttacctatataagaaacatgcacatgtacccttgaacctaaaacaagagttaaaaaaaaatactaggccgggcgcgatggatcatgcctgtaatcccagcactttgggaggctgaggcgggtggaacacaaggtcaggagattgagaccatcctggctaacgtggtgaaaccctgtctctactaaaaatacaaaaaaaaaaaaaaaaaaaaaaaaaaaagccggttgtggtggtgggcgcctgtagtcccagctactcgggaggctgaggcaggagaatggcatgaacctggaaggtggacgttgcagtgagccaagatcgtgccactgcactccagcctgggtgacagagcgagactctgtctcaaaaaacaaaacaaaacaaaacaaaacaaaacaaaacaaaacaaaaaaactaatagccactgactattccctaaagttcctggatctttaaaaaggaaaatacttgttaactcaagtgaatatctaatctgggaattcttaatttagggggtggtagggtgggcattgggtgagtttcaggcctttgatagagcatcatcattgtcaatgattcttaaagggctctgtgacccccaaaatattaagggcatttgctttaacctatcttggctgaggcaatgtaacaaagtaaaatgtaagcattcaggttagttgcaaataaatatttttcaactgggtgaaaaaaaaaatgctgagaatggcctatcttcagtaacccatgaggatgagactgtttctttccagtagtggtggtaggtgaattcaaactctcattaaactaaccctgcctgtctggatttgccagacagctggttagcattagagatgctctccatagcttctcaacccaggtcctctttatgtatagctgattggtcaaaataataattggaaccacaaacttggccgaggtcacactctcctcaaaccagctgaattcatcagttcagtacagggctgctcaaacacagaagagtagaccaaaacagcccttaatgacattccactgtagaaatccagttttcataacagagttgaaccacgtatatctatgcaattcaataaccccaccaaatttaaccattatgctccatggaagatgcatttacattgggtactttaccctttacctttgtctttgtttttctcctttcctagtgaatccagtttctttcttaaagatttctttctcttttgtccatctgtaaatattaaaaggagaagttataaagataaacatataagtgatattttacagtatcgataattacatttgagcaaaagcatggcttttctctyacttcacttataatttgacattttaagcagagtaacagctctgagaatacatgaaaatcctgacttggataccacatattaccagaattttggtgtatattcttgaatttcctttcagtcatggaatgataggaaacttacctcatttggaagtaatttagctttgacatttagataggtttaattttactattatctaagtctcttcctcttctctgtggttacataacttaatgttcatcttgaacctaatctccatgagaagagaatcaacagcatgtatagctttgacatttacgagctaggagagtataactggataagaaaatggatttggaggtccatagaacttaggtctaactattgctgcacaatttactatgtgactttggacaagtctttgtgtcctcatttataaaatgggaatatcacaaggttgttgtgagaattaaatgaaacaacacatataaagctcttcatagggagtctaacacagttcaggctactttctttgtggggagttccatggtatagctatactgcaatttagttaaccattcctccattgatgaacattttggttgtttcttactgtttactataataagtcagaaatacattcttttacagtctagtatttgcaacaaatgtacttaatgtgtctgcttaactcaccaaataataaagataccacttatatcagtgggcagctgcaatcaaattcttgggctgtcatcataaaatattggcattcatcattgccagaatgcgttttgaggttatgcagctgtcaacttagcatgtgggaggtgcaaattcagaatccacactgtgatcaaataggggacatgcagaccatgccacaaggaaacatatggtgaaaaaaatgattaagaattgtttgtacaggacacactaaaaatgtaaagaaagagattcagcccaatacatttaaaagcaagactataatatcaggataaaacagagtaagcattatgaaacagaaatgagcattcctggtatcctcacagagttacagatgtcccccactcctcatttttggaaggaaaaagaacatcacaatataatcaacaggcacattcaatccttccttcttttcaaagatttcaaaaatgactctcctgccaccaaaagaaaatagttcataagaatcttcactcttgtagtcacgcaatttgtattggggaaattatgtaaatcagttttaatgtaatgtaattgatggcaacagccgtcaatctctcccattatgtatgtgttcatagatatgaacaacatctaaaagatgatctactagggcctgtcatgacttattacacagaccataaacatgctaactgtacaagattctaatctgttctccaattaggccttacaggtcttttactctgtaacactttgttcatagctagttcatatctcaaatgtatttggcagtaacaaaaattctttcatttcaatagttgacccagcagaataactaaaccatctattaaagcttaaaagatttgatttttcataaccaatgggcagatcctaaaattcaaacaagttgccaaaagtcagaatacataccagatagaggacattatttttaaaagataaaatgattcttaaatacttaaaacttatgtattctatgtagatgtgtataaatacaaatgttctgtctaagtaataatcgtaagtccaactccaacatatctaatagccaagttaagccaagttaagacgtagactattgctagtacctgagaaactacctgtatgcttccctcctcctagccccagataattactagtctgacttttgcaatgatcaattatcagattttattcatagttttaccatctgttcatgcatttgtaaagaatatgattttgtttttcctgttttgggatgcatacagatggaatcacattatggatactgtttcttgccttgtttattttgttcaccaacacttcatgagattcatcctgttgaagcaggtagctgtagatcattccttttgattgctatatagtaggggtttttggtatgaatataccacagttcatttcctcattgaactgttgatggtatttgagttgtttctagcttggggttattaggaacaatgtttttgaaagattttgctcatgtcttcttatgagcgtgtatgtacacaagtctccctgagacggtggttcttaaaatgtagttctgggaccagcagcatcagtatcgcctgggaacctgctagaggtacaaactctctatggtcccactccagatatgctaaatctggaactctggggtgtcacccagcaatgtgtgtttgaacacacccttcaggggattatggtgcacattaaagtctggttcacattaaagtctggaaccaccactccagggtgtatatgtaaaagttgcattgctggatctgtgtatatgcaatctcagactttatttggtaaaatcaagcttttcaaaatagttttgctcatttgtattcccacaaatatgagagtttacataatctcacaaggataatatatactttaaactccaaaactccagacaacatcttgaagtctccttacaggcaaagtatgatctttgagaatgctggcctattaaaaaacacttaattacttacaacaaaattttttcacttaattagatagcggtgaatgttacgaataggtaactatacaaaatgatggatgacgtgcaataatgtgaaatgaagcattgctttagcacaccattttctcttttaaaatcctcagcaaaatgaccagagatgcacaatgcaactgcttattcctcttctcctttgtgattaatctgtggtttgtcttggagtcccccatttttgaagaataaaatgtctcatcttttgttctcataaagcatagaaaacttgctcaagaggcttatgtgcttgcaaccatacagaacagtttatgttccaccagctccttggatggcaataagtgtggttaaatgccattctgtcttttaaagaaatgcaagctccacaactaccaatactgcacagaagtgttttcatggtgcatatggtgatgagtgcatgcttgctaactgctcccagtgtgtgcactgtcttacagacaacagtgacctgcaggaacaactggggtaacatgtcctgatagaatacatcttggaataagcacatagggattggcctccctttgccctcttttgtggaagtcctcactaatgtgtcaagaggaaaccatgtcctacatgagagacctcacagacacctgtgacacaatagcagatggcaaggcagcaagctttccacatcctagtgaccccaaagcaaaggacccaactgtgtgggaggtggttaatctgggcatcctcttgggaaagaccaataccaaacagtgtcttcaggacggtcgaaaacaagaaaacatgagattgctccctgagacatgatttttatggattcatttgctgttagggatggtattccattttaaggcttctttctctagttagactagctctctgagggtgaaaccaggcctcctaggcatttgtctccttccaagtgaatagcccagcatggggcatgccctgaggacttgtcagcactgtccaaagccaggaagtcagatggaactcttgggttgggtctgagcaatgaagtgcatacctcctaattttaaagtgatcagattcagagaatgaggcttataaaacagtattttccatattacaattaattctagagataataatagaaatattgtccaaggaaagatttgtttaggtgacagaaggaagagtaagggttacctttgaggaataaatattacctgaaagagggtatgagggactcttccggggtgctgagcatgttctacatcttgatctggttggtagtaacatgccattcacatattaaaaacctatcgagctgtatttgtgcacattcatatttatgtacattactatatatgttattcctcaatgaaagtaataacaaaagacctcatcatttttgcagaaacgcactaatatgagagttagttacattcactgaatggggctgaaaactcagcaacaaagtccttcagaagaaagttctgaagtgtttaacttttctaaatatctgaatgccaatgatctcatctgaccaccacaacttccctgtgatacagcacacagtagtaataaatagtgtttattgagtaagtactataagctaagtgcttagtatccaaaatcctattacatcctcacagcaattctatgaagccaatattattattctttccattttacagataaggagactgagattaggacagagtaagtaacttgtacatgggcaggagctgtgagatgataaattcagaacttgctcacaggactatccaatgtcaaagcaggtcctctgtattactccattcttattctgccataagaacatacccggactcggtgatttataaaagaaagaagttcaattgactcacagttccacatggctggggaggcctcaggaaacttacaatcatggcagaaggggaagcaaacactaccttcttcacatggcatcagcgaggagaagtgcagagtgaagtgggggaaaagccccttataagaccaacagatcttgtgagaactcactatcacgagaataccagcttggaggtaactgcccccataattcaattaattcccactgggtccctcccaccacacatggggattatgggaactacaatacaagatgagagtgggtggggaatataacccaaccatatcaggtggtttcaacttgcatgcttatttttatgaccctccactactgtaccactgtgtgcaaactgagcatctggatctgtgtgtgtgtgtgtgtgtgtgtgtgtgtgtgtgtgtgtgtgtgtgtgtgtgtgtgtgtagcctggtccacaggaaatactcagmaagtattggctggtattcttagctattatgggtaaagttgcttggaggtcagttagcagagaagttgactgagtttctggtcacctggcaggagttggcagtctttccggagttgtagcagcatttaacacctgagaatttctgttcacttgaaacttcttcatttgaaggagctttagcacacaaatcagagaccttctgcctaagcatgtccagccatctttaaaaaggcttcagaggtggctcattgaaggctctcaaaatctataaccggtgatgaggtactgttcccataaccctaaatctatccataggaccctggtgtgataaattagattcctggatgcatttcctctcatctacagtccctgtcagaggatggatagttacctttacaacactaaagaatacaggtgtttaaacaaatatgatatttgaaagcttataagaattgggtgggcatggtggttcacacctgtaatcccagcactttgggaggcccaggcgggcaggttatttgaggtcaggagttcgagactagcctggccaacctggtgaaatcccatctctatgaaaaatacaaaaatttgctgggtgtgattgtgggcgcctttaatcccagctactcaggagactgaggcaggagaatcacaggaagcagaggttgcagtgagccaagattgttccactgcactccagcctgggtgacagagcaagactccgtctcaaaaaaaaaaaaaaaaaaaaaaaaaaaaaagaactgactgagtaaatgtgtgaacatattataatatgtaaactttctcaatatagagtaaaagtgggaggtcagactctggaaacagacagccttgttccaaatctactccctgacccaaaccaagatcaaccctgctatctcactgtgcctccattaccctctctgtgaaatggaggataataactgtacctacctagtaggcttgtgatgaagatttaatgaattcattcataaagcacttggaacaggtcttgtcatgtggctagcaatcaatatatttttactcaataaatagaatgcaaaactttgggctcctgttgatttcctcgctctggatacttcccccgggatataccaaattgctcttctaggtgtaaacatttccagaaacatttctgataacttttctaaattaggaatttccacatcaatggctttcagaggtcatccacataaccctggctttacacaaggatattgcaaggatttcacagggttgaattgtttgaaagaaatcaatttccagagtgccattttyctaacaaactcaaactgctcttttcaggggaactcttactgtgattcagtcacgccacaataatcaatgccggcacagaggaaatccagttcatcacattctccagccacttccaattcaccaatctgggattgcttgaagcttagatggaggctgttgtcctctgtaataacattaatagcacctcttcactctcaaggagagcctgttaaattttatgcttaggagattttagcaagaactccctaagatcatacccagttttgtaaatgtttacagatgtttttctggggcgacatctaaaactttcacaaggttctcaagagagtctactggcccaacaagattgaagaccactattttaaacaaacagtggacccttctccacaccaaggccaaactccttcattctctcatttagaccctcactcctacatactcaaactttggtgtttccactcaagtccttcagcctacatctacgctcaagtctgaatcttcatctgtaaaatatcttccctttagcaaccaccctaccttccttctgttcttcctggctctacttcctcaaactctaagtacttttctaccaattatggtctgttttttgctccttgccctccagcaagaccctgatgatgctcagtgtctaatgcagtgtacacattctaactctgatataaactctgtgtgtgtgtgcatgacttgatatcatttggatagcaatttatggcagaagcatcctctggtctgactctgaatctttttacaattgagaactgaaactattacttgaagctcttccttcctttggacttgatgatatcattcactttttcttttcctatctcagggtcttctttctcaacctgttctgtggcttctcttctccacgcagcaattcactttataaataatcttgaaagaatgaatggatggggattggttttggtgagacactattccaagcttggctctgcctctgactggctgcctgactttgagcacctccctgggcctgtctgcattcagtctccttgccaatatcatggggagactgagacgataacataatgactgtccagcacagagtagatgctcaataaattagttgatctttctccctgcaggcaaatattgttctcttaatgacacccagtgttttgatgaccattgtgatgttgcaaactcttaaacacatatctgtttgaggtctctttacaactggagacttatttttccctttgcttaccaggcatctacatctgaacctcccatgggcaccccaaaggtcacaagtatgggtagccctgtacctgtcctctgagacttccttttgcagtctctccagctacctacttagtcttctgaaccagccacctcaaagtcgttctgtaaaccttccatttggtggttaaacccttctcacatttaattggtaaaaaactccttttgatttgaccttcctctttgctctcacatctccatctccatggacactgctacagtccagacctccactgtttccatgtgagagtgaacattgatctataatggtctcccagcctctagtctcatcctgtttcatctggtagtccccattgctgcagaaagtagcagttgccaatatcatggggagattggtataatacgttgaatgtccagcacagagtagatgctcaagaagttagttgatctttctccctgcaggcgaatattttttctcttattgacacccagtgttttgatgaccaccgtgatgtggcaaacctcctaggaggtgttgcatcaccttcctagaaagtacctctttacttctttcccatatgtaaaatctttcagttactctccattatctagagcaaggttgctcaccctagcactgtcaacatttggggcagagtctttgccgtggggactgtcctgtacagtgtaggatgcttagtggatccctggtctccacctaccagatgccagtagcctgcccccttctccagttgtaacagcaaaatatagaccttgccaaatatcccagggagggggcacaaagttgcccccagttgagaacaactgacctgcaaaaataaaacctatattctctcttggcttatgatatacctcaatatattgtacccaaatatcttcaacttaatctcctgaaactataactcacacagaccctgaaatctcttatagttctacaaaaagtttattctttccaagtataccccaccttttatgactcccagactaaagtgccccatttttctactttttgtcccaattttctactggagtacctttttgttcttatccttccaaactaatctcagataatttctcctgttgtaaagtcttccctatctatactataaataatttgtccttcttccttatggatcctacatcacttgccatctattataggacttgtcactgtaatttcttcctttcacaaatgtattttaccctgaccactactaccatctacttataactttttgagtttagaaaagagattctatatatttagcatgtagtacaatgcccaacacatactaggagtattgacagctattagatagacgaataagggaatgactaatgactgaatgagtgaatgaatgacgtcacatgcttctctccccggcatggaaatgtgttgcatgttctgcatgcagagtgagttgctggcttcatgtcaagggggaatcgtcctttaagaaaaggatctgagctgctgttctccatgttacctgaaatcccacctcttcctgaaacttgctctattgagacttgagtttcaacttgatgctagagacagttgtttaaatttattttttattcattgatgattgcaactgtaatgtcccagtcataaaaataaccttatattcaataaatcccactcagaaatattctgcatggggctctgcttagcatattgatgtgaaatttatacccaagtctattttggaaaacatcaaattaaacttgtaagtataaaggaaataagagtgcccttgacctcccaagatttagatgatcagcagtttttaaattacatttcttaaaagcaaactttgatttttaaagcactgggcacgaggctgtaatcaaaggcactgatgatatttagatgatttagaagagcacaagctgatctgccaacattcagcttgcaggatacatttatcttccgttagtagtatgaaacacctttgtttttatattgattatattactttagaaaattataggttttgccttgttatattacttacagtcaaaataaatgattatggataattataattacaagaagcagctcattaaaaggggctggttttattgaggctctgctttatttctactggaataattttaggcacacagcagcatatcaaataggatgcatcagaggatgattttaggaacttagttcaaaagccctctcaggattttgcatacattttaaataatattcagctaaacacgtaatcacatgtttctcatgtatttccaaaaatcccatatggttagaaatgcctgccaggtttctctgttttgataaacagaatgacatttaattaaacagtcctgaaaaataccttctttcttgactttatactcaggagagttaataaagtccccatttcagatgatgaaataatacatttcctgcccctattctggttttctgcctcaaatgtcttcctggagagactccacatatgccagccttctcaagagtattaaaccaagggtagatggtagctagtgttctttgatctcactgtactcgttgttattcatttttttcttcttctttttttttttagatatgggggtctcactatgttggccaggttggtcttgaactcctggcctcaagcaatcctcccacctcagcctccaaagtgttaggattacaggtgtgagtcatcacacctggcctggttggtattgatttttaaaaagtgatttgttatttgttgtccatgaaacttggtgtgctctaaattgtttgtttgtttcactacatgacattccatatacttaccatcaattccaattaataggaattccaatagaatggctgaaacaaattgagtagaacaattactaacccctttagacattattatgttaggttctacactggctctatctatgggtcactgcatctgttctacactggctctatctatgggtcaytgcatctggctatttagatggcaaggaaatgtaattgaactaaaaatcctagtcattgagcaacgggctgtttttgttttgctttttacctgccagctggctcctcatctttgaggtttgctctgacagctctgaagcttgggtaatatacaacaatatagacaaagtaaggaaataattaggttgtatgatattaatatattcccaacctgaaaaccacagttttaaaatattcctattgtctccccgtcctctgctcatttgacagttaccaggagctttgggcagagagggagagaagtgcatatgttgtcacctgccgctctgctgcctccatagcccatgttaggaattagcatggtgtagattaagtacaactacacaatagtcatcaattcccaatgttatcgatacattagaaaggggctttgatttccaattaagtactgaataattgaaagaaacatgtgttgttgcaggttgttgagaaacacctctacctccatttaccctttcattaagaaacagggataaaaaatattgcgatatcaggatatctagaatttggaagatgtggaatcatcctgctgagtccaagggcaatccagaaaatcagctgtgattcagactgtggtgtgccccgtggaggccatgggtcatccaggagccttgtatacctggaggatgaggagccaccaggggggaattcattctaacgtaaaaaaatgtcatcctggcatagtgacttcgacccagttcaaaagcccgggttgttgaagaggagccaaattctaggcatggtgtgtttacagtgagtgctgtgtttcccagattttcccatccatccgtaaggatctgcacattttaggaagagagagagagaattcagaataagagctgaataagagtgcagtagtaggttagctcagcagatctgtgttgtccaaaccctgcactttccaaagaacatctgctctttgacagccttccaggagataacctctaagcccttggaatatcctgcctgataataatgtctttgtttacctggagctttgagttatgctagatagttaatgctaacaatgtgatttatagtggaagctttgggccacctgtatcagtcttgacctctggaggggctggcaactgagttcagtcatgcagacagtctgccatgactacacgccccaaaaccatactggatgccagggttgggggagctccctgggcagcaatgctctgtgcatgtttcctcacctcactgctgggagaattaaacatcatttggttccatttcccagctgctgaaaaactgtaattcttttggggagaaattaataatgtagcttaaaaggaagaatgttgattgtgtaaattctgtagaatttttttaaaatgttgagggaagaagggaagaccaactatgtagaaaagggagcctttattatgaacacacaactctttataatacccatgtagaataaaagtaaagaaaaaataattcagataatcactacgtaagattatgtttactcttacatgttacacttacatattttattttatttgagacagagtctcactctgttgcccaggctggagtgcagcggcgtaatcgaggctcactgcaacctctgcctcctgggttcaagtgattcttgtgcctcagccacccgagtatctgggattacagatgtgtgccaccatgcctggctaattttttctgcgtttttgggagagatggggtttcgccatgttggccaggctggtctcaaactcctggcctcaaatgatctgcctgtctcagcctcccaaatggctgggattacaggtgtgagccactgtgcccagccacttacatgaaacatctgactgcactgctgaattcaaaatatatgaatatgttatacagaaaagtgttttgaaagtccagtgaaaattaataaccaaatagaatgttctacttagtcatttttgacttatctttataataattttgttttataatgtgaaaaaatagatctattgctcatcttgtcaaaaatatttatgtacagaactgtattttaaaacaagcaagtacaaaagaaaaattaagtgtatgaatattttattacctctcaaaatagccttacttgaaaagaccatcactccatggccaatggatctacttgatcctgaaataattgtgagtggggtgtatctgttactatcagcaggccaacctcacagcaacaagaagaaaggcctttgacaacctgagggtcaccactgggatttctatggccaacttaaatggaaagaatgagcaggaaaccagttgactttttttgaagaaaaaatgacaaaaatctctcagtacctcttagtcatcatttcttggaaacaactatacatcatacagttgcaggcagggaaataaattgaatatgtactttgtaagagagcttggcaattagcaagtggcaatgaccatccctcaaagttataaaggaagggcagtccaatagtatagttttgtatttggggcagtattttcatagaggcatttgagcaacatgcattaagcagaggcaggccgataaacgggtggctctgttctctgcaaagtcatcaccacttttgtgacactcctgaagcatacctcttcactgcctgccagtttactggagtccttgcatcactgtagtacatccatcagtacagcctgttattcctgctgaataaaggtagtacagaataacagtacagcctattattactgatgaaagttgtcagtattgaggtccaaagaggagtctgacttttttttctaagttaaaaatagtagcatggtacataaattaaagcaattcttttgcatgtgaatttctgctataacagtccctcaaaaacaagaacttgaaaagaatgataattcagcctcattgtagctgaaaggatttgaatggtatttcttgacattttgttggcttagaatgccacagaatgcaacggacacagggacatttattttgttacagcatctttcacaagtgaaattccccagttagactataaataaaaacagctgtgcaatttcagacacgttccacaaaccgaagatgggtcaaatttaaaaatgaagcagttattgcggagtttatgttcctccagcttttaaatatcattacaaacaatgtaataatgcattttagactaggagtggtttctcaaaagtgaaaccaggagattccaacattaatctagaaaattgattttggtttgtatcttttgctactattattatgaaaaacaaaacaaaacatatagagaaaaattatatttctatcaatagaactattaagttacacatttgattaaaggtattttaaagtagactcacaaatggaatgagattgagagtgttgatatctactgaaaagccgagtttgaaaatgttaaaagtctattatttgaatggaagtcatttattattcagagctctctgagatgctgtaaatattttataaatgatacaaccagcctcatcttatgagagttctgcaatgctctttaaaaaatctcgatgaattaagtgtcattcattcaaatacaaaacagaaatagagataaattacgagaactgctgttttttttttttttttttgagatggagtttcctctgtcgcccaggctggagtgcactggcgcgatctcggctcactgcaagctccgcctcctgggttcacgccattctcctgcctcagcctcccgagtagctgtgactacaggcgcccgccacactaattagcccgcctggctaattttttgtatttttagtagagacggggtttcaccgtattagccaggatgttctcaatctcctgacctcgtgatccgccctccttggcctcccaaagtgctgggattacaggcgtgggccactgcgcctggcctatgagaacagttttgttgttgttgttgttttgagacagaatctctctctgtcgcccaggctggagtgcagtggcgcaatctcagctcactgcaacctctgcctcctgggttcaagctattcttctgcctcagcctcacgagtagctggaactacaggcacccgccaccacacctggctaatttttgtatttttagtagatagcaggtttcaccatattggccaggctgatctsgaactcctgacccgtgatccacccaccttggcctcccaaagtgctgggattacaggtgtgcgccacctcgcccagctgggaacagtttttaaaaattgtatatggtagaggaaggaaaacacctttaacttagtaaaggagtcttataaatgtaagaaatagctccctaataaagataagaagatagtccatgacctcatggcactttcaagatcaaattaatcaacccagtgcccctgccaacctcaatttagcagaaactccaggtagttaattaccttgcccaaaattgcagatgcagttggcatctgacacagaatgtgtctcctaatttgttctaaacctcatccgttttactatattattagaatattagactatatatgtattatatattaatctacccaaaaatgttatagttggattcctgaaggtgccttttgggagtaatgttctttggtttctttctagacatattttctttaactaatcagccctttcctctgagtagtcccaggtcatatggcactggtaagtaaggctaataattttctatgtttctaattggggagaagtttcaggaactctgcagcctatacagagaaaggagttccttctcaattgcccccaaaactgcagctcctgatgcaatcactgtaactcctagagcactgctttcagagattttgtgaggcagttgacggtgatgttattcagaagtccttttcttctctcctattgacagtgaagatcataaaattagatctccgtctccctgtgtgtttcacacatcactagagcccctgcagatatcacactgacccagtctaattgagttccatgtgtgtctgcatgaacgtttcccagctaggagagaactgactgataatgaactaaattcgtgactcacctagacaagatttcaaaggttaggtcatgctaataaagtgtccctgcattatgattgtctatagatttctatgcacaaagataaaattaaattcagccacaaaattacatactttgagaaaatatatatatataaaataaagattaaataaaaaaatatatataggacctgtagatgccgacaccacgaggctcctctgagggcctgagtcccgggttcttgcaagagcagccagcccgcctgcccgtgctcctcgctgattggtcggctcagtgtgcatgcaggtagtggggccgtgtggggccacgccccctgcaggcatgcccatggtagctgaggacctagggggcaagggtggctctctgaggcctctgttcccacaatattccagctcctcatcctggcaaaggaagcaaggagccgggaatggggagtgctcggaatcctgtcctgaggaatgaaggccaagtggatgggccctaggacctcacccccgggctcgttccagccacccttgcccctttgggtgcaatggccatcaccccgtgggtggggcccaggctccctcccatgccctgtgtgcttccaacacgcccagctgcatcctttttatcaatggattgtgcttttatgttttatctaagaaaattgttgactccctgctatagactaaatgtttctccccagcatatgtcactctattcaatccaccaatcccaccactgggtatctacccaaaggaaaataaatcattacatcaagaagacaccagaactcatatgtttatcacagcaccactcacaatagcaaagatatggaatcaacactcaggtgcccaacaacggataactggataaagaaaatgtggtttatatgtaaaatggaatagtattcagctatgaaaaagaatgaaatcatgtcttttgcagcaccacgaatggaactatagaccattattttaagtgaaacaagtaaaacacagacaaatattgcatgttctcacttataagggaacggagcaatgtgtacacaggaacatagagagtggaaagatagacactggaaactcagaagggtgggagagtgttgagaaattacttaaaggatacaatgtacattattcaggtgatgggaacactaaaagcccagacttcaccactacacaatagatccatgtaccaaaattgccctcgtagcccttaaacttatataaataaatacatgaataaatgtttgattttgctgggtcaaaattaaagggtttttgaaagcttttggttaaaatcattcctggtgataaaaatgaaaccgacaaacatttctataatacttgacaacagaattataaagagaaatgatgcatgaatacatcttaattcttgccttaggaatattctctaactgaagtacccaaaggcttaaatatgcccattttatgccattatacctctgcaatttatctatgaatataaaaggaaatacaaaggaatataaaaggatataaaatatctatgaatataaaaagtatgccattatacctctgcaatgtaatctatgaatataaaaggaaaacctttgcttaagcacacacacacacacacacacacacacacgtgtgtgtgtgcacatacatatatatatttttaccctccaaaggcaacttcaattttgttagataaaacataaaagcacaatccattgataaaaagaatgcagttgggcatgttggaagcacacagggcatgggagggagcctgggctccaccctcagggtgatggccattgcatccaaaggggtaggggtggctggaacgagcctgggggcaaggtcctaggccccgttcacttggcctccattccttagggcagggtcccctggcactccccactcctgggtccttgcttcctttgccaggatgaggagctggaatatcgtggggacagagacctcagaaagccaccctctccctgagtccacagctaccatgggtggtccctgagggggagggcatgcctgcagggggcgtggccccagcggcccaccacccacatgtgcactgagtcgaccaatcagcgaggagtgcgggcaggcaggctggctgctctcaagagaaccgaggacccaggccctcagaggagccttgtggtgccagcgtctgcaggtccactgagggagcaatgtggggggtccctcaggtgttgtgcccatggtggggaggcggggaaagccggcatgaggccctttggggatgaccgtgtgaagcaccgggctgccccaggctgacctgtgaggaaatggccccagtgtcgttgtctggggcctgaatcagggcaaggccctgagggcaggccggggtgggccagggctgagagctggagctgcccaggtggttcccagggcccaggagcagccccaggggcctgtgcatatgtgcaggggttggggagtcggtgtgggtccctcctgcctggctgcccagcaggacaggacacttggggtcaccggaggtcccctgggcatccaggcgggcgagtagcagtgcccacccttgattgtccgaaacaggtgcacaccgggtgactcccactgagatagctggggagatcctctgtcatyccacagctcttccggccacacggggtcgctgggggacccaggagcagggccgagctctgtctcaatggctccgcgaggatcccccagaggccgcggagttcaggtgtgcgcggcagctgcgagctctgcggccagccccagggacaggctgtacaggccaggacaggaggggatgctgacrtattctccgcgatccctcctgctcccacaggagactcggggcgggccagccccacgcttcttgaacccaccatcccgatagctctcctttcacacaccctgtttccttactgtatctttgcactcacaaggttcaggagtcacctctaacatccgaggacaaccagccatggagcccgtgggcaggaagctcatggagaagcctgcgaaggcctcacccagtggaggctcaggttacggccaaccaggaaatggagcatggagttaaaaacagtccaggggagccggaagaaggtgcacgcccaaggggacggtttgtctgctctctgcgcggggggcacacaggcagcagacagtcagcccgaggcccccagcccctatgttgctttggagttcaccttgcacgtgctaagatgcccaagcttttcaaagcaggctcaagagccttaggtttcccatgggaggttctccctcataccagggttacagatactcttagagcagctcttctcgatggatgcggtcctgacgtccaagggatctgacacgtagtgccttgtttactgggacttaaaccgcaaagagcttgcaaaaatgcctctgtaaaatggtcagggtcccagtgattccatgtatagcgctgctttaaagctttaatgggcagagagccaaaagggtccacaaatagtacatttctccacaaaaaaatgtccacaacagcgtcttcctcttaaaaaaaaaaaaaaggtgtgtcttttttattttaatgcaggaaagactccagcaattgataagcagcggaaaagagaccattttgctgaaatcgatgcggaagacaaggggtaaagtgtttaagtcagttttgcctgtcagataacgtcttctaagaaaaatcagctttggagccaagcatggtggctcacgcctgtaatcctagcattctgggaggccgaggtgggtaaatcacttgaggtcaggagtttgagaccagcctggcgaaaatggtgaaaccctgtctcaccaaaaatacaaatattagccaggcgtggtggcatgtgcctgtaatcccaactattcaggaggctgaggcatgagaattgcttgaatctgggaggcagagaagtcagctttggatcatataatcactgttctatgcagaacatttcaccatttcacataagacatttcttcttcttaaacaaacatggcattttgtgtagcattatgttaaaattttgatgtaacttttttctttttttattatactttaagttatatgggatacatgtgcagaacgtgcaggtttgttacataggtatacatgtgtcatggtggtttgctgcacccatcaacccatcatctacattaggtatttctcctaatgctatccctcccctagccctccacccccgacaggccccagtgtgttatgttcccctccctgtgtccatgtgctctcgttgttcaactcccacttatgagtgagaacatgcagtgtttggttttctcttcctgtgttagtttgctgagaatgatggtttccagcttcatccatgtccctgcaaaggacatgaactcaacctttttaatggctgcatagtattccatgatgtatatatgccacattttctttatccagtctatcattgatgggcatttgggttggttgcaagtctttgctattgtgaatagtgctgcaataaacatatgtgtgcatgtgtctttatagtaaaatgatttataatcctttgggtatatatccagtaatgggattgctgggtcaaacggtattctgattctggatccttgaggaatcaccacactgtcttccacaatggttgaactaatttacacttccaccaacagtgtaaaagcattcctatttctccacatcctctccagcatctgttgtttcctgactttttaatgatcagtattctaactggcatgaaatggtatctcattgtggttttgatttgcatttctctaatgaccagcaatgacaagctttttttcatatgtttgttggctgcataaatttcttcttttcagaagtgtctgttcataaccttcactcactttttgatggggttgtcatttttcatgtaaatttgtttcagttccttgtagattctggatattagccttttgttagatggatagattgcaaaaattttctcccattctgtaggttacctgttcactctgatgatagtttattttgctgtgcagaagctctttagtttaattagatcccagtggtcaattatggcttttgttgccattgcttttggtgttttagtcatgaagtctttgcccatgcctatgtcctgaatggtattgcctaggttttcttctagggtttttaaggttttaggtcttacgtttaagtctttaggtcatcttgagttaatttttgtacaaggtgtaaggaaggcatccagtttcagttttctgcatatggctagccagtttccccaacaccatttattaaatggggaatcttttccccgttgcttgtttttatcaggtttgtcaaagatcagatggttgtacatgtgtggcattgttctgaggcctctgttctgttctattggtctatatatctgttttggtactagtaccatgctgttttggttactgtagccttgtaatatagtttgaagtcaggtagcgtgatgcctccagcttttttctttttgcttaggattatcttggctatacaggctcttttatggttccatatgaaattcaaagtagttttttctaattccgtgaagaaagtcaatggtagcttgatggggatagcattgaatctgtaaattactttgggcagtatggccattttcacaatattgattcttcgtaaccatgagcatggaatgtttttccatttgtgtcctctcttatttccttcacattaatgttaatcagggatattggcctgaaattttctttttttcttgtgtctctgccaggttttggtatcaggatgatgctgtactcataaaatgagttagggaggagtctctttttttctgttgttcggaatagtttcagaaggaatggtaccagctcctctttgtacctctggtagaattcagatgtgaatccgcctgatcctgggatttttttggtkggtaggctattaattactgcctcaaattcagaacttgttattggtctattcagggattagacttcttcctagtttagtcttgggagggtgtatgtgtccaggaatttatccatttcttctagattttctaatttatttgtgtggaggtgtttatagtattctctgatagcagtttgtatttctgtggcatcagtagtgatatccccttgatcattttttattgtgtctatttgattcttgtctcttttcttgtttaatagtctggctagcagtctattttgtttttttttttattatactttaagttttagggtacatgtgcacattgtgcaggttagttacatatgtatacatgtgccatgctggtgcgctgcacccactaactcgtcgtctagcattaggtatatctcccattgctatccctcccccctccccccaccccacaacagtccccagagtgtgatattccccttcctgtgtccatgtgatctcattgttcaattcccacctatgagtgagaatatgcggtgtttggttttttgttcttgtgatagtttactgagaatgatgatttccaatttcatccatgtccctacaaaggacatgaactcatcattttttatggctgcatagtattccatggtgtatatgtaccacattttcttaatccagtctatcattgttggacatttgggttggttccaagtctttgctattgtgaataatgccacaataaacatacgtgtgcatgtgtctttataacagcatgatttatagtcctttgggtatatacccagtaatgggatggctgggtcaaatggtacttctagttctagatccctgaggaatcgccacactgacttccacaatggttgaactagtttacagtcccaccaacagtgtaaaagtgttcctatttctccacatcctctccagcacctgttgtttcctgacttttgaatgattgccattctaactggtgtgagatggtatctcattgtggttttgatttgcatttctctgatggccagtgatggtgagcattttttcatgtgttttttggctgcataaatgtcttcttttgagaagtgtctgttcatgtccttcgcccactttttgatggggttgtttgtttttttcttgtaaatttgtttgagttcattgtagattccggatattagccctttgtcagatgagtaggttgcgaaaattttctcccatgttgtaggttgcctgttcactctgaatggtagtttcttttgctgtgcagaagctctttagtttaattagatcccatttgtcaattttggcttttgttgccattgcttttggtgttttagacatgaagtccttgcccatgcctatgtcctgaatggtactgcctaggttttcttctagggtttttatggttttaggtctaacgtttaagtctttaatccatcttgaattgatttttgtataaggtgtaaggaagggatccagtttcagctttctacrtatggctagccagttttcccagcaccatttattaaatagggaagcctttccccattgcttgtttttctyaggtttgtcaaagatcagatagttgtagatatgcggccttatttctgagggctctgttctgttccattggtctatatctctgttttggtaccagtaccatgctgttttacaccacaaagatactcctcgagaagagcaactccaagacacataattgtcagattcaccaaagttgaaatgaaggaaaaaatgttaaaggcagccagaaagaaaggtcgggttaccctcaaagggaagcccatcagactaacagcggatctctcggcagaaaccctacaagccagaagagagtgggggccaatattcaacattcttaaagaaaagaattttcaacccagaattgcatatccagccaaactaagcttcataagtgaaggagaaataaaatactttacagccaagcaaatgctgagagattttgtcaccaccaggcctgccttacaagagctcctgaaggaagcactaaacatggaaaggaacaaccggtaccagccgctgcaaaatcatgccaaaatgtaaagaccatcgagactaggaagaaactgcatcgactaacaagcaaaataaccagctaacatcataatgacaggatcaaattcacacataacaatattaactttaaatgtaaatggactaaatgctccaattaaaagacacagactggcaaattggataaagagtcaagacccatcagtgtgctgtattcaggaaacccatctcatgtgcagagacacacataggctcaaaataaaaggatggaggaagatctaccaagccaatggaaaacaaaaaaaggcaggtgttgcaatcctagtctctgataaaacagactttaaaccaacaaagatcaaaagagacaaagaaggacattacataatggtaaagggatcaattcaacaagaagagctaactatcctaaatatatattttgttaatcttttcaaaaaaccaactcctggattcattgctttttgaagagtttttcatgtctccttctccttcagttctgctctgatcttagttatttcttgtcttctgctagtttttgcatttgtttgcctttggttctgcagttcttttaattgtgaggttagggtattgattttagatctttcctgctttctcctgtgtgcatttagtgctataaatttccctgatgtaactttttttttacagggttgatatccagaagctagaagatattgcaggtatgttttaggagctatttgtagtttatgaaaattgttttcaatcatacaactgttacaataggctgtacgaattagtggacaagactgtcttaaatgccttcttctcatatatagcatttaacatagtctgtttgataaatctgtattacttccttttttattgttgatgtggaatgtgagaatgcttctaataatgggcaagtgagagggatggcttttctttcatacacgtggaaatttaatgtttgggggatattagaggacactggaggagaaacagctctattcgttccttttagtgtacacacattaagtcacatatcagtttttttagcttttattttaggtttggggktacatgtgcaggtttgttatatagataaattgcgtgtcacagtggtttggtatacagatacttttgttattttgttattttgtattttgttacctaggttatagcatagtacctgatgggtggttttcgatcctcaccctcccctcctaccctccacccttaagtaggcccagttgtctgttgttcccctcttcctgtccatatgtactcagaatttttaatatgagtttttcatgttcctaatttagctattctattgtcacagctttctgattttgttttctttaaagtatgagaaaaaattgaattctctaaaatgattattttctattattattccagtaataaactgtgtagtagaaaagtaaagacaacttttctacccagtgagaaacatgtaattaattggatccaaaaactcataaactttatattgccatgtgaaatattagttgtactgactgttataggaccatttattcaaaaaagtttgagaaaatttctgtagagacgatggagacaacactcttatttttaaaaagcttactttagttttcagttcttctatagcaataattcatataagcagtatatttggaaagctttgctctgcttggtggtgacaaagtgctggttttgtgagctgcctaatacatcgaccactatagatggatactgtatgtaaaaaatatttgtattatggtgcagatcttttatgactgcagaaaactattcttagcaattgatggtggatctctgatgtgaaactatgtttaggaaagcattccttgcagtaatacagttttcagaaacagcattgtggataaaaatgtcatataaaaagctcccagaaaatatttcaaacgtgtttttaagtgtatttctttatctacttaaacctaaatttttatacccatggacattgcttcttttattaaaatacagttaatagcatcaatcactagattgcttaaaaatactttattgtgtattatgttatgtctacccttttgatggtcttacttttatgtgctttacttaatgagttgtgacagtatttcatggaaacatgtcgtttgaactgttggacattttatgatgtagaaattaaagtctgtgtttgttaccctttctgcacatttaaaaaatagaaactattttaattatttgctttttttcatcatctgtcaattaagtgatttgctgttataccaattggaattggaaaactattattaatacctgaaaggttttacagaaaaggattaaatcttacttttttgaaacgatctttccattttgcattttaaatatccttctgatattgctgaaccatcatgtcccatattgatttcaatatctgcaaataaactacttttcaacattaatttttaatgcattttcatttactgtctagctgacattaaaaagggtcttgctgcaaagagaaaaaggattgaaagcgttgcaaaagcttgcaacgaaacaaacaacaaaattaaacgtattttgagaacaatacaactaaaaatgcatgattgttggcttttttgaataaggatatttctatcatttctttgtattcattggtgcaaataatttcaaaaactatcttgtacatattggtgtctgtagtgaacaatatgtttacttgattgttccttaagcaggtaagtttctttgttttataacctaagtttaacagaattgaggtatattatctagaaagccaatgaagatgacctctttttgccttccagataaaaatagtcttcctgtaaaattaatttttatccatttctagaaatatggcagctgcatataagataaatgtcttcaacgtttagtctgtagatccttaacaatattaagttatgtagaaagggacaaccttatgtcgtaaataggttatctattttagttaaattgttttcactattccttttagaaaatcattgttgtaccaaagtggagagagagttaagtgaagtatttcttttgggaaatcttacgggatgaatggctatgatattcttgaacctacttatgagaacccayatgttatttagtttgaggaaatgaaaagtaaactgctgttagagaaaattattgtttctgggaaatttatagtgcagtaaactctcctttgttttcagcacataaagaatgtaagatagctgctctagtagtcagttaggaagggatcctttcagaatgacagtaactcatttcaccttttcccaaaaagaagatttcagctgccattactcccttgctactttatagtataaattatgtgaagtcagttttggtttgaataggattaatttttcatctctctatgacatatgaccgtgttacttattatgtgttacaggcagaaatgtagttatggacgttctctgaagttgctgactgtccttgaatcacaggtgagcagaaagatgaagaagaaagaagaaggagctgaatgcccttgaagaatacatcacaggtgagcagaaagatgaagaagaaagaagaaggagccgaatacccttgaagaatacatcacaggtgagcagaaagatgaagaagagagaagaaggagaagaactaattgttggtatcaggcttagctttacaattaacctattgtatcaatgtctcaggtagtaatggttcatgcagaaatccagcaaagaaggaagagagcatgaacccagagagcggggcccattagtggactcatggactaggggaatataattgccatgcagcattaggggtccaactgaggtcagtgtcatagggattaagaagttaaagtcagcccagatggcatatttgtgcaagagtaactttagggttggaatttcctgggttggggtgtagctgagcacattgatagagggagagttgggcagggcatatatgttggtggagggggggcggttatgatgactggctgtggaatttcagctgggacygagttaccggagcacrtgggggtgggcattgggcagtgaaaagtgctccatccattgggtgttgggtccctacagattcctgagctgtagtactgaagtgagtgacctacagtgacagggaggtagtggctgtgtatgttgggaagatggagaaatagctgagtggagtggtcaggggctgggactctgcagccacattgcttgggatccaactccagtttgaccattgctagcttggaaatatgggcaaattatttatctctgtgcctcagttrccttatctatgaaaggagacatggtaagagtacctacctcagagttgtttgaaggattaaagggttcttatgtaatgggtttatttaaaattttcaggatgcgatctcacccatggttgctctttatcgttgctatcattgctattattattattacgggagatgttgcagccattgggaatgacaaaatctaggggatgactgtgtgagtgagtgccacatagaggagaggagaacactgttgttggagattaggtcaaggtgcagaaaggcaatcattgttggaaggttcatctatgtgcatactgaaatgaccaagtgtttaaaatcttagtaaaaaagaatgtttcttaggtaagaaagatctgtattagaaattaactatctgtggtcaacaaattgtaggaagggtcatcaaatactcttcatttgaaaccaagaattaggacatacatgttgaatatatataagaaagaatattctttactccatgactgatgagaaagattatgttgttttagcatatgagtggtgaacacaactgtttaaaattggtcataaatgttgtctaatagtgttcagaagtattgatttaaagagtatccatttaaagctaatgcagaattatgttttgtaagtattaaaatttatccgattttaatcactttttagttttgtgcttctagagaatatttcaagagcaacaaaagagacggcaacaagatgggaaaggaactgaaagagattgagccgccacatgagcaattcacaaaggtctgttctatttggtaacacaatacgttcttataaaatacaactcatgaacaaaaatagaagacagtctgcttgtttctgaatgtatggaaagacctttttttttgatcagtttgactttattaatatttgttccacagagctttacaggtatcctttaactgacttctaggatttatagtttttacttttttcaccaaacaacaaattcatttttataaaattcagttggccccgagagtttctttttttttttaattatcctttaagttctagggtatatatgcacaaagtgcaggtttgttacattgtatacatgtgccatgttagtgtgctgcacccgttaactcgtcatttacattaggtatatctcccaatgctatccctcccccgaccccacaacagtccccagagtgtgatgttccccttcctgtgtccatgtgatctcattgttcaattcccacctatgagtgagaacatgcggtgtttggttttcgtccttgcgatagtttgctgagaatgatggtttccagcttcatccatgtccctacaaaggacatgaactcatccttttttttggctgcatggtattccatggtgtatatatgccacattttcttaatccagtctatcattggtggacatttgggttggttccaagtggacagaccttttggttatacattataaattacttaccattttcactttgtattgttccagatttaacataattggtaagtgtatttttaggattcatgaatagttttgtgggagttatttaaaacaggaaaaggtaaattggaaattttacctggaaatataaatcttgtgtataaaattgatactttatgaatacattaatgaagatttcatattcagtttttaggagatcagcgacagatctttagtggaatgcaggaagtccataaatccttactggatgtcttttttacttgtcttgtttaaacagttttagttaaataggaagtaggcaagtgttgactactgagtatctcttttatttcctgctggaatgtaggagtgttttatggcatattccctttcaaaactattagtgactagtaatggttttacatgaaaatttgtaatcataagagatggttcagatgtataacagaatgtgaaagccagcagattattaacactttgtgaattgtgaattatctgctgtcatatagcatattagctaatcgttattggacaatgacctcttcttcatgtagatgtatattatttaggaaacaatgtaattttcttttgggaggtattctttttaataaccttgtgaaaagacatgctcatatgtcactcctctacactaactgagatgtgttaaataaactaggaaaagcgtttgaaaataaaattttcaagcaacttaaggatgatctgtacacaaacagttatttacatagaagtcacgagaagagaacatgttgctataatgttcctcagaaactatttattaattggtatgaacattaaactagaaaagttatcctgtcaatgttaatgctacatgttaccccttagggtagaaactttggtatcatcttggactcctctgagtccattatccttcccatgcagttattgcgaggcacgtttaccgctgtaatggtcctttaatttctttctttaaatccctactgaggctgccctagttcaagacctcattcttccttgcttgtattattaagctcttttctgagttatctcttctcttctgagccatccttcactgatgggcaatactatcttcctaacactctcccctttctaaaatgcttcctagcccttccctcttcccagcctgtcagtggtgcccatgtctcagttcttagatattcagagactctcccctttacatgaccccctcttaggcttgttttgccaccctctgtctttcctcccaactctccagattgacagccttccctgaaggaactcaccgttactcccatgctttgctcatgcccttccctccaaatgcttttaaaatctttctttttcttttttctttttttttttttgactgattgaaatcttgtgccaactaagtcgacatcagtctccatttttggctacatgtccgagtgagttgctcttccatagcagtaacacaagttttgtattacttttttttttattcgtgcatttgctcatgtcacaggaatacggaagagattgtgtactcattttttacgtcttcctcagtattaacatacaacattttagggactatgaactgctgaactatttgttgagggactagtatatgtttcatacgtagttatgttttccccaacttgattaggtcatatcacagaccattttatcccttcaatgaaaaccacgttatgtggactattagtgataacaaatggtcactacctggtgaaaaaatatggtattccatgatataagactgacagtctttttctgtctttggtccatcttgtctgtaacatgttcatcaagccattttattcaagcaaactacatgactgttggacctgctataataatatttcactgaaatctggaattaaaaaatttaagtatttggagctccatgtattgattacagtttttaaatttgaaataaataaccagcatcctttgaatattaaaagctgtttcctttgacatctaatttaccctgtttaaaacctgagatgtaaagtgatggtttgtcagtgaactagactttttgttttagagtattgaggacttggaagagtataatgaaagccctctttttggtgaagaaagtggtgaagaaagtcaacttaaaaaatacatcaccgtgttccaaaataaaattgtgtcggagaccataagtactgcatatttaatcttaaaaactcaggattgatgtaagcactggaatattttatttgtagaaatgtatattgcaattacttaaatttctttttttgagacaactgcagtaagagttggcacttattcagatgtctctttaaccactgttattctgatggctgatgaaaaaacttgaacctatgttatatgatacaagcataacttgagctacactaaaccacatgacagtatttagttaattctcgtataaattagtgtatctcctctatcattagtttgtttgttaaatgccagacctcgttactgtgatctgttgaatgaaccctagacagttctgtgagaaagcagcaattgcacagttatatacatggtcagttaaattttaacattaaagataatttagttttaggtttggcctctgtggatctgtatccgttccaaaactgtagaaagcacaggcatggaacagtacatttttctctaataaaagaagacaaaacttattttatctgtgcattctttgtatttattcattaggttaaagagacaattccaatgaaagtatgacttcaaaaaatagatatactctatggcctttcaaaattattaaacttaccttaacatctgtgttcttgaaaaaaattaaactactataaatgattgagacaactgagcaggatatataaatgtcagtgctgagccattggcttgtgggtatgtcatttccaaagacatcaaaatgccatttagtttgttttggtccaccattcaatgataccacccctcagcattgattcaaagtattttattaacatttatgtatgcttaacaattacttcacatctatggcaaggtaaattatgtagggtgctttgttttttaagtttagtatttgtggagtatgtggaagttagtttaagtatgcatgcatctaaaatcttgtatgatgaactctcttacctttcctttttaatgtgcagtttttgcacataacatacaaaatgttcatttggaaacactttagtaaatatgaaattcagaatatatttggaataagtcagttaaatgtattcttttgctgagtttctgaaattccattcatgaattgttcagaacacaataccctcattgggaggagaggagagacttactctcattttcccttgttcttttcattttaattggcccctatataccactcttatcttttcaaggttttccaagttaaagaaaaaaaaagttcattcagattctgtttttctgcctacagtcacttatacaggaataagtgaatccttatggggagcatttaattcttaaagcttgcattttcataaaggattttccttttacccaaagcatgtgttgatgtgtaagtctaagtactacttcaagtttctaagaagatccttatttgagatctctttcagtagttacagaggcaaaataagcactgcagaggtccatgtgagagttctattatacatactgggctatctgactattctacagtggaaggatgagaaagacaccacaaggtatttagtgatggaacagttgatttatttttatttttattctttttgagaaggagtctttctcactctgtcaccaggctggagtgcagtggcatgatcttggctcactgcaacctctgtctcccgagttcaagcgattctcctccctcagcctcccgagtagctgggactacaggcacacgccaccacacccagctaatttttgtatttttagtagagacggggtttcagcatgttggccaggatggtctcaatctcttgacctcgtgatctgcctgccttggcgtcccaaagtgctgggattacaggcatgagccaccgcgcccggccaaaagttgatatttatgtcaccccttagtacctcaaatgagtaactgtgtacttgaagtcactctggcagatattctgaagggaagaaagtttttgaccttaaaagttattaggagtgtgtgtgtgtgtgtgtgtgtgtgtgtgtataaatgtgtgtatatacgtatatatgtgtgtgtgtgtatgtatatatgcatatacatgtatgtatatagataatatgcatatatatatgcatatacgtatatgtgaatatatgcacacacacacacatatatatgactttgttttttagaattgtttttagttcacaacaaattgatctgaaggtctagagatttctcatttaccccctgttctgccaccatagcattccccactatccatgtaccccaccagagtggtgcctttgttgcactccatgaaattacattgacacatcattatcaccccaagtccatagattacttcagggttcactcttggttactttttgtgtgtgtgtgactattttcctcacatctcttgtgctatagcccctgttttattttttcattaagataacgtttaatttatatatttgtgaccatgaaattttaggttaggatatcagaaacaagtcgcactaaaacaaacgtaaagatacacttttctcaagaaaatggtaagacaggtaactttaatttacatacatatgcttgaaaaattgcagttagtgcttttaaattctagactgaagcacgtattttcttttattccataataaacacccgctttgaagaatggctgatatcaagagcatcatgtctcctaatattgtctcactcagcagctgaatgttaaaatgcaaagtaaaagcactaaatatatccttagagcagtgatgtactgaacaaaattcagaggtcatatgcaaagacagtgcccaagaaattttgcccacagaccagtggcaagtcctttatttcagcaactgaaactgaagagaaacagtcttttgcctccctgcctcttggagagggtttctcctgatagcagagggaaaggaccatctcatttccctgatgttaaaatttcatcttggagtcctaggcttatatctttgtgaagatatctaaattaaggtgatccagtcaaatcacaaaatacttgactcactccttaggaggagcttaagtctgccctgatttctgtgcatacacctgatttattgcactcagagtacaaaagctctgagatgtcaaattgagccaggccgcacattgcattcttatccaggtgaatcagggctctctcagtgctgctcacccaaagcacattgaaataatttttcttatttatttgtaaaacagtgatgatggtatctgtgtcagagggttactgtgtcacaggaaacaatgatggtgagaaggttagacatatggtacatgttgaataaatgttagctattagttaccaatatcttcatgatttttattgatatataatagttgtaaatatgtatggagtaaatgtgatattttgattcatgaatatgtaaagatcaaatcagagtagttgggatattcatcacctcaaacttttatcaattttttgtgttgagaacatcgcaaatgtcttctaggtattttgaaatacatgataactacagttattcgagtgtgctattgaaccctagaacttatttcttctctctaactgtatgtttgtatccattgtccagcatttctttatccccgtcaaccctgctactgtttccaccctctggtaaccaccgttctactcactacctccctgagatcagtgttgtccaggaatgaaaagcaagtaaatggtaaagacaggccgggtgtggtggcttacacctgtaatcccagcactttgggaggctgaggccggcagatcacctgaggccaagagttcgagaccagcctggccaacatggtgaaacctcatctctactaaaaatacacacaaaaaaaaaaaattagctgggcttggtggcgtgtgcctgtagtcccagtgactcagggaggctgaggcaggagaatcgcttgaacccaggaggtagaggttacagtgagccaagatcatgccactgcactccagcctgggcgacagagggagactccatctcaaaaaggaacaaaaaaataaaaaataaaaaagatgaactagttgatagttaataatcatgactggtctatttgtctgctacactttctttcctctatgtgtggcaagtgcctacttactcttttaagacttgtgtcaaagaccacctagttcttcaccttttctggaccctgttagttctcaaacaaaattgtgccccctttcctctcttttagtggttctgtacctctcaaaccctgtattgtggctgttatttactgaactgttaccctagagwgtaaaaactttatcatagtcctaattttatttttggaaactggtatgttcccagccatacaggaggtgcacaatacacacgtactaaataaagtaatggtcatttgaaagagtaaatggtgaatacacagcaattctccaatctttgtgtttatgcaaacacaagaattaactttattggcctaattcaaacgttatcttgaaatttattcaaagttcccattttccatgaattaaccagacattttttgttactagattttcactaattaaccagttaaatctcttttgtcttatatcattttaaaagagcatgtggaacaaattcaaacaacttaggtagttcacgtctgtttagctcactattttaaggagtgaagttcaccccgccatttgcctacttgcctcagtactcacacaacaattgcactgatgtcctgctaatgcgcattaaatcagatatccatacctggctttgaagtgtgccctattcaacaaacagctcacttggttgttatcttccatctagtataaagataaaatatgtgccagagaaagatgtcttatagagattttcgtgatgtactagttacccataaacaattaattactggggcagacattcctaccttttagaaggagaaggcttgttcataggagttgagagtgaagaaaattaattcttgttgaactgataaatgtcccttctagatagtttacattgccattaaagcataacgttgccattttttctttatctctcagctacttatttcttgcatgagctattctggcttttaaaatcatattttttggtcatttgccaagtgcttggctgttgggtacacatggaataaattatccagtaaaaaccatctcagatctttccagctatttttgatcaggtacacctgtaaatcttaaaaagcctataaagaaatacctaactagtacattggatacaagacacacaaatctcacataggacaatggtaactgaagttctgaatgttgactcaacttaggaaattgcagtccttagggggaaaatatccttaaacaaaggcttaaaattctactaggtggtcaccaccgtttatacacatatgtatttccctctttttatttgggaaactgatggtcgtatttycttttcagggtggaagaaggaattctccattaagagaagggaaggaaaatataggaaaaataaccactctttgaaagcatctattgtccaaatcatgaggaagagcttgtagttctgagtttcacaaacgtgatttagttgtttttctgtaggatcctgcgtggggtcacctgtttcacgatagctgtgtcctcagacccagtgtaggagaagggtaaaaaatgtgttacttcactagttcatacctctctgagcctctcttgaaactgctgcagggaaaatttctccatctttgttctgtcacttgcatatttggagcctttcctactgcccttgttatgctgctttgctttgttttacagcatgcattttttccattgccaatgtttgtttgtatttccagggtctagcacatgactgtgctcaaatatcaagtgaatgaatgaatgtatgaatgaatgaacatgactttcagatgtcctttatggcttttctcattgaagtatatgcttgttctttacctcttcaaaagaggtgcaactcattgagaatagggttgccaaatgttgcaaaaactaagcatagtcttacaaaactaaacatagctgagccatacaatctaacagttgcactccttggtaactacccaaatgaactgaaaacttacgtccacacaaaaacttgtatgccagtgtttaaccagctttatctatcattgcaaaaatttggaagcaactaatatatccttcaatgggtgagtgcataaataaattatggtacattcatacaatggaatactattcagaaattataagaaatgatctagcaagccacaaaatgatcaagaggaacttgaaatacatattgctaagtgaaagaagccaatctgaagaggctgcagcctgtatgattcctgctatatagatgacatctggggtctggaggactgtggccctcttctcacagctcctctagacagtgccccagtggggactctctgtggggacttcaaccccacatttcccttccacactgccctagcagaggtttccatgagggctatgcccctgcagcagacttctgcctggacatccaggtgtttccatacattctctaaaatctaggtggaggttcccaaactgcaattcttgacttctgtgtacccacgggaccaacaccacatgtaagctgccaaggcttggggcttgcaccaagcaacagcctgagctataccttggccccttgtagccacagctggagctgaagcagctggaactcagggcaccatgtcctaaggctgcatagagccggggggccctgggccaggcccaggaaaccawttttccctcctaggcctttgggcctgtgatgggaggggctgccgtgcaggtctctgacatgccctggagacattttccccattgtcttggtggttagcatttggctccttgttacttatgcaaatttctgcagccagcttgaatttctccccagaaaatgggtttttcttttctattgcatcatcaggctgcaaattttcgaaactcttatgctttgcttcctcttgaaggttttgctgcttagaagtttcttccaccagataccctaaatcatctttctcaagttcaaagtcccacagatctctagggcaggggcaaaatgctaccagtctgtttgctaaagcacagcaagagtcaactttatttcagttcccaacaaattcctcatctccatctaagaccacctcagcctaacttcactgtccatatcattatcagcattttggtcaaagccattcaacaagtctctaggaagtttcaaactttcaaactttctaagtttcaaagtttctgagccctctgtctctaggaagttccaaactttcccagattttcctgtcttcttctgagccctccaaatggctccaacctttgcctattactcagttccaaagttgcttccgcattttcgggtatccttatagcagcacccaactctactggtatcaatttattgtattagtgcattctcaccctgctataaggacataactgagactgggtaatttataaatgaaagaggtttaattgactcagtttcgcagggctggggaggcctcaggaaacttacaatcattgtggaaggggaagcaaacatgtcattcttcacatggcagcagcaaggagaattgcagagcgaagtgggggatgccccttataaaaccatcagctcgtgtgcgaactcactattacgagaacagcatgggggtaacagtccccatgattcaattacctcccactgggtccctcccaccacacatgggtattatattcccataactacaattcaagatgagatttgggtaaggacacagccaaaccatatcatgctctaacctctaccttacgctgtagtggaggaaatgtggtgcctatttcagggatgtgacagtaagagccagatacatgaactggcatgcccaaggtaacatagagttagagagggaggggaatgaaaaactaacaatttccaagctctaaatatgcactggcactggaagaagtacttttttttaatgatatgaaatatttatatcatatacctaatacgtgtcaacacacgatccattgggatagcattttgatttattcattttacaattgagagaactgaaaatcagagaattaacgcaaattctctcaaaatcacagaactggtaggtggcagggctgacattcaatgccaaattcaagttctttccaataagcgcagttctgtcttgagaggtgtggctaagagcagaacccagatgcctatgaggagaagctggaagtccttctttaaggtcactttgcctttgcaacatgagagatggttcagggctctcctatccaggaggtgtttgtaaaacagcggacatccatttgtgcaatgcatttagactctgccctcccagaagtctggatgatgggcaagaagcgctaaggctcatttctcatccaggcaatcatggggaatgagtgtaaacagcctcaattcacaggtgcacctgaatgtgggatatggcatcaatgtttaagcccttttaaatttcttcacttgcagagctcaataaagattacattactggaaaggaaaggaaatcacctgcactgaaatatgacatgagggtggaaaagaatctaaatgtctgctggggacaaagacctcctctggtgctgctacacacacaggcaaatttccagcctcatgggtgcaaaatggccatatccagtcccctactattcaggtggtttttagcccacacaaagttttataaaaagttaagtcctaatgcaaaatcttggaaagttcacatacatatctagagttccagcctcttgaggaaagtggaagagctggcaacactgggtcccacattcctcacatgtgccccaaggcagcataggcacccaaccctgggccactgtacccacttacattacctggtatgcctcagagtttgtgaacctaccctagcctaaaaggaaggtcctagcttattcaaagctttgaaaaaaatcctgctgagaaaagactgaaggaatgctttttggcaccatctcctgtttcattagccacagctgccttactatgtatttggaccaataaaattgactctcggagaaagcaaaccaatgaaattcataggcaatgaggagagctcaatgaaaaagtgaggggaaaatgatttaaaaagatacacttgggtggcagagtagggaagtggccctttagaaactgcatataatctgtgccaggatttctcagcctaggcactagcgatatttggggccagataacttttcagtggagaatagtcctgtgcttcgtaggatgtttagcagcattccctggcctttatctactagatgccagagcaccccaccactgttgtgaccacacacgatgtctctggacatcaccaaatgtcctccagggactaaacttactccagttgagaaccactggtctatgtataactcaacttagagagcagctatgaacccaaatcatgtaaatgtgaacaaaacattcacattttcccacttgtcacaatgctcaagttatactttatctcagtttctgttttaaacagaacaatgtaaaagtgtttacaaattatgaagcctttatgtatcacactgactttgggacacaatagcaattttctttaatttacgaagaaatgggagtctgcatataattatctttctaccaaatttctaggactacagatgggggaataagccaagtttcttgaggaaatagccttgtatttctttatatgaactgtttttttctccttgggtggggcaggatcaggtatggaacaccctctgatagtcaacagttgtatgaatggatgtttagcatttagagaagactcaggagacattgtggttctttccttttatttagaggactaaacatggtggatgaagagacttactggccagccctccatgggccagaatgaaaattcaggaagatatcataggaagacagtctagccagcaaatggaaccagtggaatgagctgcctcaaaacaaagcatcattcattgtggcttccatttggttgtattctgtcttgcacccctccactttgtgagaaaccaggtcaggagcagccctatgcaaaaagctaaggggtaagtctccagctgaaagctatactagtgagcctgggaactgctcctccagccccaatcaagccctaagatgactgcagccccatctttgcttggctgcaacttcacaggagcccctgaaccagaacacccaagctaagctattcacagaagctgttttacaagataaatgtttgttatttgaaaaataaaaataaaaagataagaaaagatgcccagttaaatgcaatgtggtatcctgaataggattctggaagagacaaataacattagtgtggaaactggtgaaatctgagtgaagtctatagttttgttgatagcaatgcaccaatgttggtttcttagctgtgataaatgtaccaaggtaatacatttatggtattaatgttaccataatagcattgaggttatgttattatgttaacagggcaaactgggtaaggggcataagggaactctatactatcttcataactctctgtaattctaaaattattccaaaattaaaaaaaaataagtcctttctcccaggcaccagatgtattcaagcaaaggttggaaactcacttatcaagcatgtgagaaaatggaggcctgtattgctcactgaagtgctccacagaactgaaagctcagtttagtgacaagaagggaggtgactcacaagccaggctgaaactagtgaaataatctcctatttgcatctccttgatctgaaagaaaacatgtgcctaagctgacatgaaacatctattatgtttgccattctggtggagcctgtttgctggaaagggagtggacagctaacaagatggaccagatttgtttttatggggctggtgattttttcataggtggcttattaggttgttgtaagattctaaatcttaggttctctaaatcctttttctgcttaagttatccagacagtatttttcatttgcattcatgaacaccgattatttgattagtacagaaatctatttttaagctccaatgcctattctgtaaaccaaaatattgtttttaaaataaaatataacatctctttacatatatatgtacatataaatgtgaattgagttatatgatctgtggatatcctgtaaaaaggtttagtaataccatattttgtcctttattaaaactaaaattcattatttcatctcattatttctcactttgagggcttttctttgtggctttcaagccacagacctcccaaaaaataaggcaagagaaagactgaaccagatattttatttccagtttggaacaggaggtttgttaaagaagtaacaatattattaatgacccctggcacttgggagccattcattgtgcctgtactccatgtttggtgctttctaatgattaatcccagcaacataagttaaattggcccagtaagtttacataggaaaacaggtgttacctgaggacaagtcaggctggacaaaggatccacttactgccattgccaccccgagtggaatgaattcaaaattgctccttctactttgagttgcctgcttcatattcaaagtctatcccaagaaatggaatggatagcagctctgatagaaaagaggaatagtaatctaggaaagcgaaaccagtgggaccaggaaagggaaaacagtgggaccaatgcaatgctctggtttaagagttaacctgggatgaatcccagagatttaggaagggagccaaaacagggatctcttccctattcttaagcaagtattctctgcccagggatgttgtaccatagaacatgatgactattcttggcttgggaatattatttacaatataatagttatctgtttaaatgtcatcttccatacactgatctatccatccacccatccaccctttgattgatcaataggtgagattctgagctaggtgctatgaacccagatgaatgaatgctatctctgcctttgaaaaattcaaaattcagtgctagagatagacatgtggaaacctaattaaagcaaaatgaggccgggcatggtggctcgtatctgtaatcccagcactttgggacaccgaggcaggtggatcccttgagctaagaagtttgagaccatcctgggcaacgtgctgaaatcctgtctgtactaaaaatacaaaaattagctgggcatggtggcacgtgcctgtagtcccagctactgggtggggtggggtggggtggggggctgaggcagggggatcgcctgagccttgggaggttgaggctgcagtgagctatgatcgtgtcactgcactccagccggagcgacagagtagtgtcactgcactccagcctgggcgacaaaaaaaaaaaaaaaagcaatatgaagaaatgcttcagtgaggagaagacatttactaggtgccaggacaaaagagagaagactgcttccagttctgcttgcaaaggctaatgtttgagttcaaccttaagggatgaagttatccctctctggggtctttgaattttggtgggggtttccaccagcttagtttaggacatccttcctttctgattaccctatcccttttaatgtttgattccttataatccaaccctttaccaactaagcattctattggtgaaaaagatgagaaaattgcaaattcaggagtggattgctagtttcttaagtgggaaccagggttcaagagaggggaaaataataattgtggaagaaaacaatctatatggaaaataatggaaaacgtattcaagcccaaactggtcccatcattcaggcaatgctggatacgtgtgtgtgtgtgtgtgtgtgtgtgtgtgtgtgtgtgtgtgtgcgcgtgtgtcatcttcaagaaatctttcataccctagattgttggttatttaaccaaactcatgttatcaaagtttttgcttattaacttatacttaacagttcttccactaactttaattgaaatasacaaaggcagataggaacagggtgattggttcacttttgttggtataagtcccagtgaattaaacactttctttttcctgctagcactttgtgggctaggatttccaaaatctctttccaaagtgtctatgtttccctggagaagaaaatgttttatggtattcttaagcaatagcgatgcctctccttagggctgaggctccccaaagtacttgtgaaatgtactaatccccacagtttacatgttgaagtggtggtgaaattatcaaaggtgtggtcagaaaataagaacattctgtgagtctctcactgctgtagagaaagtcgactcttggaggtcaccatgccttcagttaaacactaagaagaaacctattctgttttgtgtaaattattctggcagggtgattagttctaaaatttttctatatcatcttcaagaggagaaaaaaaacttctggatcctcgaacctcaaagcaagtggttttctattacagaaaaatcattaagatatttgatttgttgaacacgtctccttgttccgtcaaaacatgaggtagggaagctgatctcatggtttagatgccatagctttaaaggctcaactatggtttttccttaactaggtgttctttgtaatcactgcttgctgtaagaactgctaatgatcaaattatgccctagaaggatcttttacttgctktcatttttccacagtcaagttatatgattttttttaaagaagatttttttttcaaagctttcagcacatgtctcaaaggggcagctctgctgctgacttttcatgatctaggagctagtatgtccttccaggctcctgaatttgtatctttcattgaacagtccttaaatggaggacaatacttttagtttagtctaggtaggcactgtatttgtagagacaggagtttccaaatatcggggcagggaaaatggcttttgccaagtcatttttttaagctacatttcattcctggagtgtaaatgaaaggaagtaggcaggagaacaaaaatacaaaaatcatttttccctaataaatattctaggtggttaactcaagaaaattaaaacccaaattttgggagtcttatcattacttgttaaagtcttggaaatgcctagaatttcctgccagttgctcccatgaaaacagctctctctgattcagtacctgaaaagatgatgcaattaaatgaaactattatactacctatccttttcttatccattccatgtttttgattatcctttgagccattcaaaacaattccatatgctatggaaacactatatacataaatgtgctatgattgaatttttaatgtatctcatttaatttttcaaatatttattgtgctgtaggtatgtataaggcactgtgctagacgctaaagcaaataaaataagaatggtttcctctctatcacttgtctgcaatggcagaagatgacaatgttcttccgtataccagtagtttttaatctaaatccatctctatcctgctcccctccacctactcactgcaattcttccttgctccattttgtcagttgctcatcctccatgcaactcatcctgggatgagttatcaccccaaactcgggaaatgaacccttagttcaagccaatcccagtgatttatttctacttcccagtattgatttgggcactggcaggtgttgcaattctaggacatgagaagggaatattgctaacttctcagtcatcaaacaagatagtaatagtgaaagtaataacttgtaawgaagattgacttattaaagttacccatttaatgcataactcatgtgtctatagactgcatggtggcatcagttgtttaaaccagtcataaaaatattgacttttattttttgcttaatgccaccaaaggaactcatctcaccttgaaaaaatatttggtcacatatgcagtcatgtgccacataacaatgctttggtcaacaggccatatataagacagtggtctgaaaagattataatggaggtgcttcatacagctatactattttttatcttttatgcaatatttctactatgccttttctatgtttagatacatagatacctaccattgcattccaattacctacagtgttcagtacaggaacatgctgtataggtttatagcctaggagcagtaggctctaccatatcgcctaggtgtgtagtaggctatgccatctaggtttgtgtaagtatactctattaagttttgcacactgtcaaaatcatctaatgatgcatttctcagtatgaatctgtcattaagcaatgcatgactgtaatataagcactaaaacatctaagaataacaaaggtctgatccttaaaaagcacacaattactacatcatgaaattaaaataatgaagaaattgaaatgaacaggaatagtatagttgaacaactgcataaaaaataacaatgaattactataatattaatttcaaattaggggttggcaagctttttttctgtaaagatccagagaataaatacttttgatcttgtgggccataaggtctctgtcaaaactactcaactctgccactgtagcactaaagcagtcacaggcaatacagaaagaaatggacatggctgggttttaataaaaatataaaaacaggcaatggactggctatggcccatgagcttagtttgcccacatctatcttaagtgaaaacctgttaaactactcttccagagctttccatatgtaaagctctagtaacacccactagttgaatttttaagtaatcttgagggcttgattccaaatgacctaaaaaggctgattggttaaaaaatacactcagcattaaatttcaacgtatacgtatttgcttttattttgcccatggggaaaccaagaaaaaaggcaaaatgttcatgtttgaaggatgggatattcttcataattatcaagtttattttgggctatgatcccaaaagagaatatagtgcagtcttgaaatctttgaaaggtgccagaatatttcagaaactgcagtgacagaagttttggtcaagatgccaaagtcttgtgcaatagtggttgctgctccaacaagacatacgaatatgtataaatatgaccagttgagacaagaccttggatagaaaacgatattgtctgagaacataaaggaagtaatttgtgaataccatggtacaaagcacatggcttaaagaatcccacacctgcttggcaccaacatagcatcatatagtggcagcagacacttgagaactttacatggtaaaaaccctggggtgctaggaagagcatccaagaagaaaattacaaaataacctgcaggataatgtctttgtcattcttggcttttaccagagtgggtggatgaggcagcttctatctaaagggtcaccaaagtcaacttggacagatcatctccactgctctatcttttaatataattgatgcatctgtgttttctctgtctattgactaggaactactcgatgataggaactccttttgacatagtgttgaatcctctatcgcagctagaccttaaagccccacatatgtatctccttcaggttgcataacccttggtattatgaggaaagagctgtgaggccttgtaggaagccctctgggtgtcactccctcagtttggctctagagagagaaggcataagatactcaggtatggctctagccttaggttcatcaccatggccctatggaaaaagaagttcccgtccaccttatcaaggccctgagagccacagcaaagatcaactaatttttccatactgatatttttgttgcttcctttgtgattccctgttctctattccatataccttccaagactgtgttattgaatagtggtttataacctattaataaatcaagaaaattcagtggatcatgaaaacatattttgaaaatgaaagagaatcagatagaagaggataggagagaatattataaagaatatccaaatgtatctctgataaagataagctgtttggcttcatgcatttcctgggctgagatgtaaaatgtacttctcactgcagataggttgtggacaaaaaatctgcaacctgctgttctaagacaagtaaacaaataaaagtctgtggtgcattctgagaacaggctgcaaactaaatggatttcttcttttatatgaaatagatagtatctcatataaaatggctttgatagtaagatcagtagacaatagggagccttgggatttttgtttgctttttgtttttccaacaaaggagtagccactgtggttgaagtttcactctggtgattttacgtgtggtagatagaatagaggagaagccctgaattgaggaaagtaggtaggggttctatgactataattaaaatcaagcataatgatgcagtgacatagggttgaggggagatacaggacaaagtgatatggtgatggcaaaaatgacaatgatgatgatgatgatggtgatggataagttttatggagagtatataagatgtcaggaagtgatttaagctcattatggttattatttcatttaaatctcacatcaaccctatgagaccatcaatgaaagctggaaactgagcatgaagtgaaggagtaaggaagtgttgaggttgttttaaaatcattactggagacactggggacagtgggagaaaggtgatcgatgctctttagagatatggggaagagtgagagaaagagcttaatttaaaagcttattattaaataatatgcctgcacgcatccattcacatctcaaagatttgctgagggccacttgtgtattaggcagtacagatgatgttccagatcaaagaccaataagacgtagccctactccatgggaagtcaccatcctttgtgtgaagatcacagaaaaggtgattgtggacacacagaaggtacaatcagctccacagttcacagaatagagacctttgttgagggcctctgggcacagtggtctcattattccgtgatcatccctatttggtggtgtttgcttcccattggcatttctacctacagtggattttgtggattctgcaccaggtttcaaccttatttttacttacacaaaaggctttggcagacagttctagcacatcacctcttcaactgggcattgccagaaagaataacagaaataggacagttaaatttttctgtcaagggttgttatataaacacccaatctcaatttccttgcctaccaggttacttttattttctaaatcaacatttaaatcacaaactgaagacagctgcagtgttggcctagcaagaatgtaattttccttatttcattgagttgtgtacttggatttgacattgcctaagggataatggcgagggatcattttataaggaagccatataattgagcaattttgaggcattggggtactcttttatgagactcttctccatattttcttaaaccatcagctattcctcattccatgatactgttttcaaaatgcataaacaaagcctttctcaattgtgatatcagaaatgaactgatacaagaagaaaacagctctaaagaaaacacaaatatgcatttctgtcttatagaaccattcaactgtaaatattggtttacaatataataaggttaagccataatgcctacactaacgtgctatagtgattgtggcaggaataagttattttctttcattttaccttagatcaggcatcagcaaatttttcctgtaaagggccagatagtaaacttctgagacaatgtcacaactactcaactctgacattgagtgaaaacaggcatagacgaattgtaaatgaatgagcatggctgtgtttcagtaagactttatttacaaagacagatggtaagcttggtttggccatggttcagttgctaacccctgattttgaccatttgtattaaaatgttaccaaaataatattaattggacctaacatactacttgatatacaaaaagtgctctttggatgtgttttaaataagtgaaaagtttgtgtagaccattaggttttgcttaatttcttgactattttttacatttgtttcctggttctgtgactaagagttggccatttacaaactagatagtctgatccaagagcctatgccaagagtagccatttgaataatcagatagtccatgcttgcctccatggagtaattttgggctcacagggaaaatgattggttcctgatttcaaccactaaaaatgtctccagattctcaaaagcattttcaaaagtctctttttgaaccatgttaagtttagaaggggtaacaaattaagctcatcagctattttatcttattagttattcagtgtgtacatctccaggctaaatggatatacaggagggaggagccacaagatgcaagaagcctgggtccctgaataacggcctggaagagagtttgcccttctcaccccattgccaacctgcattagatagtgcttcagtaagaaatatacttttgtagtggtgttaaggcactgagtggttagcctaccccaacaaatacaagtatgtatctgtgagatacagtcttagaagtagaatggttgggccatttaaaatttagaaaaatgcaagaacccaaaagcaaatgcaataaaaagaaagataaatagctgggacttaattaaaccaaagagcttttgcacaccaaaaggaaaagtcagcagaataaacagacaacccacagagtgggacaaaatcttcacaatctatacaattgacaaagtacgaatatacagaatctacaacaaactcaaacacattagcaagaaaaaaacaaacaatcccatcaaaaagtgggctaaggacacgaatagaaaattctcaaaagcagatatacaaatggacaacaaacatataaaaaatgctcaacatcactaatgatcagggaaatgcaaatcaaaatcacaatgtgataccaccttactcctgcaagaatggccataatcaaaaaatcaaaaaataatagatgttggtgtggatgcggtgaacagggaacacttctacactgctggtgggaatgtaaactagtacagctgctatagaaaacagggtggagagtccttaaagaactaaaagtagaacttccatttgacccagtaatctcgctactgggcatttactcagaggaaaagaagtcattatacagaaaagatacttgcacacacatgtttacagccacacaattcgcaactgcaaaaatgtggaaccaacccaaatgcccatcactcaatgagtggataaagaaactgtggtatatatataagtatgatggaatactactcagccataagaaggaatgaattaatggcattaacagcgacctggatgggattggagactattattctaagtgaagtaactcaggaatggaaaactagacattgtatgttctcactaataggtgggagctaagctatgaggatgcaaaggcataagaatgacacaatagacttcagggactcagggagaaagggtgggaaaggggtgagggataaaaaactatgaattgtgytcagtgtatactgcttgggtgatggctgcaccaaaatctcacagatcaccactaaagaacttattcgtgtaaccaaataccacctgttcctaaaaaaccatggaaataataaataaataaatacaatttagacaaatgttgccaaattgccttgcaccctgttgcaacaatttacacctctaccaacagtgtatgagagtgtttgtttccccacgaagtgtatcatccaacttttggagccatgccactctgagagaaaaaaaaaatctccttggtgtttaggttgcatttctttaatgaatgtgagggagagcatcttttcaaatctatttataccacttgtatttttctgtgagccacctgtaatttgtctatattttagattttctttttatattaatttgtaataaagttttatgcaatagagaagttagcctttagtttgtcaaatgtgctataaagtttagttatttgcttatctgtcagagataattctatttttttaaaatgtagtgaaacttgttcctctctttgtttatgttttctgggtaggccttccctagtgtaaaaaaatatatatctacctatgttttctgctggtgcatcatttatagtttcattttttaatctttaaatctttcttccatatcaatttattattttcttaatgatgattgtctcattatctcaaatacaataataacccatctttttccctttacaaaaataccgtatttatcacgtaataaattttcatatgtattttggttcatttttaattcttcagttttgtgacacattttaataaatggacagggttaatctccattttatctctttatcagatttcccctgactaccttcacttaattattttcccagatgatgtttagattaatttagtaaaatcatcaaaaagaaaaattctgttggtactttattttggaatcacattcagcttatagataattaatgacaaaatttacagctttatattattgaattacttcctaatttcctttcttatccagttgagactctgtgttgtgggattagaatcattcctttggatactgtattagcttcctagtgctgctataactaatgacaagagacttagtgtcttaaacaactcaaatttatcatcttacagttctggaggccagaaatctgaaatgggtctcgctgggctaaaattgaggtgtcagcagagctttgttcctttctggaggccccttgggaagaatttgtccctttgacttttctagcttgtagaggccatctgcattccttggctcatggcccctttctccatctttgaagccggcaacattgcatctctctgaccatgcttccatagtcacatatctccctgattacagctgggagaatttctgcactttaaagtacccatgtgattagtttgagcccacctagacaatccaggataatctccctatctcaaggaccttaactcatcacgtttgcaaagttccttttggcctgtgaggtattatattcacaagttccagggatgtggatgtggccatcattgggggtccattattttgcctactacagatatattctcaactgccatgtccctcttcaccttcattgaattgaactagaaaagtcctaactcaaaagaggatatttggattaactaaggctggggaattaaaagtccgatatggtgtatttagcttaacagtgtttagataccaggatgtttatttttcatttaaaattcccagctactaacctcaaacggaccttttggcctgtcctgcaatcctgtgacattgctggcccgttagctgccctctcttccactcctctcctctttcctcaaacctccaggacctcttcgccatcctcacgcctagtggattaaattgcttcctattttgttggacgctgagacgcaatctggagtaaaatcccacgtgccctcccaccatcttctaactcacttgcatcagtgtccatataactaatgcccatctatcattatagtgtaaaagaaggtcaaaccctccacttgtgctctggatcccacccttgtggtctactctaggaaatcacccagtaatttcccaactcccccatcctcaattctttcctctctatggtaaattctggcagctgatgatcatgttataatagcattcatttgaaccctggaagcaccagactcacaggagagggttctacaaatagataaccacaaataaatccctatgatcatcctaatgtgacagagaacagaaatgtgagcttgactatgtgtccattttcaytgtatcatgattttcattatatcctattaggtttggcatcatttctttaggctttaggtcctggctacagtatttattttcctgtgaaaattattcacacagtgaatctgaccctgttgagaacctccatttgaaggtttgcatggggatcaagtggccacatttagaccaaagctactgtcatagagcttgccaccagccacacattccaaggatctcagtaaatatttgatgtctatattcatatgcccaattcagtagcttcagaaaccctcatgcgatgcctgtttctttcaccagccacacaattccctctctcctctataaatgagaaaattatttgtaaatcattagttcctattttgacagaaaatatgaaaataactgctgtggcctgggaatatcttcaaacatttcgatagcacaaatctttctctggatgtgcggataaccacacagcctcagaaataattaatggagacagagcctctagtagacaagttttataaaattgtttttggtaaaggttatttgtttagtggactctttaacaagcaggaacaaagaaaaaaatcaactggatttaaaaacaaagccacagagagtatctgttccctgatatcttatctgatgtgcattcaaaccaagtttcaaaaacttttcaaagtcatcattctcttcactacaaattaagtttgctaacaatattgccatttttttttccttaggaatgaaaagaatgtctgtgcttattaaagggagacaaaactcttggcccgggccccacatgggccactttgtgagttatgttggagggagaacaggcctcatctccaccctacaaccaaaccaataccaggtaaggcaggagggcgtttctcaaggataagagcgacacggcctgacagtcactagtattcatttttcacaattgcctaagtgattttcttcttatttgagctgagggtctctatgtgtgagattagcatgaaaaaataaaacagggtggggatttcctcttggaaacaacatgctgtggttgtggtagtgaacaaaccgtgacaagaaagccaaaggtgcaaggcatatgccagtgaaatatgcatgtcttgtcagcccattggccttgtctatctctctcttctgaactctgtcataacctccaatggagtctcaggttctgcttcaagaaaaaacgtggccctaagactcactatccaaagaaaaactctggtcagtgtttttgtgctactctttctggtcaaagaactgagcctcctaccgcagaggcaagtcgcccaagctcacaggtgtgaggagtgacaggatgagttcacaagtcctagtctttagacctccaagccagcattctttctgttagccacagctgagccaagagaactgcaccactggcactgtgggtgacagaatgtgaatgtatgtgtgtacagcaaggtaggtcaacttcagcacatggggcctgataatttttgttgcagggggctgtcctatttattatagggtgttggtcagcatcctcagcctttacccactagatgctaggagcatccatcccctaagctgcaaaaaccaaaagtatatccagacattgccagatgtccccagggcatggggagcaaaatcaaccctgcttgagaaccacctatttgtgtgtatatgtgtatacatatatatgcacatatgttgtgtatatatatatgaactatttatgaataaatattcatgaagcatcccctcgacctcctccaaaagaaaacaaagtagaagagaagttttgcagataccaaaatcctccgtggaaatgttctagtttctagaagcttcctatccctcttctgctttcctttaagtttcaggcaccctgcccaatgttgcttttcatggcagatttactttatgtgtataacatcatagtttttcattctgcctcaaagtagctgtctgctacatactaatacaaattaaaaagtgcctttataggccaggtgcagtggctcacgcctgtaatcccagcacagcactttgggaggctgaggcaggcagatcacaaggtcaagggattgaggctatcctggccaacatggtgaaaccttgtctctactataaacacaaaaattagctgggcgtggtggtgtgcacctataatcccagctacttgggaggctgaggtaggagaatcacttgaacccaggaggtggaggttgcagtgagctgaggttgtgccactgcactccagcctggcaacagagcgagactccatctcaaaaaaaaaaaaaaagtgcctttatagacaacagtaaacatacagagacaaagttttatggattcaaggaattcaagtacatgtgtctcatctttactggaatcaggatctgtttaaaaaacaaacatcagccaatcaggtgtgcactggctccagtgcaacatacaacacaccagctgaaaaactggctaaaaaggagttaggttcggtaaaatccctgattctgagttggcatagggtcaaacgacaagtttaacagagtgttaaggcattcttttcaaatgggttattttgaaaccaaactgagatagacacagcttttcttctgaccctttaagatgaccttcctgaaaattatttttaattggttgttcagaatccatatagactgttgatatacacacagctttcctttgtaatgctccaagttgaccttccctttaaataaatgtattacctgacatgcaaattgtccctcttgaacatgtccttcaaatggacactaatgccagccaacaaccaagaagctgtagtttccttcctgtgtgaatattaggtgtgagaagagttcacagctcacggctttggcagagccaatatttgacttgcagtgttccccggcagaaaggcagaagaggccttacctttgggaatggtgatctgacagctcaggtcacagtcctgttgcaactgataaaaagccacttcctgcagccgggccctctccagctctgagagactctggatggggactgacctcagccgtacactgcggcctgacatgctgttccaggtgaaatcaccctgtaggccaaaaaaaaaaaaaaaaaaaaaatcaagagttacagagttcacttacctctcacaaatctcatcctctcttagtaataaagtcaagcaaaccacctttgtgttccaaaattgggtctcaattcccaaagtcaaatcctcttttagttcactgtggattttctcagttagttgcaaatgtcaaaatctcaagtatctgctgggtcacatgatcttatctcattatgcatataggcctgaggaaactatgtagaaagatactgtgagggtcctacttcctcctttttatgggaacacatgggaacttctaacttttgtgaaacactgtgctgctgctaattgccatcacacacatcagatatagggggatgagtgtgtatggagagcctaccatgtgccagcggctgcaccaagggcattttttaaaattggcaaataaaaatcgtacatattcatggggcacatggtgatatttctatacatatggttattagatatatatttctaataattagtaactaatctcaaacacttattatttctttggttgctaacattcaatatcctccttctagctatttgagatcatatattactgttaaccatagtcaagggctttttagttaatccctccaacaaccttatgaagtggttaacattttttacctatctcatgtaaaatttaataatataatctagtataatatatgagaatatattataatagtaaagtttatacttatgacatattatatgaatagtatagtaacatataccaatataatatagatgatgaaactgagtcttgaggaggttaagtaattctccccaaatcataaaacttataagatttggaataaggactcaagctaagaatgtagggctttaaactctatgctaatattgtaaccactgaggttctatttgtagcactctcatgagttattgtgaacacaataagcttagagttatgatcaacaggaagatgttcagtatttatagagacatttgatgctaaaatactccacatcaaagagtcaaagcaaagatttccacaatcctaaaagtgtactcatgtgtacacatgcacacccttgcaggccactgagggtaaatggctccaccctcaatgcagacagtaagaaagtgacgtccaaagaaaaagtactttacaatcctctgaaacccagtgtctccttactaaagacttcttgtgaatctcatgtatcaggcatgctgcaacagatttgaggaggcagctactgttgctcaatgatcaagaaagaaaagttctatcagggaaggagaggtactggcccacgcagggactcattgcaataaatggaacacttaacagaatcccataagacttcaccatcttaaagaagtcactcgcctggacgtggtggctcacacctgtaatcccagcactttgggaggctgaggtgggtggatcacctgaggtcaggagttcaagaccagcctggccaacatggcaaaagcccgtctctactaaaaatacaaaattagccaggcatggtggcgcatgcctgtagtcccagctacttgggaggccgaggcaggagaatcgcttgaacctgggagggggaggttgcagtgagccaagatcacaccactgcattccagcctgggcaacaagagcaaaactctgtcttaaaaacataaaaaagaagtcactcaccttaaagaagggagacagaaagactggtcccagcaacaaagtgccatagcactttgtttcacactggtgacaaattcctgtctagtgtattcattccaaaagtgaatggcatgatgttaattctttgatattttccctctttatctgggatttcattcactcatttaatacatgaatatattatactctggtaggggcagaaaatgaacggggtaagtaaaaggaatggtgtgtgaaataatgataactgctaggaaggagaaaaaggcaaagaaggggaagtagaagaaaggaatttgcagttttagagacagcagccaggaaagacctcactgagaaggcaaaatttgagcaagtgttaaagaagttatggcttttagtttctttgccttgacatgtatgaattatatccagtggataatgatgaagactagcaggaacccaggaggagctcagggagggtgatgcaggaggggatgtggggagaggagtgagtgagcaaatctagtcaaagtgaggaggctgcagtcacattcagtgaacagaagaaaattcttctggggccagtgtattttgaattttttctttcttttatgtttttggtataaccagactaagaaaaaataggacatatagacattatggttggggactcaggccttgggtgtacccctcactcacaccctctaagcttagagaactacaaggaacactattggggaattttttttattattattttctcccagatagaaagtccccagatgagtttataaattttagatatcaagcttaggtacctacgggagctgactgttatttgaagtgtcaaaacagaattacatacctattctttaaaagcaatcaaagatgtgacctccaatgggcttaattatctgtagtaggggtttgacaatctttttctgtaaagaccacatagaaaatatatcaggctttgtgagccatgtgatctctgttacaactactcaactctggcttggtgggatgaaagcagccacagataatttataaatcagcgagtgtggccatatgccaataaaactttatttacaaaaacagcaggctggttttggctggcgggctagagtttcccaacctgtgaactatagcttatgactgaaataaagtaattcctagaagggacattttgttcttatttactaagtcctcctggttaattaattcaaacaatatttaataagcacagatgagatgctaagctctgtggtaggcttgggactattaagatgacaacacagtcctcgtcctcagagttaaccttcaggtaggaagaacacaaacaatccataaaacacagagattgtggtactagaagtaagtactaaatgcaatgaatgcctaggagacaaggctttgttatctatctggaggatcaaggaaagctttatagagaaggtagtgtttcaatggaggcttgaaagttgagtaagagggggcagggttcgcccagtagcaatgcaactttagcagcaggtgcaaaggcaaatgagtttgagaaaacaggcttgttcagggaattacaaggctggaaggaggaaaagggcaagaggtgaagccaagcagaagtcagggccagattctgtagggctgtctctgttggcaatgcaaaccagattagattttcctccatagacgatggctagtcattcaggaactttgagctagagaggaacatgagcagatttgaaatatagggaagatgactggaaacaagtttcctaaggaattaaaggggagagcaagtcaaagatgtggagatgagaaaagactccgtgctaagtgggatgctgattccaatttgaacagacacgggagaaacttagaaccacatagatgctagagaataaactggatgcagtgaggggaagagaaggggtaatctaggatgactcttgagtttctagcttcagcaactgggcagacagtaacactaatcaccaagatggggaatggcagagggaattatgtttgcagggggagaaggaagatcacccagttttggacatggtgaaaatggtattttcttttgaaaaaacagaattaaaacattactaagtctggcaaaacagaacctggccaatttatatttttcttgagctttgattttgtactctcaattaaaacagttccaacacaatcaaataatatatgttttttcaaactgtttacaaatgactacagttagcataataaaaagtaaagtgcgatgcttcaagtttactttagtccattatatattgcagcccacggttcttaacttcttggatttttaaacttctttgttatatttggaattgttaaccaaaagagagatctgaggttattttgttatggcagacccagtgaccaagacaatatctgtattttttgtttccttatttttactttttaaatttctgtgggttcatagtaggtttatatatttatggggtacatgagatgttttgatacaggcaggcaatgcataataatcatcatggagaatggggtatcygtcccctcaagcatttatcctttgaattacaaaccatccaattccactctttaagttattttaaaaatgtacagttaagttattgttgactatagtcaccctgttgtgctatcaaatggtaggtcttattcattaattctaattattttttgtagccattaactatccccacctcccctgatcccccacactgcccttccaagcctgtggtaaccgtccttctactctctatccatgagttcaattgctttgatttttagaacccacaaataggtaagaacatgcgatgtttgtctttctgtgcctggcttacttcacttagcatgacaatctccagtttcatccatgttgttgcaaatgacaggatctcattcttttttatggctgaataatactccattgtgtatatgtaccacattttctttgtccattttttttcctgaagttccctaatgattctcccatgcagccagggttgagaaccactgagctcaaggcttgaatagattctagtttgagtgtgcatccacattgttcagttaggctataataagtgctatgtagtaagtctagaaaatccaagaagtcctccattgtcaaagaaagatacaaatctaccaagggaaagaaagctatttctatgacagtcataatagtaaggacgttactttctgaaactgagagtaagcatgaccctgctttcttttattaaacaaatgaagtgatgacataatccttattttttcactcaacaaaaaaattaacttgaacctgacactctcagaagccactcttagccactacaatattctggctggttgttgcaagcttgtgagttgcccctctgcccacattttgttctgtggaggtagagagaagtacagtaaggcgtaatcaggtggaaggtgtggttggtagaataatgtctcccctaaagatgtccatacccgaatcccaggaacctgtgagtatgttattttacatggtaaaagggactttgcagatgctattaatttcagattattgagatggggagattattctgaattatccaggcgagtgcaatgtcatcacaaggagagaggtagaggcagaagcgagacaaaaatgtgataatggaagcagaggtgggagagagaaagatttgaaagagcttggctgctagctttacagatggaaaaaggagccacaagacaagaaatgcacacagcttctagtgcaggaaaagccaaggattctctcctggagcctccagaaggaacatggcctttgattttagcccagtgaggcccacatgagacttatgtaagtttgtgttgtaagtttgtgataatttgttatggcagcaataggaaatgaattcaagagtaagggggagcattagaaaaggaagttggtggggtgaagggcatgctcgcagacacttaaaaaagtaggttttgaccttccatcagattcttatctccctgctacctgatgctaaggtgctgcttcatactacaggtaccatcaccaatgatttgtgctggagaggtcccaagactggaattctgaaatcacttttcccataaaatagaattatagaaaattacatatagtaaatactttacgctctgtgggtcttatggtctctgccacagttactcaacttttgccattgtagggcaaaaacagccatagaccctacataaacaaatattccaaaaattttatctatgacatgaaaagtcaaggctcatataattttatgtgtacaaaatatccttccttcaaatttttttcaactatttagaaatgtaaacataattcttagcttgcaagtcatacaaaaacgggcatcaggctgcttttggcccactggctgttgtttgccaacccctgatatggagattagggtcatgtagtgccctacacatatttgtgtagcatctacagccatattccagcaacccagtcctagggccttgcattatcagccatatacaacagctagattcaggagggcaagacccttgtctggcttattcattttgatgttctcggtatctaaggcagtacctggcacttaacagccactgaataaatatttgtcaatctagggactaatgaaccagccccatcatgagttaaataaattggaaacctaaccaacccatacaatgttgtatatatgtgggaaactgtattctggattcgaataaaccattaagagacagtcttttgaaatagcctgttgatamgccaagaaaaacccaygccagtacatgaggggagaaaataaatgtgataataggtgacgcggggaagagttaatccgtgatacctatacccacccatcagacttcataggagcagtaagacatgaacacaaaggtcatagtctccctttgactctcatggcatggaccataaagtgataaacaagcacccaggaagggcaccaaagcctaccagcacagtctagaatatgtttctggtggtttctcaaggctcacatgcatggtccagaccagcatttttctttggtgactgtttatcttataaatgaatgactcatttgaaggctttctgaatctagtcttttgagtgatcatcatggaatttttttaaggattgaaaatggatgatttcaaatttgtttagattttataaatgtagatgaaattgaaattcatccaatgtctctggatagactaaagaccttggcagttgtaaaaacatctttctattctagggtactatgtgacagcattaataaagggcagcaatatgataaaatgatataggataatggtccttggtggggtaatgttgcccccagtgagcatttagcaatgtctgaagacatttttggttgttataactggggcagcgtttgatactggcagctagaagatagaggctagggatgctgctaagcaccttataatgcacaggactactgcccaaaatcaacaactatctggatcaacttgtctacagtgcagaagttgagaaaccttggtttagcataaataagtctgctgttaagcccagattacatataatctccttaaaatgatggtgctggaaatattaacaattatttatatattttgtttatcataaaaatatgtactatatattcgtttatatatcatgcattactatgtgtattttacatgtatttttctacgtattatacacataaacagaatcatagggcttattttaagctagtattaataagtacaaacactacaaacctaattaaaagaagcaaaccaaaaaaagtttgaaaacaatagagtcttgattaactggagaacaactcaccaaaagtgttaactaaagagatttccttcccaccagaagtatatgtctctatgtttagaaaaaaagaagcaaaagacaaactaaaacccaaacaatctaatatctatgctttattcagaaagtcattcttttgagctaagttgcacctttacagacttgattttcccatgaaataaaattgattgaaataattttggttttgttctacaccacattgttttattacatccttggggctagtctctaactgcagcatctctttaatctcatccaactgtaaactccccagggccaaacaaggggtgaggcagggctgttcaaaatgtggtttgtggacccaaggcatcggaatcacgtgggcagaatgatcattgttaaacacgtaggttcctttggctctaaggtagatttagagaattagagtcacagggaataggtcccaagcacctccattataaagcagcatccccagatgagtcttactttttgcataataaaagttgagtctcactggcatggtggtgaagacttggattcagatagatggcagttctttggtaagattcagaaaatctctgatcatcggttttctcattattaagatggagaaaagaacaagacttaactctcagtttgtagggataatatcagacaatacaaatgaatttcttgtggaaggcttataagctcccacaagacctgaataaatggaaatttaagttataattaatattaatcatcaccactctaaatttgcatcaccatctgatgtggtttggatgtttgtcccctccaaatctcatgttgaaatacaatcactaatgttggaggtggggcctggtgggaggtgtttgtgtcatgagggtggatccctcatgaatatcttggtgctgtccttgcaatagtgaattcttgctctgagttcatgtgagatatggttttttaaaagggcatggcacttcttccctctctctcttgcttctgctcttaccatgtgacaggctggttccctgttgccttccatcctgagtacaagttacccaagggcattactagaagctgagcagatgacaccaccatgcttcctgtatagcctgcagaactgtgaaccaattaaacctcttttcctttctttataaattacgcagtctcaggtatttttatggtgatacaagaaggacctaacacagcatcttaacttggaagtattagagacaccaaaaactcttaagaaatgtgtgctgaattacacagcaagttttacaaggtgataagagatagagaaggaggtagcacagggtgaggggaataggagtgctgcatgagctaccaggacagccttacagagaacatgatttttgcaccaacccttaaggaggtgagggaatgagccaggcaggttttgggagcccagcagcccaggcagagactggttgacataggtatagcatagcctggtggctaaaagcaaggggtggcaagctgggctgcctgagtttgagtcccagttttgccacttactagccagccatgtggctttttagcaagctacttacattccccatgccccattttcctcatctatgaaatggggatgatgacagggattttgctgatacaagctgactagccggggagccaagtactgcctactgattgttttcataaatcaagttttattgatttatgaaaaccacagccacactcattcattgttattttctgtggcagcctacaggccacaattgcagagttgagttgttgcaacagagactgcacagtccatgaagctgcccttccgtaaaggtaaccatctggccctttatggaaaaagtttgctgacccctggactggactaaaagtaaagacacatctatgattaggatctgccttttgccatcaccattttcctcctctcctaagattttgtctctgagaaacatcccagagagcctgtaaaaaaaaaaatcaaacaacataatttagcatattagaaaatatgcaaatgctagcatgaaatagaagtggttatctgcaaatggcctgttcacctgggttaccgataaactaaagaagtagaaatgaacattgtcaaacccagggctgggctaacaccatctaaaaaatcaaatgtcacttacatcttgtttccagtggaaagaacctttccagtggttagcatagaggggacatactggaagtcctcaagggcaaaaacgtcagagcaaaaggtcaatttcatttctgtgtagtcccagttgaattgtggacttttctaatggccatcaatttaattctcagytctaagcttctctcgagtcttggatgggaggaagaaggtaagatggcctgcacaaatctcagggttgcaaaaactggaaacactggcatgaattagaaatttcttaatgacagggccagcagctgatggttctacttgtctttctctaattaaatttagttcactgaaattagaacgacctccggagatagattagaccttgaagatactgctcacatttatagatggtccgctctctgctagttactgttctaagccttttatttatattatctcatttaattcttacaacaacctaaggactatgttaccatcattattcccatatttcagatgaagaaactgaggcacagaacttaagtaacttgccaagagcacacaccaattaagtggcagagttaggatttgaagccaggctttaggttctagaatttagactcataaccactatatgtatttcataacatttcatgataaaccaatccaaacctctaactttacaaatgagcaaagcagctgcagtggcataatgggatctgggacatcagggtcatgttcccctctttccaccaccaagccctttcattatgagacatacccttataataatgaaagccagacagtgtttaaaaattcagaggcttaaagtttcctcttttgtaaaagacagcacaagcacatccgatgtattattagccttatttaatatccaaactgttcccctaaacccatatttatcacagccacagcaactaaaatgttgcacccatattcaagaagttaagagggaaagataaaccactttaccctttcagacttcaaaacagcctgtgcccgaatcttttacagaaattagctcaattatgctgttctgttaatcatgacacaatcctttcctgcttgagtttgctcatttcaagctgccacatcattaatctaaaaataaggttctcataaatccatattgacacagacagtttttagctgtcacacatctcagacactgatcattccagttttcttcctaaatcacaagatggatgtgaaagaatcacaaaactttatcacaattattttctgaaaaagtagtgtaagtatagatatttatattgcttacccataaattataatcagccgcgtctttgctgtcctctctaatctaactgaactaagcttgcagtaggaagttgagtctgttttaaaaaaattatttttttggtaaaaaatgcatcctgaaatggcagatcatattgaatgtctgagaaatggcccagctggcatagctgtgactcccacgataccttttgttgccagagacctccgctactgtgaatcttgggaccaaaaatatgcaatcttttcatcggatcattgagaagttcctgtcctttcagaacagaggcaggctgtgtccctgagtaagtgcacaaatgagtgagtgcgtgtgtttgtatgcgtgtgtgcctgtgtgtgtgtgtgtgtgtgtgtgtgtgtgtgtgtgtgtgagagagagagagagagagagagggtgagagagagagagagttggggaggaggaaagaggggagggaagggacaaaaagaatgagagtattttgaagaaatatactcgagttagaaaaggattcctctaaaaaaaatcctcttttccacagggatctacaaacggtaattggattgtaactgtgcaaactgtccttattaggaatcaaccaaagaatgttggaagccactggtgaaacccctgagagcaagataaagcacataggatgccttctttgtttaggacaaattctcagttcttaaattatattttaaaactactgactccatttttctaacactagccacacacactaaaaagcaaaagttttcattctctttcacactgaagcataacacatgctctgtattttatcctctttgtgggacagcagtccttgagaagttgttcatttcctgaacagagggtgtggaggtcagagtgaatatacccacatggccatatctaagagggttcaggttggggtgggggttgggggtggcatccatgaagagcagagagaaaagggaagattaattccaatcgcgaattaccttgatctccatgcattccacatggcactgaaccaaatacaactcgaaaagacatctttgtttcccagtcaataggaagttatagttctctcatgggtctcaagtgaattccaacaaaagaatcactgtgattataatttacaaaccgggaaatgatttcatggaagatcttactgattcaaaattaaggactcggtatgcttttactaggattctgtgaaactaatcatgtaagccacacatagcctctgctgctgctgctgctaaggaaggaattttaaagcagtaaaatattccaggtggttttctttactagaatgattaaacttaaacagagattcagagtaaaatctacctgttactgcacatacctccaccaccactatcctaaaaactgatgttgaaaatacgcattattccagtagacagtcaacatggctcatactggatactcatcaatggaagttacatcctcatttaaagatatctaatatcttaatatcaatatatctaatatcttaatatattatttcacatgaaattgataaatatgtaattcattttttattattaggcaaatgatcctttagtttataaatagatgacagcaacatgtagttctgactgagcacttactaagtgtcaggcattgttttaggcattttatgggcactgacttatctaaccatcaaaataattcttagcagtaggttacattattatcctcatattacagatgaggaaacagaagcgcagaggagttaagtgacttgctcaaagattcacagctcataagtaatgcggctgtcatcccaaccactatgagcttacaaattaactggaagacaaaaccacagttcagagtcagtactagtaggagccatgttataagtatctaataaggaagagacagtgatgaaataagaatgtttacctaacactagagtggtctgttaaatcaattatttgatggagacatacactgtcaggtcaataaatgtttcgtaagaaggtgactaagtgaataatctcaaataatcccgagagacaacatcttgtgaaattcctagtctgttttaagagtggaagcaaggcaggccttaagaggaagtgcagaaataatggagaaggtgtgtatatttggtattctttggaaaatgcattcaaaccagaaaaacaaaacataaagataaggaatcctttttaagatttaaataacaactctttaagtaaaaccaataagagaccaaagagtcactgaaagagccttggaaataaatatcaggaagcaactaaaaggttccatctgtggaagagtttcgctaatcacaaaaagtgctgagagcacaatggtcatttttttcccatttaaccctccatatctaagcataccaagaaacaatttatagcctaagaatctatgccattaagcattcattccaccttcttcttggctcttattctggattatttctgtttatatcactggtgatattttgcacatttaaggcaaaaatatcatagaatcactgtcaaactttttgagtgaatacatttctgattacagtactcttttgcctaaaaccctttgatgtctcctccttagctccaggacaaagtccaaattccttagcctggtatccagtgcggtgtgcttttacttagatggaataaaatcaaatagccactacataatagtgaatgataacagtagaagtttactgagcatgtattaggtgctaagcacttcatgtgtgccatgtattcactgcctccaacaatttcattttatagaggaagtgatggaggcacagaaatggatggcgcacagtgaggaaaacactgactgctcatgaagcccgtagcccctttttcgtgggcattcagctagtctacatttcccagcctctcttgcagttaatagtggtcatatgactggagtctagctaatggaatgtcagaggaagtgacaagcttcatttctagccccagtccataaaaacctggagacagcatccaggcaacctgcatagccatgtgtggtagtcccaggagtggaccacatttttcagtgttctttgcctagtgtagtcccctgcccttcaagcccgcctggctctatgagttactttaaccaactgaatgtggcagaaggggatgccaagcccattctggacctgagacataagaaggcatggaaacttctgcttttgcattcataggacccttgagcccccatgacataggtgtagccactatgttgaagagaccacgtggagaggcaatatagccagcgtgaaaggtttagttgccccaatgtctcaacctaaatccagcccaccctacctccagctgaatgaaaggaagaagcagcccaggttcagaatcattgcttggagcacagctgtcccaccaattgtggccaatctaacagtatgaatgacaaatagacttatgttgtgaaatttggggatgtatctgatatagcagctgacctcactttcctgaacttcccatatgaacacagataataaatctaagcagcctgatctggagcccttgcgcttgaaactcctcctatacttctccccactgaacgacatcatgactcatttcgtcccttcctacattctcacttggaaacagagtagttgatcaactggatggtaaagtaaaaattgctctttatatattgttttgctgagcatgtagaaagtctttaatataaaagaagacaaatatatttctaatgacatccttcagattttgaataatatatagccaatggttagaaataggtaatgcttttatctttcaaaatcatgactgactcataaaatggcacagtgaaatttcatttagattatattcattactgataaaccttccattggtcctggtaaccttttttgagtgtagcatagagttcgcatgtaaggtcttaatattttttaagactatatataaaaatgcaaattgtgagagacattttagttcatctgctgccttacagtgctcagtgaaaatgtggtaccatcagtttaaccatcagactctatctttgtattgctcagaacttccaggggctaggtgataagccaatgtatattctctcattgctgccatttgcttccttaactgtagctgtccgtcctttccccattcctagcaccctgaccttggtctaattgctagcgtccttctgatgctactgtgacctatttgcacggagagaatgttttggatccttcagatctaaactctaccatcaaagcaaatctagtaactggaaagctatttaagaccatgaatctgaaacagtcaaaaccacaataaagaacaactaaaatttactgagtacttattgtctccatgaatacgctatcctctaggaggcaggcactagaattatctctattttgcagataagaaagttgaaacaaagagagcgtaaagcgtaaagagcttgccagaagtcacacaactggcaagtaaagagttggcactcaaacccaggcagtctgttttcaaatgcaataattttaacccctaggcaatatcacagcatgccagcaaccttttctttattcacttccttggaagacctataaacaaagtaagtatgacacagagcatccaacagagactggaaggcctctctgcaactgggagaattttggtaaatacatagatgacagctcagggctcaaagccctgtggaattgagacacagaaatatgcagaaacagaggcagggcaccaggatgaaacagagaaaagaaagccaatagatggggcaatgacctccaggaataaggagagggacaggtatttcatttaaagaaaaaaggaacagccatgttagaaaacctcctggatgccagatcctttacaagtagaactagccactctcagttttaggtaggggtgtaacaccatgaaagagatgttttaggaaagatgaatgaggccgagtggtgcagaactgataggaaggggataaagagaggaagcaaactgagtctacaatgtaaccggtaaacggaggctctacctgtggaatgaactgataagaagcgagtctaggcagcaataaaacaagctgactctaggaattctttctttatgagagtccctctctttttccaataaatatggatccccaraaaattaagcccaagattatagctggagaaatacctttgagtacagagtgtgaaatttgcatctcattttaggtgcccaggagggttgacctagagaaaagcattttatcttgattcttatggagaaatctgtatatcgctggttctaccacactgcagagaatggtacttattttgtagctgctccttctactcatgtagtgaggaacgctgagttataaggttggatgcttcaggtttcttgaaataagaaggaaactcagataagagggcactcattctaggtaagatgtcatgtgaactctttgtagggcaggtcatttattctgttatgggtatattcactgctcattaaacatggaatggatttcagagcaagattacctaaaagatacagggatgctgaagtactgtcacctcaaactgaagaacccaatcccaagtcagatatttacaaatcagcaggatataaaacaagccttaaggatagaagaatatcgtatttaggagcttgaaaactcttaggccaaacaaactaggcaaaataaaaaatgccaaagtgaattcctttccactttctcatttcaatgctatatttggtgacattgtgtttcatcaattgcactttggcactttgcaaaagtctcttctcagtggggttcttctctaatgagaaaggaaaacaatttcctcaaaattacatgcgacttcataaacatattaagttaataaattaattttggatatcatcaaatatatagacgttgcttctaatctgttgcctaaaatgtgagctgtggacaatgagcctctcggttttactgtaagataatttatcctattaaactcttttaataagtaattcaaaatctacatgaattgttgtaccacttcattctaagtggggaaaagcaagttattcatttttagttgcagtctggtagttaactcatctaaatcttgtagagtaaatgagcaagcaagctgctttaaataaaaatatatgcggctacatttctaggctgcagaaaaagtctagcattaatgatattttcagaatcatcttccaaagcaaaatgacctcagatacaagtggtgatacattttagaacaaatgtattctccaaggaccaacagttctctaagttcattgcacattataattacttgctgtagttttcaaaaatttttatgaccatgtccctctccccaagaacagcatggtccaatagacttttctataacaatggacatttttgttaacagtactaattgctaaggtggctactagccacccgtggctaatgagcacttgagatatggccagagaaactgaatattgaattggtaattgtatttaatgttaattgattcaaatttaaattaccacaggtggatagtggctactgtattggacagcacaggtatagaccaagtcaattagactgtctggggttggggctcagacaatgatatatttataaagctttccccaaaattctaaggtgcagtccaggttgagaaccattgtaatggccagagcttaatgaaactatcagggaagacaaattccttgaactttttccaggatccataacttttctccaaattccactaagaatttgtcatgtacctttgcttccctccctcctgcctccactcctcatttcttgcacccttccacatactcatgtgatgactgcactctccatatattccttcattgactgattctgccagatttctcccacaccgagagcataacgtgccctcatctcaaagctcagattctttttttcctttctcttccattgacagcagaaagaaaacttaacaatgctaccaattaagagattaagtctccaagcacatacatccataatttaaaattgtttttcacgtgcacaggcttgatccagatgtcactttccatgagctctgccatagatgtgatggggaatattttgaacagtagcacagttaagcagctttcatcttatctgttcattttgccactgtttcattcaaatgggatgcagtgttatagcacagtggttacagggaggactctccttctggctgcctgtgtttgaattcaagttcagcatataactagccatgtgagtatccaacgcttttaagcctcaattacctgctctgtaaagtggagataaaatagtcctgtagggaggagagagctatgcatgtaacacttatgataaatgaacgtgtcacatgcgctgatagacccaggttttgattgctttttccctacacccctccccaaacctcaccctttttttttggtaaataaagcaaatagcggggccaacttttgaaggagaaagtcatgaaatccctaaaagcatgttccaagtatttgataaattaacgtggcaatatgaagaccattttgaaaacagttacaaaaaaatcaattatatggtaatctgatttttaaaaattattaaaaatttttattttaatgagtcatttttcttgacttccatgccaccagttaatattaataggatggacaaggaagggtatgctgtaaacatagctacattttatttcatttgtaaaaaaaaaaaaccagtagactcagaattccagaattcagtgatatgaacataaagaacatgatgtccaatgttcaagtacataatcgctttgttgaccttttggtaattttaactgttgtaccctaacaacatgttcccatgtcattttcactcatgggcattactgatttgtgcacgttcacattttctacacagagttttgctgcttctttcttgttaagtatccatctatgggtagatttttttttttaacctcagaaactacaaaattacaacccattagcaacataaaaatttgtagtcaccacaactactaattagtggtgcacagtaaggattattcatcagtgactcacagcacagataaaataagctgagagctatgtcctggatctaaatccaaaagatttagatatgtggggaatgactatcatctcttgtacatatagtgtgtacccattattattccagtcccttatggtgtactcatggttttaatcattaaacaatcttaaaatgtgaggtttattaatatgcccattttatagatgaagaaatcaaagcacagggcagtcaagtaacttgtcccaggacacatattgcaagtggcatggctgaaattcaaactcagggaccttagtcctgagtttgtggtcttaaccactatcctatgctacttttctgcaccttgctctcctactcaagaaaattcatcaaaataactgtatgaggtggttctaggctcatctctaattctctctcatttagttttcttacaaatattctaaagtttgtaacttaattattataggtaataaattacttctaacacattgactgaggcatgccttgaccttgaggtggcaactgttgacttaaagcagggtcagcaaaggacagcctaaggcctatttttgtaatcaaattttattggaaaacaaccacacccactcatttacctattgtctgtggctgcttttccgatacaacagcaaagttgagtagttgcaacacagacagtatgatccgcaacacctaaaatgttttctatctgattctttacagaaaaagtttgccgaccccagatctggacccactgaaaagaaatcaccagatatatgacataggggatgacaatgttcacatttcatggtggagcatttcactatttcaaacagcaaaggaaccacattttttttctgtttctttttttaattaattttaagttccagggtacatgtgcaggatgtgcaggtttgttacataggtaaacatgtgacatggtggtttgctgtacctatcaacccatcacctaggtattaagcccagcatgtattagctatttatcctgatgctctccctcccccaaccccaccaccggacaggacccagtgtgtgttgctccccttcctgtgtccaggaaccacatgtttttaaaactatgtttgtgacatctctgtatgtatgagcagatgggtccacagagatcactcaatgtctaattttcttttacgcacataatgagaaaaagctcagggagaaaaagtgaaatcagtagcatggactttagtatttggtatgagctacttattaggaatcagcatttcttccaagtattctcgaaagaaaagacattcatactagagtgatgcctatcaaatccactatggccggcctgagaaacttgtaattaaaaactacaaacattatagatttgtctccatattaaatagatttaactatctctacatctatgtgtatctatatgtatctcttgactattatatatttattatatgatgaattatatatgtgacatatttctatcttatatagacaaatatttataataggtatgtgataatacacagtgggtaaagggtacgtatgcaaatgcatcttgctttaagtaaaccaattatttgaaaatacacacaataaaattaggggcaatgattctgtggttcaaatacatcagtatgggttccctgcagtgacccaggaaaactgaagcaaaatcatttttaacattgcttcctatgtctctcctactcacactcagaaagtcaccagtttctgtggatcccacctcattaaaaactgtcctttcctttaacacttcctctctgggaatgtccaccagcacttccacactcttgtaggctgtctctccctacaaagcaaaactcatcttgtcccttcccttttgaaagccatcattgaggctcctagctttccagatgaagttctcaactctgaggtgaaaacacaagatcgctcaagatctggccactgcttagctcttgggcttcaccaagcctcacttacttcacatcccttaatttcagccacatggaagagcccagaggacttcatggttagggtgaggggtgctctcagcccaaatggcttccccatgccttcctactcaccctgtaatgcttactgagcatcacctcctctgagaagccctgtcgtccccctacagggacattacaaatgaatcatcacattaacaagaaaatcataccatctaaaacacaaacaagtttactatggacctataaggaacaccaaaacatgaccaaaggaaattcaccttatgtttgttaaagaaggcgaatctgcttctttcaaggttccaaatgacctagacacttgagatgtctagacaatcacttgtgatgtctcattgagggaggaaagaggaggggtgggaatgtttaaatgtcagctatttttccagaaaactctaacgtcaccgatacgtccctcctatgtaaccatcacactcatctcccccygaccctgccccatctcagctattttcttgactcttatttaaacattggaaagctatttgattatctatatttgtgccttttctccctggctagactgtaggttctggaagaatagaaacagcactaacattttgtgcttttgtatatttgctggttgaaagaaaatttgaaggagagtagcaattctgtctatacagaaaatcatttctgtctattagcatggaaacaagaccagcagggaatatttatatttaggacatttattttaaagtagctaaaatcacttccagtaaaaatgcaaaaaaaagaaaatcttgcttcctgacttttagtattaagagacaaacatgtaaaagggaaaattgaaaagggagaaaccaacatgaagtatgacaccaaatgcaggtatgacgtgaaaacaagccatctgcacttactggttcacatctgattttctagctgccacttttcagatttatttttcaaaaatgttttctcctcaatatacgacttttaaaatgataaattacacagtatttcacagacctgtgtaaatacttttgctctgatgtatagaaaatcatgctttctctgagcaatgaagcatattgaaatttacattttcaaaaataaattatagtaaaataatagaagagcttggacataaaaatcatatgccataaaagttaccactttaaagtgtatagttctgtgtttctttttagtatactcatagatagtgtacaaccatcatcactgattccaaaacattttcatcacmccaaaaggaaagcccatacccagtcactccccattcccctctcaccccagcccctgggaaccactaatctactttctgtctctatggttttgcatgtttttgacatttaatataaaagtagaatcatataatatgtgggctttttgtgtctggtttctttcacttagcatgtttttggagttcatccaygttgtagcatgtgtcattacttcattcattcttatggcaggataatattcactgtatagatatactaaattttgcttgtccattcttcagttgatgggcatttgggttctttccacattttgactggtatgaataaagctgctgtgaatattcatacacactttgtgtgaacgtaggttttcaatgattttgggtatataactagaagtggaattgctggatcatatggtaactatgtagccaaaaacaaaaamaaaaaacgtagacaacatgactccaaatagcaagattcaaacacttattttagtgcaaaacttgttttccgcctcattccattcacatgagatatcaacaattacaagaaaactcatgcaatgtttccacttcatatagatcagccatcagagctttttccaagctgtgataaggaacacaatccttcagtttcttttgctttttacagtctgatgaatatgagtgtcttgaaaaatttagaggtttctagtattcttttttttttwaaaaaaaaattagccctgtaatggctataccacaaagagtagattaactaatttaatcatttatgtttatattttaactctaaagactaattgttgatatccagcatggcaattttacttgttaaagtacagttcagagtttagttcctttcagggagatattcttgcctatatcagaagagaagctaaaaagaatgctacacaaaatagatcaataggcttgctttaattactcttgtcctctttgattttattgcttactgggtgaggaaaagccagaagaatttaataccccttacaagatagtcattgcacatttcatgagttgctagggtcaaaagcagatgaacaaatgctgaacttcttcctggctctacagaacacgaccccacaccctccagggttgagaaatggaagaagccactaggataggtagtgcagaataatatctctcacccctaaggtttccacaccctgatttctggaacctgggaatgtgttaccttacatggcaaaagggactttgcccatatgattaagttaataaccttgagagggggacagaagtctagattatccaggtgggcccaacgtaaccacacaggcccttaaaataggacaacccctttcagcagaattcagagtttgaggaagatgtgactatagaataatgatctaagagatgtaatattgctggccttgaagctggaggaagggggccatgagctaaggagtgtgggtggttttagagcctccagaagaaatgcagctctgtcaacaccttgatttttgtccagtgcaacctgtgtcagatttctaacctacagcactttaagataataaatgtgtattgtttcatggcactaaatttatggtaatttgtcacagccatgatgacagattaattcaaaagaaatcagaatatttttatgcctgcaagggacacatacattatttaatgcaggattttccaagctgttccataatcaaatatatttgaaaaagttgtgcatggtagcttcaacttaagtagtcacaataaacaataagaataatagagaagtcctgcagaggggaaatcataactcggagtacctcctaaatayacttgctataatctcacctccttctattttttatttttttttaattttcagaccatctctccatatcactcgaattccccagaatatagttgggacatgctaaactaattccatctgctcagaacctgaggcacaatgggaagaagtgacaagccaaggtgcagcttggcaacacaaagacataaccctggactcatactctccatctggagtcccgtccaggatgccactctgtcttgctgtatctgcatcacagataatggcaataacaaagggatgcagccacagtgtgtttcttaaggttcagacctagcttaacatgatgacttgtttttctattgccagaatttatgaaagttagatctttggtgggagaagagggtatcaggtgaaaatcaacccaacaaagctcctaacagataaatttttctacttaataatatcaaaaacaatacagctgctttagcactgaatatattttattatttaagataaaagcattcaacacactattgaaagtttaataacttcatattaacaagagtaatacaataaaatatttccccacagtgatttatcctgttcctaaaaatgcctaattctgctgccaaagtctattttccacaaattctagtttccaaatgttaacttgagaaggaacagagagagacaaccaaatgccattgtcttccatcatagcacttaatgttttctccacatttccatttcccattgcctgtgttccaagagttatgagccccttgtcctttgatgttttttcagatatgcattatcctcatcctttttccaggatacacaatgggaccccttcttccacccctccatttttttttaataataataaagattatgactaataaacctaacaactttcgacacttatttttttgccaaagactatgccaagtgcatcacattaataatctcatttaatctcaacaacaaccaattgaggtaaatattactattaatatctatatttaacagatgagccaaatgaggcagagaacttaggtactttgtcctaggtcacataaaaagtggctgagccagaatctgaacataatctgatttagagctggggtcttctataagcactagcttagtagtcctctactggggtgattctgcccctcaagggacatttgccattgcctggagacatttttggttgtcacaactgaggaggaaagtgccagttgtgatgggtggagtccagggatgcttctcaacatcctacagtgcacagaacggcccccacagcaaagaatgatcccaccctaaatgtcaacagttccaaggttgggaaacactgctctaacctaatgtctcccaatgtcagctcattctgaatgggacattttttggtaagacatgcaaatggctctcacctccaggttagaatcttctttctctacttgggaaaggaggttatctcaatctggagtggatggtacttagagccacagagtccatttggtgtatattatcatagcatcaatgtactcaaaagtttaagctggcatcctgggacactaggtcattttatctttttgtccctcagtggatacatgaaagaggcactagctcactagagcgtgactgaaaagagccagaagattctggtttttgttagtcttgccttgtagtcaggaagacacaatagcagcgtctgtgtcacagataatggtaatagcaaaggggtgtatccacaataggttacttgaggtccagacctagcttaaaagtcaaaatatttaggccaggcatggtggctcacatctggaatcccagcactttgggaggctgagatgggaggactgcttgagtccaggatttcgaggctgcagtcaagacatgattgtaccactgcactccagcctgggcgacagagcaagaccttgtctcaaaaaaaaaaaaaaaaaaaatcaaaatttttttcggagcagttctgtgaataccatttgacccagcaattctaatatctactttatagcaatacttgcaaaatgtgcaagatacatttgcaaagacattcacttcagtacaatatctgatagcaaaaaaacccagtcaccaataaaaacaacggaaatgtgagcatatgttcaccaaaatatgtgtgctagaatgttcatagcagcattattcaaaacagccccgaactgtaaattatccaaatgttcgtgaaagtagactgaataaattgtggtatatcacataatggaaaactatgcagtaatgggaatgaaaaaacaaactccaaccacctacaacaatacagatgaatcccagagacatcacgttgagcgaaagaagtctgacataaaaaataacatgctgtaggataccagtaatgtaatctataaaaccagataaaaccaatatatgctacaaaaatacagaataggggttacctttggggagaagtgactggaagggagtccaagggatccctgtgaggtgctggtcagggatggttctccatctggcacaggtgtgttcactttgcagaaattcattaagttgtaaacttatgtgcacttctctacatgtgtattataatctaccaaaatatatatattaatacttatatataattaattttattatatattagttatatgcatatatgtttaaagaaacataaaaaacctaagtgtccatcagtgagcaactggctaactaaactacggggtatctattcagtggaattctgggcagtcatgaaaaaaagtggagtagttctctctgaataaatttggaaagatatccactatatgtaaagttaaacaaagaagttgcagaacacaagttatggacataaatgtttattataatttaacagggagatctggggttatatattctcaaatggttattagtggccatcactggaggatgggatttgtgggactttgacactgcctaatgaatttttatagtgttggaatttatttacatgtattatgtttgtactgaggggaaaaaaggacatttagaaaattaagatgaacaaaatatatcttaagtttgagattgttattatttcatcatccatgaagattagggtttctgatagatgaaggaaacgataatggaataaacagagtgtcttgccttcagggttgctaactgaacccattgatggaggtcactttggtttgttgctggcaatgttaacaattgcttcaaattagcacttctttgctgggttgctctacattcaaatccagttgtggtgtggccaccacaaacaagattcttggccacacaaagaatgtgtctacaaaatggtaaaacaactgaatttgtttaaattaacaaaaccatatactcagaggaaggaaaaatcaaaacagctacacccaaagtaattcactcggatgggtggttcatgaaatgcacccattcattaaatcaacatgttagcagcctcaagtggactctgygagagactcaactgcaatgcaatattcctgaataaatcaagagaccataaaagacacttttttttggcccatcattagcaaacgttttctgagtgctcactgtggttctgccatcctgctaaaactctggggatgtgataccacctttataattgcaaatgtcattatgttgagtgttcttaattccaccaatgacattgaatggaaattagaaaaacatccactgattcaggcaaagttgataaaactacaacttctcatatacagtaaaggtctggcagatgtaacaatttataaggtagaataagttgtgttcaatggatctcaaccatggctacacattatatttgatcgaaacagaatttctggaggtggcacctggccatcgatatttataaaagcttccccaggggattcaaaaacatagcaagagttggagccaatgcttagaccaagtaaatcagaaactaggtagaatggaacccaggcaaaaatattatttaaaagctacacgaatggttcaaaaatatagtctatgttgagaaacactgcttctaaattgatgttataaatgaagccagaggcgacacttcagtaagcattatgtaaagagactcaataccacctgtccttatcttgtgcagttttgttagcaaattatcacaaggtagtattctaccatgttatggtttcagacgtttcatgtaaattatatctatatctccatgtgctctatttacaacatttcatttgattccaacaacaatcctatacagaatgtaatattatccccattttacacaggagggtaataaggcttgacagagattcagcatcaatccctcagtttcacaaagtcaagattccacagtctatatagtcatatcgtgctctatgtgcctgaaagcagtgtaccaatcaaagaatgttttctaagtatctattatgagctaaattctcttctaggcactgaggagatggagaataactataagatagggtcttctgtaggatacagcttacagtctagctgagaagctagtatcacatggccaagtttggaggattttgcaggaagatttctgaattggtaggagattggtcctgactggattccttccaagatttttctctatgacacaaattttgctggagaataaaggtaaaattatttgtgtaggaagcagaataatgccccccaaaatatgtccacatccaaatctcaagaatatgtgaatatgttatgctacctggcaaagaggagttaaagttgcagatgggattaatgttgctaatcatatgctgttaaaataaggagattgtcctgaattatgtatatgggactaatatcatcacaggagcaacttaaatgtggaacagggaggcagaagggtcagtgtcagagtgatgtgatatgagaaagactcaccaggccatttctggctttgaagatggaggaaggaaacatgagccaaggaatgtgggcagcctctagaaaatggaaaagtcaagaaaaatgattctcccctacagtcaccaggtaccatgattttagcccagtgagacccatttcagacttctgacctctggaagtgtaagataataaatttgtgttgttttaagcgactaagtttgtgattatttattatagcagcaacagggaaccaatacaatgtcttcccaatttttgaagagggaaatagaaggctcaaaaaggagaaattttgtagtttttacccaagctatcatatctgtagtcccaaatcttgatccctttctcaggcctactaaatgagaatctgcctttcaacaaggtcctggcctagtcatgtgatttctagcaagctcccaggtgctggtggtccccaacagttctccgatttaagcattaaagttcatcagaatcatggggaagcttgttaaaataacacagattgctgggccctaccccaaaagtttcagattcagtaggtgtgggagggggctgacaatgtgcatttctaacaagttcccaggtgataccaatgctgctggtccagccaccacattttgagagccattgctttagatgacactaataaacatgtaagaggaaagaagtggcacttatcattcaactaatatccatgataggacctcattattaactgacattttatagcaggtgagtgatctgtttaacagtctgtactttatgtacttgctctgtgaaaaaggcaccacatagccccagggttttgggcaacacttgtgggcaaaaatagccacatctttggaacaccaaagtatcaaatccatagatgtatttccccaaatcccaaaaacacattttcatgtgtatctatattttctccttgcagcattccatatggcacaactggcaactgtggatattgacatgctccacatctcataagacaacctgaggcactgggaatttccttgaacaagatttcccaacttcaatgctactgacatttggggttggataattctttatttggggggctttcctgtgcattgtagaatatttaacagcatctctggcctctacccactagatgccaggaacatccgtatcctccaattgtgacaaccaaaaatgcttccaaatattataaaatgtaccctgaagggcacaatcattcctggttgaggcccactagtttatctgattctcatgcatatttttatgwagatataatagatctggaaagagattattgagtcccacagcacaccttggacaggacataagattcctgagttgctgtttggtcagataatgaattcgagctgatccatatcatgttgagccttctgtaagctactgagtggggaacagatctttccagatgaacaaccacacagattgttttttttttttttttccaaacattttgctcttactcaattttacagccgatctgtgagacccaaactccctcagatgttctgtctattccccatcctaaatgtcaggatgggagaacaggttaaaggggaaaatcttaaaaatatgcatatttaaaattttaaaaacatctttggaacatgtattttaaaataaatgtaagtcagcttgagtttaagggcctcagtaatatccctgataaaaacaagagctacattctgtaattgctatagtccatgataaataaaaaggaaatatacattttgtacttacagagaagccactgtataatgacaacctacttgtaaacacaatctgggtttactaacttgcatctgataacaatgccatacacagggcatcaagtcctagagggtcaaggctgcgcagtctaaggcagtttgagagaacacttcctttaaactgagaacaacaaagataccagttattacctcaatcactttgtgattcccactctgagcaggacagatcctaagarctagaaaggaccacagtcatgatttctttagcccgtttatttacaaatggatttaccagggaggatgacagcttccttcacttacacaattctgaaaagaaaagaggtcacacttatattttctgaaatgtacatatttctaaagtccacaagcttcctctttttagtccattcctgagactaaattagattagtagggtatgatcaaattgtgattgcccacttgttttcgttagctacggtataaatcaaatttcatgcttccttttgctgctcaaggggtgtttatagtctgcagagtaatgttaaagctgacttaagtaaggctctttgagaaccattaattcttactgttgtaacataaaacagcccaaatccaaatttagacactttttgaattattgacaccatgattccagtcctttataaggaaggtaaagaccactggcatatactattgaattttattttaaaataacaatttctatcttttaaaatgtctttttatttccataggtttttggggaacaggtgatatttggttacatgaataagttctttagtggtgatttgtgagattttggtgcacccatcaccctctatcttttttagtgaccgaaaaaatgagtgtttttccccaccagctattgtttgaacaataacttcatctaaataacagttgtgcctcttgcccctagtcatctctttcctatttgctaaaatgaatcacagagttttggaacttggggtacaaactttggaccttcacagaccctgaaatagttgtctttccacaacagcaccctgggtccaggcacccacctcactttatacacccctacacccagctcagttcttaggtaactgtaaatctgtgggtttcaactaggggcgaatttgccccctcactcccccatcaaacatatgcgatgtccggagacacttttggttagtcacaacttaagagcgagggttgttgctgctaacacctagaaggtagaggccagggatgctgctaaacatccctcagcaaataattatctggccccaaatgccaagagtgctaacaccgacaaacctttttgtagaggttctcagagacacattttccaaccatatgttgtatgactctatttctatgaaatgtaccaaataagcaaatccatagacacaggaaatagattggtagttgtcttgtgctaaggggaggagaatgggaattcactgttactgggtatgggatttcttttcaggtgatgaaaatgttctagaactagactatggtgatggtggcaaactttgtaaatacattaaaaatatactaaaacccactcaagtgtaccctttcaacacatgaactttatagcatataattatgtattaagttattaaatccgtttttatagacctttcattaaatagcttttatttcttactaaacaagagcttatattgtagagcagttttgaatagctgtaggtttctctggagaatattctctggtaacagtttttgaatgcaaccctatatttcacaggaaaaacattatgttctgtatttttaaagacttatctatttccagttgttcttataatgttatcatttgatctggggccccaaggtatgcctcattcatctgtgagcaagtgggtgaagagtgtctgagccagggccagagcccaggggtcttgcgtctgctctgactctcaatgtgatgtgaagacagccaagtcatctgattgctttgtgtttctaccttctcattcttgacacaagtctgagcttccagacgaactttcttgtagaaaccctagcaagcaaggacagtggatacaaatgctcagtgctttgccactgcagaggggacacaagtggatttccctgtccaacattcagggtctctctgttcccaacagcccatctgccattgccctttttctacctaaaacctctgctgcygcctagctggtctttttctgcacaccaagcatgctctgcccattcccgtttctctttcttccaatgactcagccctgtgaggaaatagcctctatgtctatccaaatccttcacatctccaaagcctgaagcccctggcacacaatgaacaatagaattattttaggcaaggaattctacatttaattgctaagatcatggaagcatgagaagatgtcaccttttggccttcagctcctcttatgccctccaccttgcaccacaccagcagtgctgggttcctgccagctagctaacacactgggccacttccatgctggtgcctttgtgctgatcccagagatgctcaggcgaacacctcaccttcttcaagaaattgtttaaaactgaccaccctattgaaacgtgcaactcagcacgtctaatccttcttagctgctctactttttccttttccataggctttctcttctgctgtccttatttattatatccattgttcatagttgctttctgtgagactgtgagtaggagtctttgtgtgttttaatcactgatgtaaaacataaacccagaatatacccggcatgcgggaggtgaccaataaacatttaaacatgttaaatgcttagaaccatggctggcaataaaggttagtttcatcttcatcatagtcgtcatcatcaactttatcatcgtggggcaacacttacactattgttctgtaccattacaccgtgtttagccttttaatctatattttacataatgtataaaggctgtacattttttgagggccgatatcataccatatataatatgtgtccttttaaaaattaagatataattcacataccataagattcaccactttaaagtgtacaattgagtggcttttagtatattcacaagattgtgcaaccatcaccactgtctaactccagaacatttctatcatcacaaaaagaaacctggggctcattagcagtaactccccatttcccccttccctcaacccctggcaaccatgaatctactttctgtttctatggattttgcctattcttggcatttcctatacagtcatacagtatatggtattttatgactggcttccttcactgaatgtaatgttttcaaggttcatccatgttgctgtatggatcagtgcttcattccattttatggctgaacaatattttaaaaaactactaatctatgtatgtctccactgaacctcagcaggaaagttgaacttactttggtatattttacccaataaacaggaataaaaatgcttgtttttacattactgtcctacctcttttaacacagatgtaccattttcactcctgacagttaccagttaattataatccaaacaacacactcttcaactgcatataatttcccttgttgaaaattgttccacctgatatttagcaaatgcctacggacttttcaaattacaagctgtatgaactcttgctgtgaatgtttatattattaaaatatttcctactcatgatttaaaagggctctctcactttaaaaaatcgtgtgtttttttttgtcttggattttatgttgaaccttttttccccctaagaatgaacattggatatacccagggcctatgcaagtagcactatcacttactcatctctcttgctgaacatgagtgagaaatatcatactccaaacttctcgtatttcccctgcatttgttgcattcacagattatttaaaagaaataaatttaaacctcggctacccagagattttcaaggagtccctagataactactgtgttttggcgaatatctccccaaatggagagaagggagagcagggagggagggagaaaaaaattagagaaggggactttaaaaaatctatttttccacttaacaatgtatcaccaacatctttttatgttgacaaacgcagagtgacatcctcatcttgaatgctatttgtgccataatcgatttgaaccagccccgctattggtagacattttgttttaaatgttacttcataggccaggcgcagtggctcatgcctgtaatcccagcactttgggaggccgaggcaggcagatcatgaggtcaggagatggagaccatcctggacaacatggtgaaaccccgtctctactaaaaatataaaaataagctgggcatggtggcatgtgcctgtaatcccagctacttgggaggctgaggcaggagagtcacttaaacccgggaggcagagattgcagcgagccgagactgtaccacttcactccagcctgggcgacagagcgagactctgtctcaaaaacaacaacaaaaaattatctatcatagtgtatttgtttggagtatattataatttgaactaagaggtcagagccaaatgtaatgagactgttaggataatagattctagcgcttttacagcatctcccttttcagatacttatcagaggtcatttgcacagaagtccacaggagcagttgagagcaatgctgaattatccatcttagctattgaaaaggtccatctaaatcactgtaggatttctttcagaatccacattttctatgtttacaatgtcatggaaaacttttctacattttcattaattcatcaacacatttatctagcacctactttgtataagagctttttctaggtaccaaggagctcccaagaaagtataagacacaatacctgatttctaagggttgcggtggggtcaaagttacgatgtgtatcggaattcatcggtggttttgtgcctaagatctgaagatcatacaactccaactctaccccagcaaaaaaaaaaaaaaaaaagctatcctagagaatgatgttttcttgtaagtaaacatctacagagaaaatatttaaaagccagctttggctccagctacttaagaagactcactgttgaaattattccagaatattggataaccctggggatgctttaaaagaaggctcaagagttgaactcttayagatgataggaaaggctttgcaaactcataatacctgacttatccaaaggccaccctcataccccgagtgctgttgaaacccaggcagtaagccagtggagaggaaccccaaaacaaaccaaacaccctcccagcagtcaaaaataagtgtcacaaaaccgaaattcatttgcttttctcacaggcgaggccctcccaggccagccccacttagagtgttcctttactttcagttcacgcatacttttaacaagcttgggcatatgattttctagcatactgtaaattagaagcagcaaattagaagtggggaagttgctaacataagcattgtgagaacagcaaaacgtactgggctgcaagtcaagaaaaagaatacctactacaaaaaaatgagcaaaagaactattttatgcagtcaatttattcataaataaaataattgcttataggaaaaatatttcaattgaaatttcattttcctcaaaacatttaccaatttttaagctgtgtaagtggggcctaaattagtggaagagatttcaaacagagatccatattttaatgtcctatgattcaggatatgcagtaggggaaaatcaattatttctatggaatcggccatcaaagcttgttcaactgtccatggtgaattagcggtaactcactatccagtggtccagaggaattaatgccacattaaggcagcatcctgttgatcattatggccaaatatatcatcctctcattcttagaaggtgagaaaaagtataagatcaatctttctaaaactacaaggctactagtaattcatcattgacttcattagtagagattacccacaactttgtagaaaaaaaaaatatcctgaatcctttcagacactccaatatatgtaattatataaaatgggggaaaaagattgaaagtgaataaaatgtgatccacattttccttcctctcccttaccaccttgctgtacacccctgccaatcctcctaaggtccattttccaacttccttcaaagggaatccttcttgtctctgctataaaattcaccaataaatatattcataaataaagccaaatcctggggacatttggcttttagaatcatattctatgtttcttttcatgcatacattttacctgttataatcttctacttccttctttgcaatctctctctccctgattggaaggtcttacctttctttgcaatattcatccctactgatttatccccaaagatcatcttggaatcttgtttattagcattctttaaacatttactgtatgccagctgacagggttggggagagtaataaatagacttccatttccccagagatgtcactcatctacttttcacatgaattccctgagctaggttctgttattatttccattctacatatcaggaaattgaggctcagacaggctaagtaatttgtatatatacgtataaacatatgtatatatacaaactttataagtattacttgtgtattcaaagagatccaagtataacatcaactgtatctgggtagatattcagtatctcctttattgatctaatattgatggacgactcgtcagttagctcctgccactaattacaactttgctcaattagatcaatctaatcaaattccagaatgaaagaaaaagcccatgtgttataccaaggtagaggggtaaaacacayatgaatttaataggtagatgatcagaggttcttttagaaagtgaatagctttggtcattgcttagggaaaggggaggctgctgagaacatggaaacaaagtagctagccagacagttaagagactctgaaaaatagagaggaatttgggtttgcctgtatgagaaagtgggattgggccagaaggatatgggcaaagaagggccgccatactgagaggccaagctgctctgtgagatgggaggcaaaggacaacatcccctgtgacatgagtttgcttgtaaaaaacaaaatttactttaaaatgtgctgtctggtgtgcactccttgccttgtagtatagatcatcagtaaaagctttgctactgcaagaaccttaagttcctgattgtttttacggtagatgggtttcagcatggggccgagaaggggctttgtcccctgttttggtggacaccagaggggtgataaaggagtagccaaggggaacagagaaaaaataccttcaatggaagcagataatagagcagtggtgatcccaaaattataattcctcagagagaaactagagagagctttggggttttacccaaatgggaatttgaatcaatttctcctgatctgaaagggctggaaaaatcctggaggatatccagattacactagagaatctcaaccacctaccttgatttttgtaaagaacaacgttgtttgctagaactgaggaaaaggcgatggcagagaagctttttaaaaataaatctgaatatatcaacatgtacagtcaactaatttgctgacttcaaaatagcgtgatgaaactctttgcctgttaaacctattattgcccataatgaaagattccatatgcactaatcacaacatacagccttatgtctgatcatagcttctaaaaaatcatgatacagggatttttagttatactcaacacatttttcctttagaaactggattggttgttacagatgccatgaatgatataaattgagcttatagttggaagaaatctaaaggatcaagcatccctgagtttcaaacagaaacttgcactgaatacattcaaaggtatgtggattttatttataatttgatatcctttttattgtgcttatttctttctctgcatttcttttaaaagatataaatgtattctacatttctaatactatatgccatcaatagttactttttagttggcccataattaaattagactctgattactgaaatgatttttaactttataatgcaacaaagtgcttgtctaattccaaaggtctttcttggccacatttcacagtaaaatatttattttaattaattatcgattaaagtaaaaataatacattcacaggctgtgatctactactttgaaaagctttttatttaattacataaaatagaaccatccatgaagtgttttttctcattaacccaaacaaacaaacaaacaaaaaacaaatttaggagttagaaaactttagtgtacttttcatagacagcattatcacatgtaatattcacttcttatacaaaatttaaggtctttcttctgacagttttcccagtaatttgtgccacaaatcaatgtgcacattttaggaggacctgttttgcttaatgtcccaagggtcttatttatagaataattacagtgcaacatcaaacaaaatgaagattccattgaaagaaaatgaaacctcttagggagaaagtattcaaaattcattgaagaatcacataaaattcgtaccatcctctcctgttggttcagccacatcttttgctccacaatctggagctcagagatgttactggagggtcttgcctgaagttctgtagataggaatttctggaactaaaatctatcttggcaaattaatatattttctcaaatgattagtccttgtttttaacagtagcaatgtccaggtagactgtgcacgagacatttctgtgcctccttgttctaaaattataaaatactgtgcactttgatgatcttcccaacctttagagccaactttattcctttaatcattaattataaatacaatttagcttctatgactaagggctgtataggcataggaaaatggcatgcaaagtcatatgaagatagatcattcatgtccctgtaacttgtttagccctcaacctaaattaaatgcatctttatcactactgtgactccagaaacaatgaaataggctgagagctggaaatcacatatgactgaagtaaattcacaaacaatggctccatccttcttactagcaatagactaatgtagattatgtgtgttttatggagcattcattacatccatgtttcagaagmgataagaaaagtggatgttgacttacatttcagaaccatcaagaaatggggacctggattttatttgcctgcctcctgggagcagcttttgccatgcctgtgagtaaaacaccccttgcataagtcagtgtccaatttcacaaacttggacataaaaatctgcycatagttggtgaaattagggtttaaaacagtatgagatcagatgtcttcatatgtctctgggttgaagaaacacttcaggagcttgttttaaaaaggtatattctcaaatgcygctaccaaaaattctgatttggtacagctggggcggggcccaggactctgcatttttataagcaccccaggagattctgttggaactgttagcttgtaaatatcaccacccatctctagatggaggaagcttttggaagggacccttgaaaggtctccagagaaagtgcttaaccagctttggacaaatattacagagatgccagttttgtctaaaacccaattcctctcaagattccaaatctcttcctgccctccacatattgctgctcttacccctcagggggtaagatttttgtgttaggaatccactttttgagccacattcctgttctcagaggccccacccctttgggtacatctgatgagtacgtgacttttttgtggttgcccgggatcctgcctacacccaatacatagtgatatattttatattcaaatgtattaaagatcaggacattagacccactctgtctggacacaggtgcataagggcagagaacttagatcacatgcatgccaagcaggctgcatctgctttttggtggaataaagagcagttgatacaaccagaagccagcaagcttgcacccttgcctcctctcttcctctctcacccacaaaaccaagattctgtgctctgacttcctgaaatcctgcattgcagcgattcctagtttcctcaggggtccctgccttacaaattcagcccttttcccactctctaagatggtattgttcaagagggtataggacctgactaaaaccattcacatccagatgagagagaataaaccttcccatgaaaygtgagcatttttaaagaatataatagagccaatcctaaatgaggccaatgtctgagggagattttctgcatgaccgtctctcctccctggaccccaggcacaaccagagttccacaatacaggcaccagacacttgggccccacttttgagaggacagacagtcctgattcagatcatcattcaggtggccttttatttttaacttgaaaatttttctgccataaaaccgttggcagaataataaaaaaagatcggcctaaacgtcataaatcaactctttcattttccatgggatttataatgtttccactttgctccacccatcttgttctggcattcatcaataattcccaccttgtggtttcttttgtggcttcttttgttgtatggaagtgttgtttactttgcatgtcaattatgagaaatccctttgatacttaaaagtacttgaccacctcctgatctacaagggaacattcgtgagacaattctctccttgttgatatttctttattgtgaaagagaaacacacttctctccccattatggggtgagttttatcagcaagtaaactgttgggcaggatagggtaggattcattgaaaacactgggcgtgggggtgggatgctgtccaaagatcactggagaataaatgtgtgctggtttctgcttccaggtctccarccataaggctataaccccaggaacagtcatttagctgttctgaacctctttaaaataaaaggtctcctcttctatacagcacatttgttcaaactaaaaacagacctcaagtatattctgcactatatagatttttttaaagtagcttcagtctcctttaatgtgaacaattgcatactgacttaatctcttcctctctcttctcttccttcactctctcccttcctctctctttctattctcctcccctcctccctgtaaaagctaccacctcatcctgggcaccctggttatatcaacttcagctatgaggtaatttttctctttactaattttgaccattgtttgcgttaacaatgccctgggctctgtaaagaatagtgtgttgattctttatcccagatgtttctcaagtggtcctgattttacagttcctaccaccagcttcccagtttaagctctgatggttggcctcaagcctgtgtcgtcccagcagcctcccgcctggccactctgactcagtctgtcctcctaaatatggccgtaagcttacccatcatgaaccactactcagggaggctccatgatagggcaaaaagtaaactctgaccagcttggttctaacccagctagtaaaatgtaaggattaggtaagatgttatttaaaactctttccagctcaaaaaactcctgattctaagatagtcacactctatgtgtgtctcttgcttgcctctgctgaaatattagtgactaagtggtataggagagactccgcagaacagcggaatgcatgagttttggacgtcgrgtttgaggttctcctcaacctcttactaactttgtgattttgggcaaatcatttcctctttctggaaccctggtttcctcatctggagaaaggaaataattataataaccatatttcaaaatattgtttggagagtaatatagttaatgaatatgaaaagtgctttgtcaagtataatatgagcaaggttactgattattttttgtatcgattaaatgccgtattactatatgaagaatcctcaaacctaaggctaaccaagtatatatactgttcagaaaggaataagattcttacttctctcacaggttcaggtaacaatctatgagtttatttacttataaaagctgaagacaaatgttagtaagattttgaggcaagattttctgttgaaccgaaaagattgacacatctgatcagtcaatctgtgtttctaggatgagggacagtgtttgcacctctctttttcccattgtgacatcaaagaaaaaaatgaaattaacatcatgtcatattattatgtcataattttgtgtttgttttgctcttacaatgaaaagaaggaactatggaattaaacagatttactccctgtgtaacctcagtcaagttaatgaatctctttaactccccataaccttatctaaaaagtgagagtaataatacttgcctcctagcatataagaaaagatgaagaatgtgtgtgatggatgtaaacacagtgcctgtcacacaggaagcacccaacaaatttttaccttcttctttcttttgtagaactcacattctcaggctatcaatgttgacaggactgcattagtgagtctatatttcctactgcatcagtgagtttctatattggatgaaagtaaattaaatcaaatgggttctaatatctttttctcttaaggtgcttacccctttgaagtggtaccagagcataaggccaccggtatgtagacattttgttccttattccctgaaaatattaggcatgcattaaaattcccatattaagtgaaatatcatgtctactccacatgcagacattaatgggaaatttagtttgtaaaaaatcatatctgtgtacacagttacaaatttttgcaaaggaaaaatgaataaaatattcctatagccataatggcaaagaaaacactgctgcttctctggttggagtcacctgagccaatggtaaacctgcctctctgtttctcaccagtacccttcctatggttacgagcccatgggtggatggctgcaccwccaaatcatccccgtgctgtcccaacagcaycccccgactcacaccctgcagcctcatcaccacatcccagtggtgccagctcagcagcccgtgatcccccagcaaccaatgatgcccgttcctggccaacactccatgactccaatccaacaccaccagccaaacctccctccgcccgcccagcagccctaccagccccagcctgttcagccacagcctcaccagcccatgcagccccagccacctgtgcaccccatgcagcccctgccgccacagccacctctgcctccgatgttccccatgcagcccctgcctcccatgcttcctgatctgactctgkaagcttggccatcaacagacaagaccaagcgggaggaagtggtgagtatattttgaagccactacaatgcaaatcctgtgaaaatggtgcagcaaaataggccccagagttctaaggtctccgacaaccaaggatctagagttgtagtagttacaggtctatgattctattagtccaagcaatatgctatacctttatgttaaagacaaattcctctaaatggcttggtaattaagaccacagtttttatggtaggtttcaattttactattactgaatttctaccagaatatgtattaccaaaacccattaatagaaatatatattactaaaccccatgaattttaagggcaacagtataagggaatatcagttctccttatatttcaaaggtttgactagcaagaataggctagagttgcactgaaggcttaagacaagagggagcggataattttgagagtgcaaatatctgaacaggctacaaaaggtagacgggaaatctcttcaaaaacctacaggaagattccccatttccagtagttttcaatctaacttggaggcggctaaactaaacatactgttagattccttttctgtactggggttctatagatgattaagcttttagcaagaagttactgcaatttagcactaaatcttccattacaggtagctcttacaaatgaatgggaatagtcaacaaaacaaacttaatctacatccataaagtcttacttctatgtatacgagattatgtgatcctatcatgtatatgtatccaactgtaattccaatttatacatgttattgatgatttgctactgagaagaagagagaagtgaggtggaaatgaccaggataagaagccaggacacaaaggttccaattctggctttgccctcaaagacgaggcagtattgtaaaagttacttcaaatgtatcggtgttttattttcttttaaatgggggaaaatgacgaaatcagattattttcaagtctctgtccaattataaataccatagtttctgaatttaaaaaaatcataatatatgtcataaatggcttcataattgtgagcatgtttacggaaaatatggggcagaattttttgaaaattgattgaatcccaagtaatcggtgcctatcattggctattctagtccaaggcacatgttctctctgtacatagaaaatgcatttacttctttatgaataattaataccatgaactttataatgtgctcacatcttgacaaagctatttatggaaaggtgactttgggcagatagtttgaactctttaaaactcagtttctttttgtgtaaaatttgagtataaacattgatagtttcttagagttgttttatggaaaacaaaatagcgtgataagcttggagcctgacatgcaagacgtaccccccaaaaaggtagcaattgttattttattataaaataataggctttaagtgtcctgaaggtggaagcagtcctcatggacacctaatatctaatgacaacgaaataacaaagaaacttcagaaattatagagttcaacttaaatggttgtacattgttttgacaaaactgaagccagacatgttattgtaaatggtactcactaggaacatttgtaaattattttaactgttcttttgcaatttttttcaggattaaaagatcagaagatgagaggggaatgaatacttcagatgctttcaggagtgacacaagaacacaatgatttttgcttataatcactttacttagcaaattctgtaactaaaaaagtaccattagcagacaataaaatgcattaaaaatcattcatgtctttgtgttgaatgaaacttaaattttcctatcatttgagatgatatattatgaatgagyattcttgaatcaggtaggaactgctcatttagtcatacaaattcaccatttggcaagcaaataaggaatatatttctttttagagaaaatttaaattatactgtctcaaatcttttttaaaaaacaaagtttatacatcagttaaaacagttgataaaatgaaaatttatgaatatgtacaataactaaaacctgaaccaaatgaagggaagtttatatgaaaaattctttacattaagaaagataaacttttgaagaatgtttatattatgaaacaaaataggacatggaacactggctttacacttcacaccacactggcaatcaaaatctggtcttttgatctcattctatggaaaaagatttttaaatgaaattatgtgatatgcataataatgtactgaatttaaagttattcaagtaatttgttttcctcaaaaaatgttatcaatggagcttcaaatagagaattgcagtgattttaaacacaagtcatttctttcacctcataactttaagataaattgtactgtatagtcttcaaaatgttaacaaatgcataaaatggactcaaaacaagttttctttctcactcatatttatatttgaatccttttttcttcctacacccacacagaattgtaaacagtctttgcagggtttatattacacaaacccatggtaactttattccagtacctttatgattaaggccccttaatcattttctggaatgaataaacataactttattgggagggtgtcaatattcaaacaaataacttgattttaaagaatttagattcaattttttaaaggtagaaaagcttttaatcaattggcatggaccaattctaatcaattgagtcaatatttattaagcacactctagggcaaggcactattccatgtgctggtgaaaagagcaaggccccatccttaaggaatctagaatctaccaaaggggtaaaataagcccacaaataacaattaaaaaggccaaatggtattaatactatgacagaagtacagtcaaaacactctggcaaatatggcaaatatccttggctagctgtccaacagctttcctcaccactcctttcctgttggcagagctggaatcaatcccagcattcagccacggtttccaaatcaaaattcagatacgtagtgtgataatacagaggaatgtttcaaaccagagacatacattaactggtaattatactctaatacttgcactgtcaaatatggtagtcctgtcctatgtggctatttaaatgtaaataaattaaaattaaataaaacttaaaattcaattcctccgtcatagtagacacattttaagcgctaaatagccacatggggctagtggctaccattctggacaacacagatacagaatatttccatcaccattcagttttatcagacagcattgctctatgtactacttcttgaagttgaaaaataattcttattaattcaaatattttaaacaaaagatgaaacaaaacagatttgctggttgaaactgaaaatctcagctacccacagcaagttgttccccaagcatgccagtaatcctgatcctctatgagaattttctaagaactgtagaagtgccattctcttcctcaggccaaactttacatactaaaatggtttcccctctagctttcatttagaacagataaatccagagttcagaagatatttacattcttttctattttgtggttcaaactaatagtgcaacataacatagagggaggcacacattcacgttacacacactcacacacccataaccacgcatgctttctgggtttacctgtagtaaaaagacacatgtggagacatgtgccatttgagtaacttgaaattttaaataaaacttctttccattacaatcatttagagaatgattatgtggttatggtattcattatcaccaccaagacatactacagttcttccaatacaaaaatcatatcaagaaaaaaagatcaagctgtgcatttcatttccaagcaatgtcaagtttaccatcccctttctcaactccacacaaaataaaaatacagacttttctctaaatccgaagtttttcctttggtagtaaacaatagctgaaaataccaagactgagtttaaggccaagacttttaaaaagaaaataaattagtagacaactgtattaattgggaaaaaataacccaagagatcctagtatgaacagcttaacatgagactaacaagagaaaaacgacttcaaccaatttcctacatttccagaacatagtagcatttagtagtactccacattgctttaataaaatagtcatcagcttatgtctgttgtgaaattcttgttagttggagtttttacttatttttgtgatttggctttcaattccttttgcccctatttgatctggagccttaacagcaagggccataggccgacatttagatattaaaaaatacctccctgttgggaaaagtccatgctggcctcatttgaaacacctgactcttccagacgataaataattattgaggaataagattgggctgggagtggtgaggatttgaagagagaagaaaggagtggtcatttgggttcgaaacatttacctcaataaatcacacttgaatcctctatcacaaaatctaaattaataaagcccatttgcaaatatcattgtcctatggtcaacaaaaaacaccacaggacccagaattcactttactattaattttaaaaatgaacgatattaaaatctcaattcctccaaacagccaaattttgtttgcctctccaaataattttccatgcttcatatttggccatggaatgtgcaggctctgggggtgtcagttaagtgtccacagaagcacaaagccggctttccagtgtgatggtagggggtgcagcctccataaccaaaccgtttgattcacaatcatgaccattgcctatctgctgtggaaacttggacaatttttttggcctctctatggctcagtacactcgtctataaaatgtactaatatcatgctctgctctgagtcttttcatgttaatgagccccaagctcaataaatgttagctacagttcttgtaatcagaaagagagctttgtcctgcctctgtagactcccaaagagaacactacccagttggaagcaggagtgatacaaaattaggatatgacatggaagtttttgatgccacaggcactgaagtacatcacgtttgtctttttttttttgagacagagtcttgctctgtcacccaggctggagtgcagtggcatgatcttggctcactgcaacttccgcctcctgggttcaagtgatcctccagcctcagcctcccaagtagaggggattacaagagtgagccaccacacccagctaatttttgtatttttagtagaaacggggtttcaccatgttggccaggctggtcttgaactcctgacctcaagtgatctgcccacctcagcctcccaaagtgctaggattacaggtgtgagccaccatgcccggcccatgtctgtcatttatcagtgcatcactctgacagtgtagccacctgaacacctcccttactgattgtgaccctaaatgatctttgccttctcctacctgatatccccagacactgttctttgctgcctccaagacaagccttcatcctcaattcaccactctgagggtaacaggagagcaacaccaggcaagtgtcatgggggcgctccactaagtggaggctagaacttgagaccacctctctctgcatgtcttccttttaccttctttctagggctgagcctttgtgtacagtgactcccaactcagacccttcccttgtcactctggcattggcacaattcagctaattccacattataaggatttcatttttctttcttttacttttttttttttttttttttttttttttgagatggagtctcgctctgtcgccaggctggagtgcagtggctcaatctcggttcactgcaatcaccacctcccaaattcaagcgattcccctgcctcagcctcctgagtagctgggactacagccaggcaccaccatgcctggctaattttttttgtattttagtagagacagggttttaccatgttggccaggattgctcaatctcctgacctcctgatctgcctgcctcagccacccaaagtgctgggatcacaggcgcgagccactgcacccggcctttaccaaaccgttttcctctagatgagtggttcttaagcaggtacagttgtgtctcctaggggacctttggcaatgtctggagtcacaacagggatctaaacaaatcaaaacagcttggggagtggtaggggtgttaaggagaatttgcaaaataaagaaagtgctgtcccgtgattaagtcagctaatgtctctaaatcaaaactatcctgttaaaagcccagatttcaccactacacaatatatccatgtaagaaagcatgtccaccctctaaatctataaaataaaaaaagtaaattaaaacaaaatttttaaaaaccgtccgacagaagttagaatagttatttgcttcttcagaacttacttagaagtgagtatttgtttcttgggaggttacaagaagcttgtctcctgtgagttaattgttcctgcttgtttgaccttccaaagatgtgctaaggagctaattgtaaatcagactgaagaacctctgaaagtgattgtgtctacccgagtgataaagaggagaaaataataaatttagccatgagtgtaactactgaattcaaggttattcaattagtctgggataagttctgttctgagatttgcttggatctggcagaataatgagaaatgagtggttctgtccataaagtgggcagtaatttaagatgccttaattctcatgattttcagaaccaccactctccaaaagaatgattcttttgattaagaagtttttgttacaaaattgttacagaataaaacccctacagccatggagaatataaagcagtgtattgtaaggagagaagatgattaagcactgaccttgggcagctgagaatatctgacagacccaggccatcgaacaccctatctgtccaaataaccaactcaaggcacttctgaagtgaggatctccctgcctccttgctgctgtatcccaaacatccgggagcagccatcagtgaccctcacctcaatgccacctcttctagaaatcttctctcactgctctacgttggctggcactcctggaagtgaggttcccctgtctccttgcccccatatccacacatctgggagcagccatcaatgaccaacacctcaatgtcacctcttctagaaacctctctcgctagtccacagggctggagtgcacaggctcagaggtttcccaggatatgttgaccatgcctctatttcaaacaactgcttctttctacttttgtctcccccttagctgtcaagctccttgaggcagatttggaaaaatacctggaaactggtcagtatgcttaatatctgctcaatgagccatcattagcattaaacacccaggatgctgtcatataaaagtaatgataataataacactgaacatttactgggctyattatatttcaggcactattctaagcacatgacatgtattagctcatttaattctcacaacgttatagaattgtctctatcaccaatttacaaatgagggtttgaactttaaattttaacaagaagttaggctcttttaaaacacacacacactgccccattttttatgagtaccatttgaaagataaactaattcgtcatccgcctctaggattctaattaaacaatctatagctatttttaatggcaaatgtaaattcaactccattagagtcatgaagcttgtctcctgtgacttaatttttcctgcccatttgtcctcccaaaaatatactagagagctaactgtaactcaaaatgaagaatccctaactcattaaatgctctgtagttgcatgagggagttgcctcttgtgctaaactgccaaagatggggaggagacagctacaaacataggcaagtatcccctacgctaggacaacattgccatggcaaccagggtaagggcaaccagctttgagtgtgaacctgctcatggatggtcctcatgccttctctggttccaaaggatggatggaaaacaaagaaacgcaagtccagtgctcgtagaaaccacaaggccctgtctttctctcactgattagttcaatgaaataatcatgtgttttaggagacccaggccttggccctccgctatcttccttcccagacagcccactgaacacacactcaacgcatacagaaagcccatttcaagcagcattctgaaattcaccgagaatgacaagaataataaggctactgatatatccctaccatgacattgaagcagaactaattggcttgcatactctctctacctggcatctaatgcccagattaaaatagatgacaaagttcaggtaccccaatagcttcctgcactgcagcctctacaaatgttagctatcaaggcagcagtccaaactggctccttccatagggtcctgactagggaaggaaatgtttgcaaatttgcacagctgcatgcaataacaaattcaggctctgcaggtttacaaaatcccatcttctccctgtgattaggaacttgggatcaacttgttttccacaaatgatttttcttaatctggaagtaggtacaacagaggaacttcaaaatctgtttcttttgagacaattctcaatttttaaagtacttattaaacattgctaaaatgtgcagttcttatcagcaggatttacaatgacacttggaaagcaatgggatttactgcttttgtggcttttttttccccgttctggtagtgaaaaaatgttcccgataaacagtaatagatatccaaaaatctgcaatcaccaccacattagttgatttgatagttgctattactgtaaataatcagaatcacaataaaaagtctatgcctacaaaatgaaatcacttaacaaactgtaaataatcataatctaagagcagcaaattttcttcaaaagcaacttggcttttaacaaactaaataattcgtatatattttaattactttatacctatggtggcatgtgcacatgatagagagaggaagaaatttgcaaatgaattgatgtggcctgatcatattgtttaaggtaatagatcaccaatctgtagaaaagccaatgatttcactttcttggtgttaacacacaattcaccaaataaaccaatataagtttaggaaggattcaaagcagcttttacttgtagctatatgaaaccagcaagtatttaattaggctctgtgaacacttcggtaacaatctaaattaatattctgaaaagatgagttttaaggttctttctatgaaatcattaaagaaaaaaccctggaatcattaaaaaaaataaaatttgcaccagatgctacctttattgtatgcaaacaacaaaaccaaagttttctgaaccagccatctgtctttgctgcatggagtggccacaggacagagctgaaccacattttgtggttccacattagtaccctaatcagttatcgatgttatagaatcttgatccttcatcatactaaggaaaagggcaacctatgcccttgtccccagtcgtcagtcattatatagtacccaatgattgagacccaaagagacactccatagcaatgatgttttggctcatcctggattagtctggtgatcctggcaatgcctgattcactctgaacttcagtttccttacctctagcacaaaaacactggactggaacagtaacattaagacccatgcaacagtaacattataagccaatgtgcatgttaaagtcaaattccattgattttcaaatactgagaaaatagccaaaaggaatggtgcagaagaaatggtgggtccttactatgatttgctctgaactttcaataaaaatatacacgtcttggcaatggtatgtaatattccaataagcctggtttgaagactctgaatttactcttaaagcaacaggcagaggcagtgtgactgtcatttgaaccacctgagctttgatgttaaaagagactcaagcgccaggacacattgagcaaatccctccaacgctattacttccctccttctttcctacttatgttcaccttttccagatgctgctctgggattattaccccatggaatctttcacgtcttcctggcttgggtcctaccttgcttctagcagtaggcacgaaacacagagcctgaaatacacacaccgtatcttcttacctctccagggttcttacacctcagcaatagcagcagctccaggcagtagcgagcccccatactccccacgcagagcccctgtgcagtgtgggaacagagaaggagacaggaggcagggagggacactgctcaaagtgctagaggagccggccaggcagtctccctgtctggaatgcacaactagaggatctcggagggagagagccttgggtcactgtgatcctctgagtcagacaccctggggagctcttagttctgaaagtcctccccaggcacagaaggctgaaagcccccaagcacccactaggaagaaaagtgtaaaagttaaaaagttaaaaagttgagataaatgaggtagacatatggcagtttacagtagatggtagaaatgcagtatgattgctggagggaaaaaatcatttgaaaaaaatgctcactcacatatctgatgagagatttgtatccagaatctgaagaactcttacaattcaataataaaaagacaacctaattgaaaaataagaaaaaaaatctgaataaatatttctctgaagaagatatacaaatggctgataagcatatgaaaagatgcttgatatcattagccatcagggaaatgcaaatcaaaatcacagtgaggctcatgccggtaatcccagcattttgagaggccaaggtgggcggatcacttgagctcaggagttcgagatcaacctgagcaacatggcaaaacctcgtctgtacaaaaattaaaataaaataaaaaacagcctggtgtggtggtgcgtgcccatagttccagctacttgggaggctgaagtgggaggatcacctgagcccagggaggtcgaggctgaagtgaactgtgattgtgccactgcattccaacctaagtgacagagtgagactctatctcaaaaaaaaaaaaaaaaaaattatcacatcacgcccactaggatagctttaaaaaaaaaaaaaaactgttggtaaggatgtggaacccttacatagtgctggtgagaatgtgtctccaaatgttaaacatacatttgccattatactcagcaattcaacttttaggtatatacccaagaaatatggacatgaaaaacatgtaagtctgcacaaaaacttgcatatgaatgttcctaacagcattattcttaatagtcaaacagtcaaaacaacccaaataatccatcaacagatgaaggaataaacaaaatgtgtcatatccctacaatagaatattattcagccacaaaaagggatgaagtactgataaatactacaacatggatgaaccctggggacattatactgagtgaaaaatgccagacacaaaagaccaaatgaaatactggctcttattcccttgcaacaatcattccccaattacaccaggctcttccgaggtcaccattactcctgcaaatttacctatgtgttttggcagaagctacagtgagaggaggcttccatctcagtgtggagctacaaccactggtccccagcacattcagacccttcttctcagctttgcttctaggccactgacaaaaattctgttctggcttcatggttcagccccactcctccccaactccttcatttctgagtagtggctcccttctctccatgtctatggttcctatctgtgagagtttttttggaacttacagttgctcttgtatatcaggtagttggcatctccaaagagattaaatgcaacttaagcacaatggactctcacagttcagtgggtttttcatagctgaaattcagtaattaattgtgaccctctgcctttttcgcagggaaaggatatacttttttgagcacttaaacaaaaaaattagggtattgcctccaggggccattgtgcattttcactatcataagtaaaaatgaaattagaaggcgatgccaatgaaggaagcagtccaatgaagagactgccactatggtcattgggttaaagaaaaggtcgacattcttatgtaattttatcatccactaagagaaatacattacagttactgacattttaattattaattttaattcttctttttttgcttgtttgtttccatatccttcatctttccaaactattcctgggtacaatggaccaatgcccttgaacattattttcttaacaataactagttctatcctgtgtcatgctcaaggtttagttcgatcagtgcattctgctaacaggacagaagtctcaaaagaaagatttgctagtggccccagttagctacaacacatggtttctggagtcacatttttggccaatatgtaacttttgcctattctgggtttgtcttaaaaatctcaacctttaaacccttgaaagtatccatttttaaaggttgatgccattgccttctgaaaaatgtcgatcaaagtgtggaggagaaggcttcctgtctaaggataacaaagctgcaaatgaacgttccccaaagcgccggctgtgttcattttgtactgaaatgtccatacaggctgattctgaaacacactcgagtgttgtgggtaatagatgtcaaaaaataaaactcaggcacacgctatgttactttttaagggaaaaaagtggggggaaatcaaagggtttaacaattttattcattggcttacattcagcgactctgaaaatttggccactactcaggtttgcaaatttctatggaaaatgaactgtgtttggcaagctcaacgaaatatgaggctgataaaaaaaaaatgtttcatgctttctcaagaccttatgccactaactgtgtgggattggaaaaactgtttaaatgtcaatttaaatactgtaaataaatgattttctatatccatatgaattaatataattctgttgatttcaggccataacttgaactaaagtttctttgaattttgatgaggaaatgtttcagacacacacaacacaaacttcagattaagtagtttagttcagtagagttgtttcagagtcagaaatgttaatgcaatactttattttacactatggagaactgactgaaaatttgattgacactaaggtttttacaaagcaggtcttgaactaaaaagaattagaccaaaaaagacaaaaatattatcgtaacagcccaagccattatacaaaaaaacatggtggtaaatcccattgcaaagttcaggactctcaaatactatctccaaaccaatcatctttgtgtttatggagctgactatccagctgccttcttgacccttctacctggtgtctcagggtcatctcaaacttcccttatccactaatgaactcttgactttctcttctggcaaatgttttggtatcctagcctcccacatctttagaggtgtttacaaagcatttatcacaatgcctgcctggtatgcagcactcgcttaatcagtgttgttgtggatgatgatgatgattattattattattaaataatgattatttttatccacccagttagttgagccaggaactaagtcattttctttattctcctcttcactgcatgttctacttttaatctattaccaacttctgtcaactctgcatccaaaataaatcaggaatctgacccctcctctccatctttactttcatcactccaattccagcccccatcacatttctcccaaacaaatttagcagccttccagacaacctagccatctgctcttgtccttactcaatttgttcatgggggaaataacagtaatcttcttaaagacaattcttcattttgagacatacatagagcatatcacatatttattaaatctgctaaacaaccttaagaggtaggtactgttattacttccattttacaatgaggaagtgagtgaagagaggttagaacatgctcaactttactctgcctataagaggcaaagccagaattcctgcctgggcagtctggctcgagttatgtgttcaactgctacacaaagtaccacaccatatccaaccttaaaaaaataacaacaaacaagcaagcaaagatcatcaacgggcttccattgcacttagaataaaatccatccacatagaacttgcctatgtcaaagggtctggaccaacttccttagcctcacctttcatgcctcctctctttcctcctgttcttcaaacactcatggacaaggcaagctgggtcctgattaggggtttctgtctatgctgtttcctttgcttgaactgctttcctaaggcgtcagtcacagggctggctcctcctttttctggtctctgcttaaatatcatctgctcaaaaagccttccttgacttccccaatctgatattaatgtttcctggcttcttgatctcaacacactgttgattttcttcttagcacttatctcaacctataattgattttacttgtttgtgcatttgtctattggctgtctctcttactgggctggaggcttcacaattagaaagattgtttatcactgtatttttataatctagcatcatgctaagatgctaggtttaggtgctaagaattttgataaatgattgaaggaagacaagtacgctttgatgatatgaagcatccccacacagaccttagattctccaagtgtgggcaaaagatcaaatacagaatcacctggggttactttttgttaaaagtgagttccaggagctctgagctattttaagcacttacttttgaggttcatctccttgtattatcaagaatttttacaattttgattttgacatgatttggcaataagtaattcatcggattctcgtttggctgtgattttttaagtaattattgtgcgtgttcaggaatacttgttaagagaacaaaatgtacattacgaattgtttttacatgtgatgagattgttaaaaatactagttgacaatgaaattggcacttgctatgtttttagatatataggtgagtatttacatcattactttgggagtcaataatttccttttcagcttgcagaaatttatatgagctcctgaacagcttgtggatcctctgccctgtaatcagataatggtgtgggatggatgaaatggaccagctggagtccagtcccaaattgatcataacagaacttctgatgtcaaggaatctgcattttaagaaactttccaagaaactcttatgcaaaataaaaattgaaagctgtttttctcatagctagatttatgtatgttattttagaaaaatttgcaatagatatccagtgttcactctttaaatttgtggttgatttctgagaaattcaagataatgtcccacaaaaagggaaaacattttgctaaggataatggcctccacctccatccatgtccctgcaaaagatatgatctcattcttttttatggctgcatgctattccatggtatatatccttagcaaactaacacaggaacagaaaactaaatactgcatgttctcacttataagtgggagctaaatgatgagaacacatggacacatggaggggaacaacacacactggggacctctcagaaggtagagggtgggaggagggagaggaacaggaaaaataactaatgggtactaggattaatacccgggtgaggaaataatctgtacaacaaaaccccatgatacaagtttatccatgtaacaaacctgcacatgtacccttgaacttaaaagctaaaaaagagaaaacataaaaatattgataagatcaccaagtgtccataaatgcaaattatcaataatcgttctggtgaaataaatcatctctgaaaaatatcttttgttagcctgcatatacagattgagagaaagggacaggcatttctcaccctggaggggcaggatgaaccatttgcccagatggaaaaacaaaagcaaggtaagttccttagcccatagcttcgctatgttttagactagctgaccccagccatttttggcaccagggaccggttttgtggaagacaacttttccacagacagtgcggcggggatggtttcagcatgaaactgttccacttcagataatcaggcattagttagattctcataaggagcttgcaaccaagatccctcacctgcgcagttcacaatagagttagcgctcttatgagactctaatgaatgccaccactgatctgacgggcggcggagcacaggcagtaatgctcactcctgctgtgcagtcccattcttaataggccatggactggtactggtctgcggcccgggggtcgggaacccctgttttagatgataagtggatgttaagaaaattaataattgacggcaggaagaggcttcctggcttgctcaaaagacgaaggctgttttttctcttttagggaaagatacccaaattccagaatttgaaagagcttaagttaaaaacaaaaacaaaacaaccagccatgtttttgacgtcaattaacaaatgtgagaataagctttgtggatgccacactcttttgagtgtctatcacctctctgaatgtaacataatgttggaattcaccatggctctgttcttgaatctcctttatttttcatctgcaattcctctttggtgattttaaccaaccttgtatctttaaatgacatctatgcactgatagttacctagtttatatctccaactaggacatttttttcttgaattccctgagttcttcaacttcttctcaatattcttctctatagtgttccccatctaagtcaatagcaactcaatttttccagtagatcaggccaaaacttccactctctatcaccaatgggtccatttcacaatccatagtcaatctgtcagtaaatcttgttggctgtaccttcaaaatatgtcagaatctgacctcttctcataatttcaatggttccatcttggtccaagctatcatcatctctcacttggattgctgaatgactcagtaaagacataggttctgcaaagcccttctttaaagtagtcatctctcctggttgaaggtaatttctcttgggaaaatccagattgtcaataagccacttccagtcatatccttttctagaaagatattaatgcagataacccagaaaaaaatacaggtgaagaaacacttccccaaatcccacagaaaggtttggagagtatgtttattctttagcagttcacaggatttttaaaaaattaacaaataaaaattgtacatatttattgtgtacaagatgatgtcctgacatacatatacaattgtgaaatgtcttcattaagccaattaacatatgcattacctacatagctgtcactttttgtggtgagaatacttaaaatctactctgttagtgattttcaaaataaaatacattgctgttaattayagtaaccatgttgtacaatagatctcttgaatttattccttttgtctaagtaaaatattgcatcctttgaccaacatctctccaaccctcagccccacccccaggttctggaaagcaccattttagtctctgcatctatgagttcaacttttttagattccacatgtaagtgagaaagtgcagcatttgtctttgctttctgtgcctggcttatttcattgaacacagtgtcctccagattcatccatgttgttgcaaataacaggaatttcttcttttttagggctgaatagtaatgatgcctgaattcccctctcttgctaataacaaaatagtactattatatgacgggtatttattgttctggttgacagtgtatagcatggacatgccacatgcattttggggctcagtgagctgatcttggtaatactgttccccacccacgattgatctcagaacccaggcctaaagccttttgtactataggcaccagcatgtgagggaaatgtggctggaagcctttggaaatgtttcctagaatgtaagtgagttataggcagaggaaacctttcttcttctatgccagagttactcagcactattgacattttgggttggatcattctctctggtggggctgtcctgcacaccgaagatgtttagaagcatccctggcttttactcacttgatgccagtagcacctctccacttgtgacaaccaaaaatgtttcccgactttgccagatgtctcctggggtggtcacccacagttgagaaacactagcttagacatcgtcatatttatccccaaactgccacaggttctgttgctatcagcctagaggtgacacttagagggacataaaatgaagagcactgcaggaaaaaggtcaagtcactggatgaaaccctacatacttatggattttggtgacatgagcctctaaaattcctaattatttaaggtggtttaaatggattttgcttttattataagccaagggcatcaaagtgatccaaggtccagaatcacaggccactgtacattgctttcttccagggcatcatactgcttggagaaatgacaccggccccaccttagagcaggattccatagtrcagctttacatgaaggatggcaagtagaatggctcatttttccatttcataattrttgcttatacactgttgttatggaattatagaattttagagcaggaaggaattttagggatggagaattaagctaaaaccaatgtctatgtttatcttcaaaggaaggccttcaaaagaggatcaagcccggtgcctccaaatattagggaaagtgccattatccacttcaaaacacatcctgagcatgacaagtcatgttacatcttgtgttaaaagcaaaaggaaatattttcttatagccacatacccttaaatattcccttctccataaatggaaattctatttggctttaacgtctacatcaattatctatttacagcagacttcctgtcatttccaaaagcagagttgtcatttaattctactatccagcaatattgcttttaatgtgaaaaatgatgaatagatacagctggcataattgctggactttaagttcatagcatagtggggaaaggaagaagataaaaaatacaatcaatttattttactgttttatatatatacatataaatctgcattatctttgcttataacagcaatttgagcttacaactaatgtaatcataaatataaaaataagcaaaatgagtaaaattaaaatcatccataatccaacaatcattgattatgtcttaatgaatattatcccctatattttttgcatattgaaattttcttctcaaaaagtatcatattattttgcaatctactatatttaaaacatccccttttatcagatatttagctgttacttattcatccccattgtaaacagtgctgcatatgaatagttggctgaaattattaggttggtacaaaagtaattacggtttttgccattactttccatggcaaaaccgcaattacttctgcaccaatctaaataaattatatatgcttagaaagaaaaatggaaggataaaacacaaatgaagaaattctgaaaaatggaccaatatgtaggatattgttggcttcaaaatcctgtgaggattcaactgttgatccagtccccaaagcaatcagatctaccaatggataagaaccagggcagacagcagctgccaagaagacagaggggagggaagagcaaaccagttttgcagtgaaggaaaccacccaggtggcagacttgatggaacaaacactttaagtgaacctaatggaaaatggttcaacaaatggaccaccagtagattttctcagtttataaatgatagacccattgcctagagaaaagaacagcttttattcaatcatataataagtaaaaggaaataatttgctcctctaaaaaagtcctgtgatggtaactccacatttctatatctatatctatatctatatctatgtctatctatatatctctctctcaaaatatctgtatttatatctgtatttgtattcatatttgtatttatacccatacctatacttgtacttacatatgtatgtgtcattgtacccacatatcttgccagccatccaaccatccatccatctacatagaagtgcttcttaaactggagtatgcatcagaatcctctggagggcttgttaaaacacagattactgggccccatccccagagtttctgattcagtaggtcttcaacagggcctgagaatttgcatttctaatgtttcagggtgatgcagctgctgatggttccgggattacactttgagaactgctgcttacacctgtacccctctcattctctctttctatctcattaccaaactctaatttaatgaacatacagttacccgcacatattttgattcattatcaattgtcaatatacatcacagtgttaaatactacacaaaatagatattatgctgatttcaaatttctctccccttaatttaataataaaattataagatacaaaaattattaccatgtatatttttcctcccaggagaatacttaaatcgtggtacatttcttgcttttacttggttttcactgcctttggcttctaacttgatgtatttacatcttaatggttcagatttattttccaaacagtgagatgaaacagggacaactcaaaggcagcttcattttgaaattggccaggcttttgtaaacaaacccttgacagagcaatttctaattctctaaacagctgggggggaaaatatcacacagaaaagcagatgttattcgcgtaacttctttttttcaggtctacaatcatcatctacagcaccggatccaccatatcacttcaagtaaattttgactttgctaggtttcaaccacattactcacattggagatgtgagtcaaagaataaagcttctcagagacagctctgtggatgcctcttcatgttaggttgacagcttttgatttaagcgttctgttagctcatgactgcagcatgcaataggaacacagttcctcagatgccaaccctaacctaaataaaagctagaccggcatctcctcagggtcaagttaaagaatatgggctgtgctgtctcagacctcagcggctaccaattagtgggagacaagacatgtataaaaggaaatttaattggtaattttaatggataaacaactgcagggttgagagaaagaggtcacttgtgctggtggagttggggaaagtttcatattccatgcattcagatcttgagaaacaaaggttatatctccagaaagcaaaaggcggacattgaaaagggaagcaaatctttacagatgaagtcacagcaaagacaatctggagccaggaattaacgtgtgacaagagagggaataatcccagggatgatgaattttactactgaaatgattataaattacagccacctacaacctattgtgaatggcttttatggtatcagaacagaatagttaaaggaataggaaaaaatcttgtgccctaatgaagaaaagggagatgtgtgttttgctcaattcaaagaaaatatctctttacacacacacacacacacacacacacacacacacacacacacacacacaggtgtataatatacacacacacacatatataaacgcaaacacatatatgtgtatatatatacacatacacctacatatacacacatgcatacacacatgcatacacacactcagaccttatggaataattctaattatatataaggtctccttgttcccattaaacatccaaaatgcccctagttgcaaatacttcagcaaatagtccctgaataaaagatatagtcagccaacattgaaataaagctgttactacaaagaaaaatattttgcaaaagaracagctcatagactgctacaatacaaaagtctgcattttaagagccataactgtatatggatgtaagcggtgtttttaatgttaaatacatgttcaatatttattactttttgtaaattgtgccatgaaggaaatttactggaagcaacaaaatagaagaaatggtaacaatttctaagtgttttctaatgtaacaatttggcctgtagttctaatttatttaaaaatttgttcaattgggcacaaatttagttgcacagtggtattttgatgtaaaagttagtataaaaagcaggaaaagtgaacatttttcaaaataagtaccttttctaaaaatagtaatattttgaatataaaaatagtgcaataaatgctactcacaagtaacttctcaataaaatgaatgattgaataaaataatacatctaaatttgctggctctcagatctgagctcccagaacttcaacagccacacacatatacgcacacattttcaaattcaatgttatcctattaaaaataagcctgtgttaaaagaagttgtaactgtccatcacaccaaaaatgcatagtttagccacagccattatagcaattttcatattattcaaaaagaaaagattctaaagagtacaaataaagcacaaagcagatgttcaaaacaagtctgcatcaaaaattcaaaaacatttgccacaggaatggcgcactttcatcattaatatacacctactatgtacccacaaacattaaaaattaaaacaaattaaaaataaaaaagaaacggatcataaatattacagctgccagtttcctggtgagaaatctttgtgaagaaattgcagttaaagtggcgctctggaaaataagataaaatgacaattaagagattatcttttctttctgctgtgacgtgacatatgtgagtaagactgttggcatacccacagatacagtgatgcaagttaacatttgcaaaatgtcccaaatctgaagaacatctcaagaaaatcactggagaataaagaaaacattttattgatcatctctacagtacagagtttctcaatcttggcattcttgctatttgggcgagatcacttgtttttgtggtgggtgttgctgtcctctaaactgtgggatgtttagcagcatccttggccagtagcaaatcacccctcccaaatgtgaccacaaaagtctccagacattggcaaatgtgtcctggggggaggtacaaaatttccccagtgaaaaacactgatagcatatttttyttttttgagacagagtttcactcttgttgtccaggctggagtgcaatggcatgacctcagctcactgcaacctctgcctcccaggttcaagcaattctcctgcctcagcctcccaagtagctgggattataggcatgcaccaccatgcctggctaattttttatatttttagtagagacggggtttcaccatgttggccaggctggttttgaactcctgacctcaggtgatccacctgccttggccttccaagatagcatacattcacataaacttatttgatcaattgatgtggtaaataggataaaattgtccacaatgttatattcatacagaactcattctgtgaattttgcctaagtgttgtatgtacacatttttcatatttaagcacaatagattgacaaatctggagtgactatttcttaggtataaacatttttaaactctactagaatgcttctgctgattatattaaaatttgaaggattctcacccagaagttgtgatttggggtttaacccaaaatgttatcactgctttacatgatgtaacttatattatattttggataaaggaaaacaatctgtttctgctgtttgaatagaagctccaagtaatattgctaagcatagtataccctgaattctgaaggttttgatattagttatcagaaataccttagatgaatgtgaatggtttgtaacaattattcaggaatgagctggaaaaacttctccctggacagaactggcaataatgtggaatattacagaaatacttaattataaaaaccatacaagtcatacttttgtccttaaaacttatcttagtcaaacacgctagtaaaatgaacaaagagaaagtatgaggggacttcaaaaagttcatagaaaatmtgcattatgaaagaactatacaaaaatttcaaatgtatattacaccaaaataaattcttactaacttgttataacctgccttaacaagatctagtttgaggcactaagaaagataagacatcagtttgaaaagagcccctgtcagggaaacatgaattctgctaaaattgaagcaagaacaaacatcaaatttatggtgaagattgggtggaagaatggtgaaatcactgatgctttattaaaagtttatgaggacagtcccccaaagatatcaacagtttgcaaatgaaaaactcattttaagaagtgatgagggctgagtgtggtggctcacgcctgtaatcccagcactttgggatgctgaggtgcacagatcacctgaggtcagaagtttgaggccagcctggccaacatggtgaaaccctgtctctactaaaaatacaaaaattagctgggcttggtggtgggcagctgtaatcccagctactcaggaggctgaggcaggagaattgcttgaacccgggaggcagaggttgcagtgagccgagatcgcaccattgccctccagtctggtgacaagagtgaaaacccccatttcaaaaaaaaaaaaaaaaaaaaagaaaaaagaagaagggatgatattgaagatgaagcccacagcagcaggccatccatatcaatttgtgaggaaaaaaattcatcttgttcatgctctaatcgaagaggaccaatgattaacagcagaaacaatagccaacaccatagacatctcaattggttcagcttacacaattctgactgaaaaattaaagtcaagcaaactttacgccctaaagttaccaaaaccattgcacttagatcagctgcagacaagagcagagcttttgaaggaaatttttcacaagtgggaccaagatcctgaagcatttcttcaaagaattgtaacaggaaataaaacatggctttcccagtaccatcctgaagacaaagcacaatcaaagcagtggctaccaagaggaagtggtccagtcaaagtaaaagcagactggtcaagagcaaaggtcatggcaacagcgttttgggatgctcaaggcattttgtttgttgactttttagagggccaaaactcaattaacatctgtttactatgagagtattttgagaaagttagccaaagctttagcagaaaaatgactacaacaatgctcctggatcactcctcttatcaaacaagggcaattttgtgagagtctctatgggaaattactaagcactcaccttccagtcctgatttggctccttctgacttctttttgcttactaatcttaaaaaaaaaaaaaatctaaagggcacccatttgtcttcagttaataaaataaaaaagattgcaatgacatggtaaaattcccaggacccttagttctttagagatggactaaaatggcgggtatcattgatcaaaaaagtgtcttgagcttgatgctgagaaagtttctatttattatttcttatcttttcatttaatttgtcccatgaactttttgaagtgctctcatatatgcagcacaaagtagtggttggtttcacttaaaattcttttgagacggagtcttgctctgtcgcccaggccggactgcggactgcagtggcgcaatctcgactcactgcaagctccgcttcccgggttcacgccattctcctgcctcagcctcccgagtagctgggactacaggcgcccgccaccgcgcccggctaattttttgtatttttagtagagacggggtttcaccttgttagccaggatggtctcgatctcctgacctcatgatccacccgcctcggcctcccaaagtgctgggattacaggcgtgagccacacttaaaattctttagtctgataaatgttccaaataagaaaaataagaaaatgtttctactaattctgtttaaagtgtgtgactgcattgtttaatgataataaatctagagatcaaaatgcttatcaatcactattaaaattataatgtattcactgacaatacaggaattactcaaatttaccaagaaatgtgggaaatttttaagaataataagcatatcaagtgggtgcaacatgcttacttcaataatacaggacaaaatatgaaagctattatttttttctgaattgttcatttctttgtataattttctaatgaagattattcatttaccactaaatataatcaaattattgtatcataattaaatgcacaaatgagaaaaaacacctttgttagtctctacatacaaatttttctttcagaaaatgttgtcactgttattcacattcctacacagataacatctgaaacctgtattttggtttctgtaattattatttattattgaagtgaaaattatctaaaatatacctcatttgaaagagaaaaacatcctagaccaaacttatttttaaaagtagttatgctattttgctagaaatatgctaatttgctagattagtagctctcaactgaggatgacttcacacccaataagacatttagggatgtctggaaacatttttggttgtctcaactgaggggaaggtgctactggcatctagcggctagaaatcaggcatcctgctcaacattctgcaatgcacaggacagcccctcacaaaaaagaatgatctgcccccaaatgtcaatagagctgaggtttagaaaccctgctacacataaaattgtttcccagtttaatctgtgcaacaaggcaagaagcacgcaattcaaaatggtgtgaagagaatccctgtttagagagtatataatgttttaccaaaggaatttttctttttctttctttctttctttctttttttttttttgagatggagtttcgcttttgttgcccaggctggagtgcaatggcatgatctcggctcactgcaacctccgcctcctgggttcaaccaattctcctgcctcagcctcccaagtagctgggattacaggcatgcaccaccacgcccagctaattttgtagttttagtagaaaaaggatttctccatgttggtcaggctggtcttgaactcccgatctcaggtgatccacccgccttggcctcccaaagtgctgggattacaggcgtgagccatcgcgcccagctgggattttttttttttcctatggaaagcggaatttaaattatcccttcttgctattgttggcacctcacaaagcaggaaacacagttgaaggttgaggggatcatgtactttgatattgactcaaagtaatgccttcactataaaacaggaatcacttgacatgctaagaaaaacccatcgtagaaatcaatataactaaagcttgaatgaatctgagtaactctttttccctcgatgtcaaaagtaagtggtagcctgtattgcttaggaggcactattaaaaaacaaacttttaacagccttaagtaaacgttttcattttccataaaactaaatgatggcacagtaatatgattgcttacagctgcaaatgcctcatcatgaactaaacacttgttaaactttgagtaaaatttttcttcaatggcttacagtaaaataaaagcatttttaaaaattatttcattaaataatgccatggcagaccgcttagttaaataatgtcatagacttgacccaatcatccactgatttcatgataagtacacattaaatctaaaaaaaacccctacatccctaaatacaaatgactttataattttacattagggagtagcactgtataagttactaatgttttgtcccacccaaaggaaggaaaaatagaaaacttcatgctaggaaggaaaaaaaagtttcctatgtgtttaattttcctaaatgtccaagatattctttagattacatgtcatcaacacttcaggagaaaggtgtcaagtttctgaatggggtagtaaagagaagttgaggtaagaaaaggacatctgacattcattcctgctaagaaagaaaagaaaatcttgctcacacatttcgttttaaagacttgtaagggaaaagtttgtctaaaatttcaaataatacaaaacaaaacatattcgtcattcactttttagtatgcattacttcaatcagattgttttgttctaaggccaaactaaattcagccctttaaagattggaaaatatttgatgttgctggatgttttgcaaagtatcaaataattttggaatgttgaacacctatgggaagggcatactaagtgagtaccataatccagagggatgttgtcaaagataggtgagtaaagaggcatttgaataccagcaataagccaaaaaatgtcactcctcctaaacacagatattatgggttcatttagtgactattaccatgtcctctattggtgccagggatgtaggggctcaggtaaaaagatatcaaaaagtcaggtctgagcctgacttcacaatggtacctaggaatttgggggcaatcataacctgcttttgagtataatcgtgtgctacagaggaatgtagattagatttatcaaaacaaaagtcctggttattcatttacaacaggctttgtgaccacagaagttatcccaagtctttgattattctacaccattacaagatactttacagggttttaaaggtactttacaggtactttacaggtactttacaggccaaaaagcatcaacaaagacattgctgatttagtcagcatctggcctgcttctctgacatgcattaatatggaaccctttcaaaccatattcagtgatagttcatattgaatccttcacattacaagataatcacttttgtggtaaattattttgttttggtattagattggtgttaatttttctcatttcatcgtgaaggaaggtaaaatgttgtctaaagtcatttctgaactttgcacatacatctccaaacatctgagcattattattctgtacaggagatacagttatggtataggaaggtacaccagtgactagtggaccagcatagggctggagagggtagggaacattaatgaagtcatgctgaagtccagatgggggagccagcctccgatagattctaattcagatgcagcatttattgagtaatttgggagcgagttacctacatggctcacttttaaaatggggataaaaatctcactctactaggatttttgtgaagttgacaaagattctatgtgaatgcatgatgagttcttagaaaccagtaacagttaactgaattcagtgcctgaccaccaccactcttttctgtcacgtctcagggtactctgccacactggctaaaatccaaaggtttcctaccaattctgtcaaggattaatgatgtacaagtgtctgcccttgcagaacttctagtctatcctcatagttgttgagaatttctgggaaaatctttgtttctgcagcttgtttgaggtattttatttttttcaccaccaaaaacttttcagtaaaacctatttctgagtgtggagatatcttcgtctcccaaagttgctaaagggcacctgaagccttgatgtacaaaaattctaatttcaatttaattttcaacacattcaatccaaagactattaactcatgtagctagatcactcttcagacataataactgaatgttctaatcaaaatctcccagagttacaaaaaaatctaattctgcaaaagacaatcaatgtaataattacagaggtattatggtgactcattagaaaaggcaagtgttagaaaggagctttttctgtaaatagcagccctatcatctttgcaattcgactaatcccattacacctacacaagaacgaatttcaaactttaataataaatttcatgaaggttaccgagcccaggcaatgttggcaccagagttatgagatcattatgggaagttcgtgaacctggtgctagagagatgattcatcagctctctgtaagatggtaaagattttatggatcaacatgggagtagtcatttttcaatatttcaaaagcctggcttgggtattcaacagtttgacatacttagctgtagcagcagccacagtttgtttagtcaggggcaacaggaaagagtgataaattagaaaacgtcaagccattctttccctcacctgcctgactttaagtaattaatgacagctgttttaatgaattgattagtttaataattgaaaaatgcaagacactacctttatttctgttatttctcccatctccttctaacaagatgttcaagaattgtatctctgttaaagtacaatcacgtgtcaatgatgaggatatatcctgagaaaactgtcattgtgaacatcatagagtgtatttatacaaacacctaagcattatcatacagtgtggcagacatacaaagagttacatacaaaaaggtacagaaaggcttactagtgacctagtggaccacgaagtgaacatcatagcatgtacttacacaaacctactacacacctaggctagatggtacagcctattgctcctgtaatacagacctgtacagcatgttactatactgaatactgtaggtaagtgtaacacaatagtatttgtgtatctaaacatatctaaacatagaaaggtagagtaacaatatggtattataatcttatgagaccactgttgtctatgtggtccattattgacagaaacatcctcatttgtaacatgactgcatattcgcaagtggattccagccaccattttacaataacaacaacaactacatgcacaacagcaaaagctaacaattttttagcactgactacatcccagctactgttataagcacatctcaaggtgttccaccaagctggtgaggctgggggatgtcagcaatggggttaaagggtgcaaagcctcagaaacgaggaagacatttgagttttttttgagatctgctgcacagcatgttgaatatagctaataactgagtaccatacatttcataattacagagagtaaatttcaaatgttctaatcacaaaaagattaaatatttgggatgtatatgttaatcagctcgatttaatcattccacattgtattcaaaattcataacatcacttttcaccaaataaatacaattataatttattaatatataattttaaaaattctgagagcccactagatttctcaagggttaacgagatgcatgtgggtcttagaacgccaggaagcatagcaactatctccttggcgtctctgaggaggatggtcttgaaaaccagataaacacaatcttttacacatcccgcaaatattaactgagggcttcgtttgtgccaggcatagagctctatgctctagatgtgtttactcatctaatcatcacaacaccaccattgctcccatttcacagatatttaatagaacagtggagaaacttgctcatagacccacggtaagaaggtggcagagtcaaaatgcagagaatagatttagcaaatcaattggagtcacccagtgaatggtgtcatcatctcagcacccaactggaaagctgcaggatccctctcttcctttcctctctattctcatggatgttagaatagtgcctggcacatgttcagcatgttagaagaattttgttggggctcagaaaacagtatctcaaaatgaagactgctgctgagcagcttcagaagcaaaagtttctcctgaccttctcctgtcctcctctcagtcccattttgccctaaggatagccatggaaactagaatcccttttccccaagatagatcatacaaatcagaaccccttttcytgaaagtcagtcataaaacctaaaaatattctacgtaaaaactggccatgaagaaatgatctgacctaactggtttgactgtagatcctaagactcctgttccagacagggtcctctctcacatcaagaaggaagaaatgcttctcagagaggccaagaataatctagatggacaggccttactgggtttcccctactcagtccattagcatttaaatcagaccctttctgtccaatcacatttctacatggctgtccacatattgttgaacctaagcataaaaatggacaactgtccattttcccctgtatgttaggtattcattccgaaggtttctgtgtatacaagttaaataaacgtgtatgccttttcttctgttaatcaatctgcctcatgccagtatattttcagtgaccctttagagcgcaaaggggaagtttcttcttgactcccttagagttagtaaatgaaataggtaaaagacatgagccaactgctcccactaaatgagtaaaaccatgcttaagataggcagaataaacacaagcccctgtaagctgcaaagtgaaggcatttagtcaggcccactaaacaaattctctatgtgaattcaaatgctatagatatgttactgatttactgtgttattcttctttattggttttggaggtctgagaccatcacaaagaggctcttgtggtctattcttggcatctcacaacatctcacaatgttgtcatgggtaagataactgataactgtttgttgattagactttcctgggcaaatataactgaatacagagaaatcatagacataactggctatgcttactttaaaactgtgaagctctgtataaacaactaacaaaatggggcatattgctaaatcaatgagagcaaagtacccaagtccaaggctattttcaaatgatacgtttacctcctcacactaatctattcattttcattctttgattggattttaaaggtttagctcaagtgtggttctcaaaaaaactagacatattacttccacctagtgaccctcttgccgctatatttttcccaccattttcatgatcaagctactcttagatccatcccctagaaatatgctttctctgaataatcaaattattcaatccttttttgtagattctgctcagggcttccctatgacgtctggcttgctctggtattttgggtgctgatgaatcttagagatatacacatatattctcattaatttgcaacttttttcttgatgcaaacaaacacaaagcaatcaaaacaaaaatgttctagaggacacatacattcccttatccacagtgcagggccacagggtacagacagcagaaagtcatgtgttttggcttgctggtamtaccagagatcttcatccctatgctttgtgaagtgaatacatcaaagtgcctctcttccaagatggtttgactcaagttcatgttgatgaatgcattttagactaaacttttttattttgagataattttagattcacattcatttgtaagaaataatatagagccatctcctatactcttctcccagcttcccccagttgtaacatctttcatgactatagtataatgtcacagccaggaaactgacattgattcaactatcttatttagaattcacaagttttacatgttatcatttgtgtgtgaatgtgtgtatgtgtgtgtatttagttatatgcaattttatcacatatgtatctttgtgtgacaaccacaatagtcagggcacagaacagtttcattgccacaaggattcctcttgctacccctttacagctatttgcacctccctctcaactcatcatcttcttaaatctagcaaccactaatctgctttccatattcaatgaagggaggatgtccaactgggcagaggcaacatccagcaggagacaattacacaatcatcgaagaagatgctcagataaattgcagttaccttctccactgagaacagtaaggctatggcgtcattagaaaattatgttctttattcttaaataaatccaagtaggatggggcttgatatactttggctgtgttcccacccaaatctcagcttgaattatagttcccataatccccacatgtcatgggagggacccggtgggaggtaactgagtcaatgggatggttaccctcatgttgttctcgtgatagtgagttctcacgagatctgatggttttataaggggcttttgccccttttgctcagcaagtcttcttgctsctgccatgtgaagaaggacttgtttacttccccttccaccatgattgtaagtttcctgaggcctccccaaccatgctgaaccatgagtcaattaaacctctttcctttataaattacccagtctccagtatgcctttattagcagcacgaaaatggactaatacagggtagatggtcaatccagcagtagaatgggatgaaaatctaggatagttaaaaatctttgtgcataaggaaaagaatagcatgaaaaaggagaagagatagccttttctttttcttaaatgagaggaaaaagcaccttttattttccttgctgcagtggcagcaaactcattggttttcataaaacacaacttctgcgatatggtctgttgataaggttgctccatcatgggaggacaaacttgaggctgactgttaatgacagaactaggtcttctctcaaagcctctaatgtgtgctatttctcatgaagaacccctgacaccgtaagatgcttcagttaaagcttctgaaatattgcagtggcataattgacaagttttttggtgctatgagtttctcacacatgtaaaccctttcggaaaagttggagataaaaagatgggggagagtttggyttagagtcacaaagttccagataccagccacagatgcctctgcccaatgtcgctacatgttcttttctgagaaatgcattcaatcactcagtattacgcactgtggttaaaaaaaaaaaaaaagatctactcaccaccatctaccctcccttatcctccatgtgaagctcacggtagcagcagctgaagacagaaaagttgtacctgttccctcacaccagggacattacttggtgacctggtgaatggcataggcaagattacccgtgttgctggaggtgatccctgccacagggatgcagtcatcctttgtcatacagatggaaaaccccttggttagcttctccacctgttcaggctttagccttgtgaaacaaagcatgccaatttagtcagtcatgtgttgtcagatgtgtgaggaactctccttactgcagttggagatcagctgagtctgcatgctagtaatgcagttggccatgattttcacttcttgcaaccattattttcacaaacccaggctgttcagaatggtagaggcaatacaggccccactgagagaagggttggaatacatgggatggatcaggatcttcaactgactcccctcttttggtttcattcactgtctttgcagatcacagtgaaggctctcatacactgaccatataaagcccatgttcttggcacatgattgacagagacaaacattaatgctctgttcaatgaagttgcacacagcccaggcatccttgttaccatcaccactggcaaagccttggtaggccatatcaaagaacgcagtttctttttctttgccactattattatttcctttcactgctttgcatgagggtcccaggcatgcaggagaagagcactttgctctggtatttttgaaatgtcctccatagcacccgtgaagtcaaaactgcaagtcttggggttatagaattgataatcttgtagttgcatgccagctaccctgaagataggtgtgtgatttccccagggtggtttggacagagacatctctgtcttcaaaaactttaaaaatctttgcacaaaactggctccaacccttaaaccccagttccagaaatgatccacacagtgacagactggccacttttcaacactttgctcttctcacccaaggctggttctgcagatgccttggaaaattcagcttgtccccaaatgggcaggtattccttgtctaaatttttttattatattttaagttctggggtacatgtgcaaaatgtgcagttttgttacatggatatacacatgccatagtggttttctgtacccatcaactcgtcacctacattaggtatttctcctaatgttttctctcccctagcccccaaccccgtgacaggccccggtgtgtaatattcccctccctatgtccatgtgttctcattgttaaactcccacttatgagtgagaacatgcgctgtttggttttctgttcttgtgatagtttgctgagaatgatggtttccagcttcatccatgtccctgcaaaggacatgaactcacccttttttatggctgcatagtatcccatggtgtatatgtgccacattttctttatccagtctattattgatggacatctgggttggttccaagtctttgctgttgtctaaattttttatggtaatctaactgggtctcttattgtcccggtaggcaccaactcccagattcatctttttgctgttgatttccctcttaaaggctttggtggttcccaggatgggatctggaggtctcatttccacatgggcccacaaggagctggctctggcagaggccatggtggggaggcctaggtaaaaggtggcagcgatcccctagaggacacggctggagtggagcagggccgggtcatggtggaccttgagagtgcagtgggtaggcacaggacaaagtagaaggcaagaaggtgcagaaccagggggcatggactcctgctgaaggtcttgttttgtattagaagacctccacagtggagtgaaaaatgaagtcacttctctgtatattttgaattaaagcttgcacaggtgtttcagcctgctaaatagttcaacctggactatttcagctctgaattattcaaataattatttttaaaatattttaaatttaatttagcacacagagaatgcctctgtgtgaagtaagtggtggcaatttaaaataactaatgatcrtaattattggaatctagtctcctgggcattttctacttcataatttacagggagcctatgagagttcaaacacactgtattttcgccaaaggagtctcatgctttgtctgcattttatggcttcctttgcacctggagcagctattttaggactgtctagacaatcaccccagctttaaaggtcttttcctttcttttcacatagtcactgagcatgaaggataataaatagatgacgctggcactctctcaccaaagatactattcaaatagagacaggaacaagaaggcctttgctctggctcacaaaatcaagatgccttaatatacagccccagatgtctaccaattggccaaacttgaaaccaacaagaaggccttccaatgtccacatctctgtagtagctggatcatactttttggttgagctgcgtgaaatggttactatttgaccatcttggacatataaaaatggcaatttaagatgtttcgatccaagagatttgggaaagaatttgggagtgctctgtttccttttttcctctccaattcccaagcaacattcatctgggttctagcaaggacccagaatgcacagcttctgcaggccacttttgccactacagggaaataatgcagccaagcatgattcaggaacatttcctatatacgtgtcctaggtaagacctaaaagttagtaagtaatatatcccagggagacgtacaccgggtcagtttacttcacccctcacagtcatttctttcaagaggtaagagacaccttttaagctctccacaggactcctacagcccacctgtccccaggctctttaatgggttccgagattgcatcccaatctcagaccctcctgggaatattcctacttggtactctctgatggtgaaagtatttcattttgtaggaaaaaaatacacaagggtagatatctatagatatatagatgtacattgcatataatatacaatataatattcaattacattatatacaacatacactatatatgtatttttacattatatactatatatataatacgtcacctagcaatgatcagttttatttgtttccttataatgttagagtatttctcagtacaacaagatgtgcacatattaattttctgctaacatcataccatttctactgtcgtgttcaagagctatctccaccctttactctgtcccactttctccactgatgatatgtgtaacatgaatcagtttggaggtctgaagtccaaagcatttctcctgagtataaactggagcttcaaaaacaagagcagcccaagaaggctgggccaagggctgagaaatttcatatcagtgccactcacaactgcaaactttgtgccaggcactgggctaaatgcaatggtaagtatggggatacaaagtagatgaatactcagtctccacttaagcagatacaattcttataggggaataaaattacaacaccaagtggagcaaacacagcatagaaccaagtcaacagatgttgtcttacttcattttgtgttgctataaaggaatagctaaggctgggtagttaataaacaacagaggtttattttggttcaaagttctgctggctttacaagatagatggcactggcatctgcttggatttcagcagagcttttgtgttccattaaaatatgtctgagaaggtcaaagaggaagcagacatgtgcaaagagggaccaaacccaggggtgtcctggctttctagcaacccactcttgcaggaactaatcaattcccctgagaaccaatctagtgtcaagagtgagaatgccctcactgccatgagaacagcaccaagccatttatgagggatccatccctgtaacccagacatctcccactatgccccacctccgatatcaccatgctgaccgtcaaatgtcaacatgagatttgatggggacaaacaaaccatgtccaaaccacagaaaatatggattcaaattctccgagggccatggcttatgagcagcgttattagggcaatttgcttaacttaccctatttcctcccttgagtatcagttaataataatttgaatcttacttggcatttaataagataattactgaaaatttatgtcaggtagagtgagactggcaaacttaaaatactataaatgcaagctcttatttttagtgagcatccactgcatgcatatactaccccatttcatcctcagcagtctcaatcttttaatgtattactactttcttccttttagatagacaagttgggcaaaaataagttaattaatctccccactaacagaagactctttcctgcaggaaaataatgaagtcccgaactgaaggcaaacttctctaaagtcatcagcaatttttcacttctcaattgccaatatcttctcactttgtcagttttcacttcccagacactccttcaagcaactcaatctgttttctacttccactattcagataaaactggtttggtaaaaattcccaatgctgccatgttataaagctgaggggcgactattctgcttttattctacctgatccctcagcaccactaaacctagctggccattcattacctttgccatctggacctcccccagcttttgctatacgcaccccttttctctctttttccttcactagccacttgctctaggttctttgctgctgcttctgctcctttagagctctaaatgctggcactcctcatggctctgttgcaggccaacatctcttagtcaatccttctgaagatgtgtctggaatttgtgaacctcctgaatcagctccaccagaaagaaacaagcttcatgagggaaagaacttttgcacataaattgctgaattcccaacacctgaaagaatctcaggcacactccaggtgctcaacaaatatttgctgaaggaatgtgaattgcctgaagtgcttgagatgttcctgggatgcccttctggacatctaaattggaatcacagtgcatctgagaaccaaaatctctggtcttctaccacaccgacttttatccatgttctttccttaatctgatatcctctcccacttcctcattctttaatgcgcagggaagcctttcctgaccctcacctccacccagatttagtcgaatctccctctcgtgccctttcatagaaccctctcctttgtggtactgaggtcccttaaattttacacatatctgtgtgactactgccagcctgtctcagatcatacaggcttgcactcaccatcatacctccatttcctcactaagtctccctcatggtgggccctcaataaatatcagtgaataaattgttaataatacagattttatattaacgttaatatatcaaaatataataatatatttaaattgtatatttatgatataatgaataattaaaagttaaatgatgacacaaatttctctctcctcagctctgagctctcctctgaattctacatgcatatccccatctaggggcatcacatctccaaacggatgtctaatgggtttctctatttcagcctgtccaaagccccagcttttaaattttccaatacaaacttgtttctctctcaatattttactcatgttagtaaatagcatcacccacccagttgctcaagcaagctcttgagagtcacatctgattcccccttttccttcaccagccccttacccatatctaattaaacacttagtcctgttgcttatacttctaaaatatatttcaaatccatcccttctccatctccacagctgctgccaagcccaatcttccattaacagtcaactggatggtggctgcaaatcaactggtcccctgtatccattcttgctggtctaccacagattttctacacagagctcaaaacatcaatcaaaccatccccattagagccccatcctaattcaatggcttctcactgcaatgcaatgaagtacatacaccttagtgaagctctgcctatctatctacagcacctcatggcattgctcccttcactcactagactcccaactctcttttgtacatactgttccctccgcctggaatgattaccccatgtgtccccacccacacctcacacagctggcttcttctcctcctccagtcctcagattacatgctgccttctcagagtaaccttcttaacagtgtctaaaatagatttcggccgggtgcagtggctcgcgcctgtaatcccagcagtttgggaggccgaggcgggtggatcatgaggtcaggagatggagaccatcctggctaacacggtgaaaccccgtctctactaaaaatataaaaaattagccgggcgtagtggcgggcgcctgtagtcccagctactcgggaggctgaggcaggagaatggcgtgaacccgggaagcggagcttgcagtgagccgagatcgcgccactgcactccagcctgggagaaagagtgagactccgtctaaaaaaaaaaaaagatttcgccttcagatatctgttgtcacagaaatatttctgttctttacacagcatttgccacaatttggaattactgatttactactgttcattatcttgtttccagatagaaacttctatgtcagtcttgttcaccatttcatccctagcacctaaaatggagctcagcatagattatcaataaacggttgttgcatgaatggacagagtggagaaaaacggtcagattaatacagttccaacagatcaatggttgccagagcctgagggtgaaaagaggggttgactacgaaaaggcagaaggaagagatttggtggtgggggtgggggtggggggtggtatatatagaattcttctgtatcacaattgtgatgttggctacacaactttatgtatttgtcaaaactgatagaaccataccctccagaaggtcaattttactctatgtaaattaaaaaataaattaataaaattatgattccaaaacccatgtcaacccagaacaaatctaagattccaagattcacaggtttagagtttttttgttgttgttgttctggtggtggagggttcagttaacttcctgtgttcatggtcaaagtactgactcaaaacatacttccctatttttcatttatcagtttaaagaaaggaaaccggaaacaaaataaagatgtgaaagataaataatacaagaaaaagcacagtagtaaaataatatttaaactaatcatgtgataaaatgtcagcatttattcatgacatttggctctgtttgtattggatcaccccagcagggcagtggctgtgggttgatttcataatagtgcctcccacatgtacgcccacgcctgacctctgctttgtgcagttgataatgactaaacttcacatattatgctgacaaaatctactccttccctggagggctgttacacacagggaattggagtttcacagctgaacaatgtttctttctcaaattctgggatgatccacttccattagaacaaagttatacgggctgataaattgctgtcttttgccaaagtgttactcatcatcgtatattcacccaacagatgccactgagaaaccccatcctatcagggggaaagaaggatgcagagatatgaatagactgtttagacacaagttgcattccctaaagtaagcacatgacatacgaatttcaccttatgacatttcccccacccccacccccactgactttcatccattagaacgtgttgatggatataccatttcaaaatgaaatatttggatatctgactctgatttggggaaaggggaaatggtgagctaatttcctcttttatcaagctgaatcactaagttcgctctgttgccatgcacgcataagtaatgccatagcaacctctcagtttgctcttaaacacacaacagcagaagtatgcgaataggtacattttttaatccttagattttcttagcagcttaagttttataagacattttatggcaccggattatttagttcacctttggtagtcttattgctgactgacacatatatcatcaataccagcacaacagaaaggcttagttcttggaaaattttccaataactttcctttattctcaatctctagctcacaattaaaaatttgcacattggacgctatagtctggatcctcttcaggattttctttataaagatcctaactttaaatgggactgaaatatataatttgaaattcatgaaatatagaaatacatggacctctcatatagctatttaagtaaattcaatgaaagtgtcattatcacttggtatgtactaggaattatgtcaggttctagaaagaaagaaaatctttactatcaagggattcagatgaactcctgtagaaaataagggatgggtactcttgaattctgccactttgaggtttagatttttatgcctacaaaatatatggtaacacctaactttatactagtttaagaaaagtccatctaaattgagaaaatgtggatttttaaatagttttattacctcatgcatttcttcacaaatgtgtacacttctttctactggatgacaacaaaatgagagcactagtactatggaaatgccttttacaaaacaccatgtcactgctctctgtcaagtgtctttggctgatagactggatgaataattgacttgttcttgaaatacctgaaatgggcttcagattccatacttgaatctaacattatttagccacttctgccaaatattttaattacttaaggagttaaggttttgttattttatagagaggcaatacacttcaataaaattttagatatcccatccacccttccatgagcatatgttaatgtatccaaagctaagggaatttggatcaagtcattttcacttaagcacttatgtataatttgaaggatacacatcaggaaacagaaaatatcaactttctcattgaccagatgcgtttaaaaatgtctcagtgaactggcatcccttcatttccgatcaggtagagagctgtgcattcataaaactactaggcttgttcttaagcaaagcttgctgttgctagctcttgctgctcttagaagtgggagcaaaaggtttgattctatagggctgtcctgattgtaactatagaattaggaagccctctatatttcttgatgaatcatattttaagttatttgtatactatgataaaatgatttttaacttttaggaatattaacttgaggccttaatagatggtccccagggttaatattcatttgaaatgctaatatagagaaattctttacattaatgattgtcaaagtatagtccctaggagagaaatgtcaatcttagctggaaacttattcaaaatgcaactgtttgaaccccaccccggacctactgactaggcactctggagatgaggccggcaatcagtattttaacaagccctctaggtgacttcaatgcactctcaagtttgaaatccactgctttatataatacacattgctcatctgggataatacatacagagcaatttatgttgagaaatagctcttttcttctttttgatggtgtgttgttttttgtgtgtttgcttgcttgttttgtattctgataaaagtaattgaaaatgtttaatataaggatttttgcctatcccagtatggttatgacacaagatcacttggttcctgataaactaaaaagtcattgtaaatgttgttttgaagaacaacctaattaaaatatattttattagcagcaataataagaggatgactaatttgaataatctagcaacttgagactggggaaacaatatggcttagagtcagagggactttagtccagcttaaatcagggttactcaatataagcattattgacctttggggccagataattctatgttgtaggggtgctataggatatttggcagcatccctggtctctacccactagatgccaggggatgccccttctcagttgtgataataaaaaatgtcccattgtcagatgtccccttgcgggggcaaatagtccctacttgagaaccactggtcggtccattgggggttctcaacctcagcagtacagtagaatcaattaatactgatgcccggccaggcgcagtggctcacgcctgtaatcacaacactttgggaggccgaggtgggtagatcacctcaggtcaggagttcaagaccagcctggctaacatggtgaaaccccatctctactaaaaaaatacaaaaattagctgggcatggtggtggcaggtgcctgtaatcccagctactcaggaggctgaggcaggagaatcacttgaacccaggaggcggaggttgcagtgagccgagactgtaccactgcactccagtctgggcaacaagagtgaaactccatcacaaaaaaaaaaaaaaaaaaaaaaaaagaaaagaaagaaaagaaaagaaaagaatactgttgctcagactggttggattgaacctctgtggataggctcagaatcagtatcttttcaaagctcggtaggtgatacaaaggtccagccaagactgccaaacactgtacagacatcccagtgcatccatacccttacctgggagagagctgtaataccatctattgtaactatcacacaagatcagatgagagagcatttatgaaagcatttataccacaaggcaattagtatgttaaaggcagcagagaaaaataatgtacttttcaaagttgccattgaaattgaaaaatatatccagctctctattatgaattaggatggtttatatttactgtcttttagattcatatcccattcccaataggaaagagatgtgatgcattctctatgtctctcttgggagtagattcatgatattattcagtcttcgatgggcagaaaaccatacaaattggatcaaatcgttcatactatgcaccagtgatgctctgaatatatactataaaatcaatattctttctattcttttgcctctcaataaccaattttaataagtggaaaakaattcagattcctctgacaatagcctctttagaaagaatggggaaaattcttgggttacaattgtgtcaatgaaagggattctttattttaaaaaagataaaaatatccaaagcaaataagaacaaatgttaacagttactaaatctgagtaacaaatacatagatacttgttttcgtttttctatatttttctttgaagtatctgattcaaactcaaagaggatgctaaaatcagtttgaacaaagcaccagtgaatacttcaaagaaaaataaagaaaaaagcacgtttttcttggtgccaggtgactatgtagaccccatggggatggggaggccagctgggggccaaggggctgcatcccacagtgtctacctcagtttatattgccaccttacgcaggcagggcacgttagcctttgatattcaagagcagttctaactgagcagttcagctagggtgtaaggaaatcttagtagttgaatttttttttcatgtgctctaacagcttttaaaacaaggaaattattatcaatatctgcttctactctccctaatgagttgcaaaagtgtgtaacccctgcctttctctctaatagaaccaatatggtagcaatggggacattttacacaaaagtcagagtgaaaagatggacttttaggcacattttttttttttaagagatgagggtttctctatgctgcccaggctggacacaaactcctggggcacaagtgatcctcccacctcagtctctcaagtagctgggattacaggcgtgcaccaccatgctcagtttaggcatatattataaaagaagcaatttgcctgaagcactacactcccctgtagactgtggacagataagtaagcaaaacaatttttctcccagagtaggagttggcaaactacagcccctgggacaaatccagtccactgtctgtttctgtgaatacagtattaatttaacacakcccagtccattcgtttgcatattatctatggcttctttcagctacaacatcagagttgagtagttgtgacaaaatctgtatagcctcaaaagcctgaaatacttaccatctgtcccattacagaaaagttccctaactcccatcctagggtattaacatatgaatttgttccatagagccactgtaatcccagcactttgggaggcggagaggggaggatggctggagcccaggagtttgagaccagcctgggtaacatggcaaaactctgtctctacaaaaattagccaggcatgctggtgggtgcctatagtgccagctactggggaggctgaggtgggaggatcacttgaacccaggaggtggaggtttcagtaagctgagatcatgccactgcactgtagcttgggtgacacagtgagaccctgtctcaagaagaaagaaaagaaagaaagaaagaaagaaagaaagaaagaaagagagaaagaaaagaaaagaaagatttaataacaagtggacaaaataaaaaataatatttctcaatgacttttatagtcacacagtagtatacatttatactacatttttgctttaatacagaaaaaacaattataaagacccaaatattgtcaccttttctcttgaaaaacaaacaaacaaacaaacaaacaaacaaacaaactagtgtgctctacaaaggaaacctaaaagaggatgtgttgataattaataatgtaacacattgttaaaatatcactgtttgatagtctctcaacctagccatttcctagagtaagactattttacttatatacctatttgcagttgaataactgtaatacaggtaaaaatactaatgaaaatttataggcaaaaatatttcccttttatagaaaaatagaagtcacagctgtacgctagagaaaaatagaaaagtaatcttttctttcagtccttacaaaataattacttctatagggagtaaagatgatatttgtgttttgacataagtaaaagcttatttttagttcatttcatatgcctggactttccaatgtttggggaaattttaagaaatggagacgtttttgtagctatataagactctattatttccagaagcctcataaattgaaaatgagaccttactgacattctttcttttgtttcttctcaaaaggattcccaaataggaaaagagtatgtaataaaacagagagtgcagagctatggttgtcaaggcaactgtaataatcttgcccttgaactgtggtagagcatccactgcagttcaatctaacctcatgtttcctcagaatgcttatgtatgttcgaaatccttattatatagcaatatcattccaatcaatcaggtgatgataggaatgtagaacacgaactgaaatgtccatggcattcccattatggaaggcagacaggaaaatgacacttgctagcatacagaatagctaagagaacatgtccttccactccacgccattcaacatgcatttgggacactatactggctactaccattaatagaaacataagtccagcccacaaagtagtgaatccagattaaatgagctacaatcctgtgataggtccccatagccctagagaactatgacaaactacagaatggctggtatacacactcacaaattgccactttgtggaaaaaatggtcactatttatgatcatcaggttttcttcatagtgaagagaagaaaactttccccatacaatttggaagaaactgttactacttatttgtatctcatctgatgcttccttcaggactgcagaggattrtgttttctctaggagatagtcagtatcttagaggctgggcagctagagtttgcctcactgaacactaaatgatctttgcttatattttccaactcagacactcctcaattctgaaagtctgttaagatagctggatatttcaaagtccacatgcattttcccatagaaataaagatacagtggttttggttcgtaggtcagctcaagtagtctcatttaacctatgacatacgtgaagtacagagtgggaagtacaaatgtaaaagggaaccccattctcaccgttgtgagaccctggaaaacagcaaagagtccccatcatgggataggggaaggagcactgggttgggatcagaagtctttgtctgtatcagttctttctctgtgcctccaggccacagaccatctcctctgaagtcagtgctgaggcccctggatccagctcaatcacttagctcaccakgggaactcagcacatcatttactggaaataaaataataagcaccttgccatttgatctgaggtcgtcatttagtcatttgaacatttatttttctgttttgttttgttttgagacggggactccctctgttacccaggctggartgcagcaatgtgatcttggctcactgaagcctcgacctcctaggcttaagcgattctcccgcctcagcctcccaaaytgctaggactccaggtgggcaccacacctactaattaaaaaaagttttttttaagagacagggtctcactatgttgcccaggctggtctcraactcctgggctcaagcaactctcctgccccagcctcccaacatttcaatatttctgagattcaagattctcctccataaattagatgtttgggaaaaataggccaggcactaagcttctcttactctcaaattgtattacccttagatatgtggataactcctgttattcctgtttttttttttttttggtataatagtgataacaatgggttccataaagggtggatgggaagatatcataaggatagagacagagttaggataagcattttactattggtgggggattgaaaacttatatttttggaaaggaatttgctgaacaaaatagacactggcattttttgctgaattgacaatgtgataagaagcactccccaatttcccctctcagttatttttgagtaagtcctaccccatcttcctggtgtctccttccactcattaaacaaatttctttgttttttgtttctagtgtatttatcaccatctcacttaccttattttttaccgtgtatgtattggccatcctttggccctctagaaataaagtaccatcagggcaggggtttgtgtctgttctgtccagaactgtatctccaaagcctagaatagcatctgcacatagtaggcattcaaaacatacttactgaataaataaatgaatgaatcactgaatgagagcaaaaaaaaagaatactcttcttcagatctaaataaaatagacatttcaaagtatatgttgaggcatccactgaagacaaattttggaatattatgaaatccagtaggaggaagattattttttgtcagaaaaactaaggtaaggagacccaataccccagactactatccaaaagattgagtaaccagggtgattgcttagatacagatgctcttgatatattagaagtaaacatgtataaagaaggaatgcttcttgtatttctacttaggcctgggaaatgtctggtacaatggaaaacaccctgaggcagaagccaccaggcatccagaatcagtggattcttgctctgcctcttagtacctgttgactttgagcagctagaggacttcccaaacttcagatttctcacttataaaactggaatatggccccctgccttacaaggtggttgtgagggtaaaataaaacgtaaggaaacccagaaaaagaagatcttcagtaaatgatggccactcctactattgccatcaccaacagtagcctgctcaagtcacttaacccctctgggctccagttcccttttctagaaaatgaaaacattggacgagaatgatttcaaatggacctgccactccaaaaatcctgtatgctcagtttcactccctcaaatatgtaactatggggctgggtgaaaaaacaagatcttttaaagagaacctagacttagctatagaggcttattaaattatctgtgttataattctacattcataaccctaaaatataattttcccttaaaaatattcggaaaaaaagtttcccatgtcttggcaaaccaaactccagagagttttccagtgtttggaaggggctgaagggccccaatattttaaagatgaatataatttggtgctgaaatcttccttttgtgtttatgactatgtcccaaaacagaatcctagaagagagaagtgtagcttagaaatatcaagagactgcctaagaacccagcagggtttcatatacattttagttgatttacactttaaaattgttactcacttacatgtttccacatttctactgtcccaaacagaatgaatttgacaatttgtgaatcatgaaaaaagaaagaaaatcaacttaataaacaagttattttccctttgggtcatatgtaccccataagataactttaaagcagcacttacattacagagacatttacttgggattagcagaaaataattttcaggttgctggtcagtctttaaaaatctttttaaagaaattatgtattcaaagagctcccgggggaaaaaaatctgttaactataatacttctgaccaacaaaaaaacctaaatggtctgcaatacttctaagttattagtgaaaaagacttccctttagtacaacacaatttttaattccttgaagtatgtcttggggtaacaaacacccccatcctttaggtcatattcaaattacacacacacacacacacacacacacacacacacacacacgcatgcatacacagtgcaccacccacttctctcatttcctcctgtaaccacaaaacggaatgttttactacaatcatgcacacccattttatttacataaaaatgatgcctttaaactggtaaagaagcaggagatcataatcagaactgaaattagtcaaaatgaagaaaaatcttttaaaaataaaaatgaactttacattctaatatatttgtgcctggatcaagagctactatattaaaataaacattcatatcatataactaaatacacgtgacctagaaacacccaacttacaaatatcctgtacatgagaacagtcgacccaagtgagccaggccaggaacagggcaggctctccccagacttgaaggctagagaaggattcctctaggattcccctccatctcgtcctgctggatagtggcgttggaagtgattagagtagaaaggggaagtgagaagccatgggccttgtaccgcctcagtactgtcttcccaccattctcaacgaggactccatttcccataaatgttacaaagagtgccttggttcccaggccggaccgtcagaagtctgctggacccacagtgcagctggaactgtgctattaatactaggctgacttcccacttggaagccaactccagtcctgacagtgctgtcagctctgttatggttaaatggatttctgggcggtcctgggagcctgccagtgagaacatcctttctgtgggaaaattcctaccgaggcccaaacagctcactgtcaaacagggttgtagaccacaagttgtgagagccttaggcattgaccaatcacttctcacctttcccttctggaaatacttgagtgatcattggagtcaactcttacacagagaaacataaggcaagtccaacactcagcatgtgatctgttccatggcaagtaatgtgtatattttactgttgtcattaataaaacgactacaaaaataaattatacctcagtaacaccatgttctaatcaactgagagacatgatcacttaatagtcctcttgaataagtggaacttacgtgtagaaaggttactgttctcatcaatagcaaagaggtagtttggtaaaagttgatgaaatacaagatcaaatagtttacccacacaacacacacacaaagacagctaacaatgcaacagagatggggagttattatagtagcagattgtaatctgctaggagatgaaagatattcactgcctgggagccttaagtacacactgttaactggtccaaataaggcaatggtcatgctgaagcaggtacctttggtatatcttcagtttatttaccagtaagaagtagggcctcccttatctacttaaagacagcacagaaaccactgaggaccaaattagggcatgaaaaagtagaggatctcccatatctgaggccttaagtcagttgatcaaagttcttaaccaaaggacaaggggacagacaagggccaacttcagtgtagtgacttgtcctccatgtagggggtcagaagagagatttcggcacatctgaataattctcaattctccagtactgagtcactaatgataagtcagctttggtgttgtatctctcttacttaatcatccccaaggataaaatattccagtacccatggggaatctgaaatgaggtaagagcaggtttcttaaatgcctgagaatgatattttagttggaatataatatatggatacacacatatgtagactatatattatgcatatacactctgttcacctggattgatgtatacatactatgtataggtatatatactacatatatatgcatatgcacatatatataatctttcttttttatacaatatatgtcaactgacctttagaaatgccttcaaattatatgattcagttcaagcatacttagtaccgtatccatctgtgggtagccaattagaaattcatgcctcactaacatgtttccagactgaaggtaaattgtaagcatgcacatctgtgttggttgtgaaaaacaacatcctttgcactattgaagaaatcttaatgccaacctaccctccagagaagcctcagatccttggaaaattttcagtttgatcaacacacagaggtaagccccagcaaaagttctttaacaggtatttggaaaaaaggcaacaaagaatttccctctctaagttaggctgactagtgtggtgctgtggagacagaaggggatattaattccacatagtgctctctcccaggcaaagcattttaaaacaaaaacagcaaaaaaagttctaatttcaagtcaccctgagaactaaacttcttcctttcaggacatttactgaacttggccagtgcttagaagtctttagtattgagctatttgctagggtgtccttatttaatcagaaacaacctgtctcaggcaacagtattgcttatagtgtgtgtgtgtgtgtgtgtgtgtgtgtgtgtgtgtgtgtgtgtgtgtgtatgcatggtagtatgtcaatctgagccaacttgtcccaagggccacacctatttcttgagagttaaacaaacccgatttaggataaggagtttgaaattagagatgtggcaagtagcccaaatgaatttttgtctgacccgtcacttctattttagttctctcttccctaattgttctgcctcctctctgtactttctgatcattttccttgacctcatcattggaaagggtgtactcatagagtgggtgaagccatattctagaaaagtcactgcctaggatttttaatgagctaacaatcgtttgtgactacatcaggcaaacttttcatgcaaagaaatgcttagaaagcccaaaaagacagataaattgattatctccaagctaccaaaacaggctggatttttggtgcctgctggctattaaatggttatgtagaagaatttgctctttcatacaacctggtagtgacatggtagtacagcagttaacttttaccacttgtcacttctccagtgtttccattatctgccaaagagaacctaccagttgtgaatgtctaaactagttagggtcagtgagcaacacctagcctacaagtttgttgcaatgattacatgagataaaaagtataaagcacttatgtagtacctggcacatggaaagagctctctctctctctctctctctctctctttctctctctctctctctctctctctctcwmtcatatatmtatatatatatatatatatatgttcatcagcatcatcataatcattataaccatgatcaccaccaccactatcatcaccaccatcattgtcatcatttattgtgaaatgaggactactgattataaaattttagttaggacaggagtaccatccatgatagaataaactgaaaggtaaacacaataatacatagttctctatgtagaaggatcccctgagagttcatcagtctccacatattttccccacaaaccatatatccacttttcttccattaccatggaatctgactccaaaagatttagataaattactgatttcagcagcatgctggacaaatttttccggaaactttgtggatcagacagtaaaatgtagcaaatacagctgtacatacagatggactgaagaactatgcatatcaggtactaattaacaaagtaggcaaatctaccaccacaggtacctggtcccatcttgtttaacatcttcatcagaaacttacataaaagcatgggcagtgattatcaaatttttactagacaactaagctaggaagaatgcataatataatagaagagagaattggggttttaaaatacaattgtaatttatatataataatttaattagattaaaaggttaggatgatactttaaaaattcaagaaattagaaatttgcatttaaattgtaacaattaattagacagagagaggcaacttgagtttaattctgtgaaaaggaagaggtaggatttctaatgagccaacaattgtccgataagctcaaatgaactccaagtctgacaaaagcattacaccaggcaatggaaacttgagctgcatgaaaaaaactttggaatccaactcaagaaaagagaaaagtgaccacgcaatggattccaccccagccagagcacacatggagcactaaactctggtctggaggatacgcctttgaaagacattgaggcatccagcaagttctgaagagggtagtgaggctagagaggggaagatggtgaaagcttggtcatttgacaaacctttgaaatccatgaaagaaactgatgttgagactgaagttgcaaaggctgtgcagtaatagaaatgctgacctaaaatatttgaatggtgaagtagtagatctggcctatctttcaagagagcagatttcaaatgacagaatgagaatttcaggaagtaggcctgggcctccttcaaggagactatatctaaagaaaacattcacccaaggataagtgacttaagggtaaggggattcttaatacttaaaggttcatgcagataaccatctgattatccattctgaatgtggtaaaaaggaatcctgttttgggtgagtggccaaacatatgaccgttagggtgccacaactgtaattcagttctcctgtgtaaagtgtcaatgagtgatatgaggaagagggagggcttcgttagaggagaaggggatggctggaaatggggaaagagcagtttacggctggctttgggtagctgaagagtgtagcaggtagcatagttcccatgataaatgaattcatactaattaattaataaaggctcaaaccaaactttggaattttactcaatgctagtcctattctaatgacaactgagtcaaagatagctgcccaagtgccctatggtctaatccattccctccccatgctggaatgatgttttattctttttcacagtcctcatgacaccttaggcactaggcagcagctttattaactttctacttttgctccagggagttcaggctaaagaatgaggaatgattagtcaacagtagaaactagtttgacacaccacatgttctcactcataagtgggagttgaacaaagagaacacatggacacagggaggggaacatcacacaccggggcctgttgggggtgggggacaaggggagggagagcattaggacaaatacctaatgcacgtggggcttaaaacctagatgacaggttggtagatgcagcaaaccaccatggcacatgtgtacctatgtaacaaacctgcacattctgcacatgtatcccagaacttaaagcaaaataacaaacacacaaacaaaacaaaaacaaaaagaaacttgtttggcaagatgactatttccttgactactttcactaggatatatgacctcaacctaagttgaagtactttgacatcaaggtgatataaacatttttgctgtttttttgagaaaaatatcacagtagtatgtcaatgtgggtttttttcttaaatctcttgatcactgttaatttttaaaatttgtctttttaaaatatactttttaatgtctgatgggacattaaagaatattgttagactgtgcttcaacactatagtgatttaacatattttgatataatataaaatatatagcatacattatgttttgatatatgtaccttaatatctaacaaaactttctagaagaattacatccatttatgtattaaattatactaaagaaaattgagaatttatttcatatttaacacaaaatatccatattgcctggacccagaaatgaggaaaatgatgctacagtgttaaagcaaggttagaatattattgtagagcataattaatggagggagtgcattttcaaatatcctctttacctccttgttgctatgttggctacacacataatactacccgagcctgtacctctccttaatccattgaaaccttttcttgctgaggaatttcatcacagccatattacctgccagtaagtgatagttcaggtcaatttgaaatgccacggcttttgatcctgttgtctctgagtatttcattttagattttaattacaatggtattgtgcttatggaccgaccccaaactgcattgaattgggaagtcattttcctttatttaccttttataatataatttcaaaatgacaggctcatacacaaagcataattctttatagacactggctcatcattggacttaatcacttccaaagcaatgaggatggaagaaatccagggggtcctgattcatggagattcctggcttttttcccactcagttgatggaaaatgttttctctttttaagttagatgagggatggggttagggaaacttacatcctacactcttatgatttggctcatggctttattgttctccaaattttatgtgtttgggtcagttaatcagactcctaactctatccattgtattcaaacagatgtagtacttttttctcctttcttcccccaaagctgcattactttttggatatggggtctctctggccagctgcaaagattctgcctttgtgagagatgacatcacccccatgctaataagtcttttaaaacccagaaattatcttgggtatcctacaagtcatgaacagcagtacactagggatatagcgatttacttaataaatatctgttgtgtggatagaaaagctagaactactagtcaggtctgctttttctcgaacttgagtcttaattatatctttctttaaaattgagatataattcacatactataaaatttaccactttaaagtgtacaatccagtaagttttagtatattcagagtcatgcaaccattaccacaatcaactttggagcattttcatcaccttaaaaagaaatccatacccattaacagttactcctcacatccctctccctcaacccctagcaaccatgaatctactttctgcctctgtggatttgcctgttctggacatttcatatatatccagtcatacaatatgtagccttttgggtctggattctttacttagcataacattttcgaggtttgcatgtgttgtcgcaggaatcatcccttttgtggctaaatatattcttctgtattgatatatcacatttgtttatttgttgatgaacatttggattgttttcaattcttagctattataaataacactgctctgaacattcatgtacatgtttccatgtagacatatatgttcatttctcttaggtagataaccaagagtggagtttctgcgtcatatggtagttctacgttttaactgtatctttctttctttctttctttctttctttctttctttctttctttctttctttctttttttttttttgacagagttttactcttgttgcctaggctggaatgcgatggcgtgatctcagctcaccgctacctctgcctcctgggttcaagtgattctcctgcctcagcctcccgagtagctgggattacaggcatacgccaccacacccagctaattttttgtattttttagtagaggtggggtttctccatgttggtcaggacagtctcgaactcccaacttcaggtgatccgtccaccttggccacccaaagtgctgggattacaggcgtgagccaccgtgcccggccttaactatatcttaattgttttcctcaggtagctatgagtggtctcaattcttctgtaaattcttttatgatttagtgacttcctgcctttttataatagaaaaattggtttggtatattttattccattttatcttcataaaggtcctccacccatgtctagaaacattttaatgcaaagtcctaaagaaagttaaatcctaagcacttatctccttaaaaataaattcagcttgatttagaagaattctgtatgtaaaaaaatgggtaaattccccattcattaataactctttgttataatattatctsttatggcatctccttataaagcaaacacctcaggtactaggtattacaaataatttcttccttgtgtgaatgtcaagtcctctgagagctgatggtatgaatctgtacagaaacattttctgctcactgtaaaatctggtagtgccaaacccatcttatatgagacaaacggatcaatctgaattagtgacaccaaaaacaaacaagtttttccatgtaaacatttttatattcaggaacacacaattattcagattttcaggataagaaactttgttagataataagaggacattatgtttaataaacaaattaattctgtaagtggcacttaaaggaagattaaaggtaaccaaacagtcttgctcatatgtattatcaatacaacttctaaatcttatttagcctataataaaaggcttgctaaaaatgtgtatcagtaccaaacctcctatcaccatattccaatgtattcaaaattcctaatcatctttgcacaagcattattaagccagagcaaacacattcaaaagctagcagaaggcaagaaataactaaaatcagagcagaactgaaggaaatagagacacaaaaaacccttcaaaaaattaatgaatccaggagctggtttttcgaaaggatcaacaaaattgatagaccgctagcaagactaataaagaaaaaaagagagaagaatcaaatagacgcaataaaaaatgataaaggggatatcaccaccgatcccacagaaatacaaactaccatcagagaatactacaaacacatctacgcaaataaactggaaaatctagaagaaatcgataaattcctcaacacatacaccctcccaagactaaaccaggaagaagttgaatctctgaatagaccaataacaggctctgaaattgtggcaataatcaatagcttaccaaccaaaaagagtccaggaccagatggattcacagccgaattctaccagaggtacaaggaggaaccagtaccattccttctgaaactattccaatcaatacaaaaagagggaatcctccctaactcattttatgaggccagcatcatcctgataccaaagccgggcagagacacaaccaacaaagagaattttagaccaatatccctgatgaacattgatgcaaaaatcctcaataaaatactggcaaaccgaatctagcagcacatcaaaaagcttatccaccatgatcaagtgggcttcattcctgggatgcaaggctggttcaatatatgcaaatcaataaatgtaatccagcatataaacagaaccaaagacaaaaaccacatgattatctcaatagatgcagaaaaggcctttgacaaaattcaacaacccctcatgccaaaaactctcaataaattaggtattgatgggacgtatctcaaaataataagagctatctatgacaaacccacagccaatatcatactaaatgggcaaaaactggaagcattccctttgaaaactggcacaagacagggatgccctctctcaccactcctattcaacatagtgttggaagttctggccagggcaattaggcaggagaaggaaataaagggtattcaattaggaaaagaggaagtcaaattgtccctgtttgcagacgacacgattgtatatctagaaaaccccattgtctcagcccaaaatctccttaagctgataagcaacctcagcaaagtctcaggatacaaaatgaatgtacaaaaatcacaagcattcttatacaccaataacagagagagagccaaatcatgagtgaactcccattcacaactgcttcaaagagaataaaatacttaggaatccaacttacaagggacgtggaggacctcttcaaggagaactacaaaccactgctcaatgaaataaaagaggatacaaagaaatggaagaacattccatgctcatgggtaggaagaatcaataccgtgaaaatggccatactgcccaaggtaatttatagattcaatgccatccccatcaagctaccaatgactttcttcacagaattggaaaaaactactttaaagttcatatggaaccaaaaaagagcccgcatcgccaagtcaatcctaagccaaaagaacaaagctggaggcatcatgctacctgacttcaaactatactacaaggctacagtaaccaaaacagcatggtactggtaccaaaacagagatatagatcaatggaatagaacagagccctcagaaataacgccgcatatctacaactatctgatctttgacaaacctgagaaaaacaagcaatggggaaaggagtccctatttaataaatggtgctgggaaaactggctagccatatgtagaaagctgaaactgcatcccttccttacaccttatacaaaaattaattcaagatggattaaagacttaaatgttagacctaaaaccataaaaaccctagaagaaaacctaggcaataccattcaggacataggcatgggcaaggacttcatgtctaaaacaccaaaagcaatggcaacaaaagccaaaattgacaaatgggatctaattaaactaaagagcttctgcacagcaaaagaaactaccatcagagtgaataggcaacctacaaaataggagaaaatttttgcaacctactcatctcacaaagggctaatatccagaatctacaatgaacacaaacaaatttacaagaaaaaaacgaccaaccccatcaaaaagtgggcgaaggatatgaacagacacttctcaaaagaagacatttatgcagccaaaagacacacgacaaaatgctcatcatcactggccatcagagaaatgcaaatcaaaaccacaatgagataccatctcacaccagttacaatggcaatcattaaaaagtcaggaaacaacaggtgctggagaggatgtggagaaataggaacacttttacactgttggtgggactgcaaactagttcaacccttgtggaagtcagtgtggcgattcctcagggatctagaactagaaacaccatttgacccagccatcccattactgggtatatacccaaaggactataaatcatgctgttataaagacacatgcacacgtatgtttattgcagcactattcacaatagcaaagtcttggaaccaacccaaatgtccaacaaggatagactggattaagaaaatgtggcacatatacaccatggaatactatgcagccataaaaaatgatgagttcatgtcctttgtagggacatggatgaaattggaaatcatcattctcagtaaactatcgcaagaacaaaaaaccaaacaccgcaagttctcactcatagatgggaactgaacaacgaaaacacatggacacaggaaggggaacatcacactctggggactgttgtggggtggcggaaggggggagggttagcattaggagatatacctaatgctaaatgacgagttaatgggtgcagcacaccagcatggcacatgtatacatatgtaactaacctgcacattgtgcatatgtaccctaaaacttaaagtataataataataataataataataaacactgtaattctatattgtgatttgcttcccatttgaaaaaaagtatttcctcccttgtcttctaagaaggtactccttgagggattttatagagttcagatttgctgtctttctcctgcctccttcggcaccagtcaaatcattttgtaaaattcactgggattaacaggcattagtaatttgtttatcggtcacatagataaaatttgcctttgaattttatatgaatactgtccacaaacacagaatgttttttctatcttttcagttgactaagaaaaaaactacacacatgcgcatataaaaagcactgtttccttctgatacttcatttgaaagcccctcaaaagcagaagaaaaaaaataaaaccatatgaattaaagttaaggtagaggatttttccaacagcatcatttctgctggttactaagttccacaaatagctaatgaggccaaccacctttgaaatcaaagtgctgtgccccatctcctaatggagccacagtatgmtaagggaagtgaaacttctagagtcagcacccagatggtgttgacaaagaaacccacgtgcatggtgcagtgcagactattttttaaattggcctcaaactctaaaaagcacacaaacacacatttggatcacctctgttccaccacacaaaacagtcccagtttgcgtgactccccactgcctggttcacatgctgagtaactggatgctatttcaatatttagctcaggccaacaacattagcaaagcagatttttctcaccttattgcccatggccaaatatataactttgaggtggtctgcgcggtctgcttctttccatatgagtataacattgacctgtatgcatatgattctcagcaatgtagaggtaactgctcacatttgtatcttagtaagagggaattgatgaagcaataaatgtttaacagctaggtgtcatctcccagctgtgtatgaatttctgttataatatcaatgacaaatcattgactaagcttatcttatagacagaagtccactgaacttgcttttagacaacctaagtcgaaattacttttctgaatgtaaattaattcagccactgtaaaaagcagattggcaatttctcaaagcatttaaaacagaactaccattcagcccaacaatcccattattgggtatatactcaaaggaatataaattgttctatcataaagacacatgcacatgtatgtttatcacagcactatccataatattccaaagacatggaatcaacctaaatgcacatcaacagtagactggataaagaaaatgtggtacatatattccatggaatactatgcagccataaaaaggaacaagatcacattctttgcagcaacacggatggaactagaggccattatcataagtggaggaacataggaacagaaaaccatatactgcatgttctcacttgtaagtgggagttaaacatttagtacacatggatacaaagaagggaacaacagacaccagggcctacttgagggtggagggtgggaggagagtgaggatcgaaaaactacctattgagtactatgtttactacatggttgatgaaataatctctacaccacagccccacaacatgcaatttacctatataacaaacctgcacatgtacctttgaaactaaaaatgttaaaaaaaaaaaaaaagaaattacttttccaccaataattagccatgtgaccttggaaaacttaattaactttattagcagcctcagttagttgcctacccaacagtgatttccccttccctccttcttccaaagagaggtctaatgttatttggctattcaaccttccgccacgtgaccaagggtagatgacccatcccggctccaaagatagatcctcattatgtttggtcccttgtggttacactattccatttgccaggaatgttttaagaagggaaatgcatatcagattaagtttggttgcataactacaaaaaagagcaagaaataaaaataacagtggtcttaaataagatgcaaatataattccctggggaattatattttatatactggagaaaagaagacaggtgttaggcaacagggggcaccctgttcaggagtagatagatgcatcagggatgaggctctcaactagcttacttttctgccattttgctgtgctgtctcaggtccggcactgctgctaggagccctggacaacttcagccaacaggaagcccttactgcaggggacttagtcacatgatgacagttagctatacaggaggtagtgaaaggaaggtgggggaaatgcaaggagaaggggagacaactagtagtcattgtcacagcatgtggcccaattcccgcctatgaaatatgaagcttccgggaaagtctcctgctatgaaagagaaacaaaaagagataaactgtacttctccctctgatcagtgtcacatctcaatgtgatgtctgaaactgatgcagccatcttggtaccagcctgagagcaaagccaacaatacacagagcaggacagagcctgcagagagaaggacccaacatcctgacattctgtatggtacccagatcgtaggccatgctggacttcttgtcatcttagatggaaatttcattactgtttatttccaatggagggggagtcttctgttacttgcagacaaatgtcttcaaattcattcgacctatccagtaggccttacaaatttaaagacagtcatttctccctcttggtttgtattttcacaagctaaaaattctagagacatagaagatcaatcaattcttattttaatcactattatcaaaatatatcttgattaatgccttagcaatattaagtaacgtatatgcctatagtgatgtgttattgtcatgtagaccaaaatagaaaagcagaacaaaaagataaaattcattaaatacgtcatattcacgttcattaaaaaataattgttcatttatcttttggcttattgttttataaaatgaatgcagaaaaccataaaataattcaggtattggggttccaattcctggccttaccacttgcattgtgatctaaggaaagcaatttcatctgtgagagccatagttttttatacattaaaaaatgggagaggaataccactggttttagtcagccttggctgccaaaacaaaatatcatttgcttttcacagttctggaggctggacatctgagatcatggtgccagcagagttcagttctgatgagggatctcctcctggcttgcagacagccaccttctcactgtgttctcacatggcagggaaagagcaaggtctggtctcttcctcttcttataagggcactaatcccatcatgggagccccactctcatgaattcagctaaacctaatcactccccaaaggccctacctgcaaatagcatcacactggctgtagggctaggcttcaacataggaattttggtgggacgcaaacattcagtccataaaaccatctcttcttaagaatgtgtgaaggttgaagaaatgtgtaagtggcataatggcagttatatagtactcattaactggcaactatgacatcatgggcagccagtgaggatacaaagacaaagttagtagatctgattcaatatttcattcattcgtttatacatacatacattcagattccacctagttccagaaggcattgaaagcagaaggaaagcaaatataaaaattattgcaatgttttaagttatagaataaattgtatctatcaagaaattatgggtagatagagagatagcagaaaccaagagacatcagatgtcatgaaggagcagaagccatgagggaaagagaagaaaagtcaacgaaaggtatttgagagtagactagagcgacgtgggtaagtgagggaggtggggagaaagagagaaagctagttagcatcaagtctacagcctggtaaatgtcgaatgttactagagtcatactttgcacagggatgagtttcctttgagtcttgcatggggtggtgttcagttttcacaagggctaagatgtttttccccttttaagttctttcctgtgtaactttacaatggatatctcctacctgaaataaccaagtgtgtctctgttccttgcaacatggaagaacataaaacaaagtagtagcctaagccacagaattgataaaagggtgaaagaaatgtgtctacagtgagaggagaagaggcctaagatggaagtatgtttaaggagcaggtgaggaataacatgccttcaaaggagagcaagacatattactcccagaggtaggaggagaaataatagagttatggaaaagggaagaaaagacgttgtcaggaaaaaacagctggattcagaggttccagaggtaacatgcaataaggactcactctcctgaattcgcagcaaagttgcctataaccctgaagacagaagactcaaaggaatgatggggtagaagccagatagcagagagttcaggagtagatagatgagcatgtgaactagctttgagtgtaaactattcttatgagagatttagttgcaaaaaagagatggctttcagaagaggtttgctcaaggaagggttttgacatgacaagatgactgagagtgtagaagttgaagctggggaagagttaacatgatgctatctggagtgaccctgatgaagcagaactgcatgggatttggacaggatgacagatgcctttgcctctgagatgggaggaaatggggcctgtgctgcccatacttgaatttcatttgtgatgaatctttgactacaaggacaaattgacccagtactttcatgtggaactagctataacaaaggatatttaaagttttaagtgagcttgttttaacctcacaaagtattatatataaatartatggtcatttaaaatttcccaattattgttatttgttctggatcttaagctcatatcataagaacattgatggggctaagtttctggaagtgacagatcttgtgcttgtggctggctaatgaatcacccaggaagtttgagagaccaggatgttacctccagattgtgggacttccaggcttccgccctatcaggcaggcacatctgcttctccagatgaaggaaacaaaaccagaatagaagagtcagttggcaaagcaacaaggtcaattcttgccctctccttcctggtttcctgcactgacctggaactatctacgtgaactgccttcaaccaattctgcactctgcaaaaagaattaaagcaggaaggactacactgttctcctctttcagcatccctgaaatgccgtctgactcatttactaaacccacaagttttgactgatctatactgtgcattagactctgtcctaggcactggagaaagcatggtgatcgtaaaatagttttcctatgtagcacagattgccgtgggtcttgcatgaggactaattgttaataaggattcttgttgtttatctaaacggatgcatctgtaaatcttgcttgagcatattgcattactgtttacaaaagggtaaggttgctgtttatttttcggcatggaagatgcacacattgtacttttcatttacaagatacagctcagggtgaacaaagccctaggataaatactcttttctaaaacacacaaaagatgataaactccaaagcttacatgtgttctaattttcattatggcccatttggcccagggttccatatctgtcagaagatccccgtgacatattagggagggcatggttttggctatcatctaaaatagcattcttattcctcctccaattctaacttcccaacctgccttaattatcacatttggattcatcttccatgaattaaaatattagactatatcacttcttaagatacaggatagaaatagaaccaggatgcttgcaatttatgacttccatgaagttaactctaattttatgtttcctaatattgctgttgtcaagcttaaagggtattacctagtcctgttaagttctattgtgtcttgtccatctcatatctctgtagcttataaagtacctgacaaagaaggaaagagcttgataaatatttgtggaataaaataatttaatcaataactaattgtcacccttttaaatttgtagactttaaatttcctgtctctctggtttcatgttttacagtctaaaaaatcctgatattttggtagattctcaccaagtaagacttaggtgcccatatgtcccagtttgcttagtgcagttccagttcatgcctaatgtgccagggtaattattcctagtgatcttttccctttcaaaagtatcccagtttgaatgaccctctaatcactattctcccgggtcccttgagcccctctgtaaaattctacatgtgcatttcagaagctggagaaagctttctttttacaggacattgtggtaggttttttgtttgtttgtttgtttgtttgtttttttgcctactccccttcctgatgataaagtatctctacggactttcagactactgggcaggggttgtctaggaaaagcctagggccatgcttttcaaattttagtgtgctttaatgtatcactgggggcttctgtgaaaatgtagatcctattcagcaggtctggaatggggctcctgatactgttgggctgaggacagcactttgagtaacaagggtctccaagttttcctagttagccatgacttagagcccagctattatgacataacattgcttagtgctcaacaggatactctttagaagccacagagctgaggtcaaaccttgccctcatcactcatacctttgtgaccttacacaatgtattgatccctctaaaactcagttttcttatatatgagatacaaagaataacaattatctcagaggaatgatgtgaagattaaatgaaataataaatataaaacagtactatcttccctcattgtaaatgttcaaaactggtggtagctgaaattgtcatcatcacagttatcaagtgtagtttgaattcctcccccgttttctctgcccagttcttccctgccatttcccccgttttactcaaagcttaacatcagaagttacttgtttagataaatatcaaagggtaatgagcagagatatattttggatagtgccttaaaaatggacactgggatatgctaaactatcaagttgtcagtacatgcaggaattacaatcaaggtttggacagatctacaggaagggccaaaagttggcaattaatgccaattcatagatgcttaattatcacttgactggattaaattccctgggctgaggctgcctcctttagttagcatgcgtcaatagcagcagtcagaagcaattcaattgtatatactcttctaaaacccagaattaccagaagaaagagaatgaatattagaaaaatagaaaagtttaatagaccaactcatcaacctagaccttgttttaaactttgccttctctttttcctaattgggtatcaggtagcagaattccaagtattccagtttcacttactttattttagcctttcaaaagtcacataatctaaaccttcgttttaactcatggaaagtgataggactgaaacagcattttgtaaataacaacttactatttaaacctatagcgtcaacatcattgttgcagtcatcaaaattgttattctcttcctcatcttcaaggtcccttctggctataaacatttctctttcctctgatgtcagtcctaatgtaggacccatgttctttctctctgggtagagtcaccagtgaaagaataaaagtgatatcagaaacttggataattttcttactagaaaatctctacttagtcattgtaaaactggatgttgagtttgaagtgacaatgtgctataggyttacctcctacaattcaaagctcactatagactataattttccattgattaattcattgacttattcattgtacacttgcttagaccatagtacctatggcatgaagaacataataaaatgtctctccctagtgagaactcacagaactaccagggcatgcttcctgaggcccatcacactctacaggtcaatcatgattccatcttgagttaactattcttgacacttacatggcaggtcattttcaaagtatgcttacaaacaacaacaacaacaacaacaacaacaacatgttcttaacaaagattggcccaactatcacaatgactggagggcctacttatagaaatagtaggaataactaatttatattttccaccagggttgcactgagcactgataggtctcacttgatggataattctcaaaatcccttaagaagatttccatgcagaaagaagagaaatcaccagcatattttcattatctgactggagggatggctatttcctagagaacagcaaccaggatatgtgcaacattaaaattaacatggtcccttaagtgtttccctcaccagattggttctacaagcacacagctatttatcctctaagcaagggtcagcaaactataatccatggaccaaatccagcccatcacctgttattgtaaataaagttttattggaaccagccatgcacattcatttgtgtattgtctatgactgtttttgtactcaaatggcagagttgtgactgagatcttatggtcagaaaagcctaaaatatttactatctggtcttaactaaaagaccatgctactttaccaaaaacaacaacaacaaaaccattaagcttgcattgacatttcagtgatttagtttgaagaattcatagatatctttaataattttaaattactataatccttaatagaggtaattaaaagctacaatggagagatttggaataaaaatttctatgcaaatatccctttggtatatggttaatcactaacaaattaatcaaatattatttatgagaaagataatgcctagttttatatattggaaacttaatgaaaaagataacaagtaaacatattcaacagctctgatttctgccagtatatcataaaataaatactagtacttgagctcatgctcatatcctaatatctacataataattaggaatagatgagttgatccacgactctgctgtaagtactacaggaaatgtctctgtaaaagtatattatcattttaatctagatttaatgtatctcataagcttttaacaatgtatatgtgtaatcatttgagaatctagaacccaaatgaaaaaatatatatttaaatggagaagagggttatttctgtgtcctgctttagttaattttaagacataaatatctaaagttgataaaacaaaaggggaaacaagcccatctgcagaaataattttgcagtttatatccaagctacttttgaaatatagaacctgctttctcctttcaaagaccctcaagtatttgctgtagctttattattaaaatatctagatgtgtcattataatcagatggaaaattcagcaaaattgtgttttcttagtaaataaagtatatactgactatatgtttatatattaactttttcccacatgaaaccagtatttaaagctaaacatttttctcactacagatacttcttgactaatgagtcagtgattaaatatataccaagtgaatattaataaagaatggattttttaaaaatcatgttcactttgggatattgatctcatattcctcatgctatgtgaattgtacagaatggttaagaaattattgttgactggcacggtggctcacgcctgtaatcccagcactttgggaggccgaggagggtggattacgaggtcaggagatggagaccatcctggctaacacggtgaaaccctgcctctactaaaaatatagaaaattagccaggcatggtggcacgcgcctgtagtcccagctactcgggaagctgaggcaggagaatggcctgaacctaggaggcggagcttgcagtgagccaagatcgcgccactgtactgcagcctgggtgacagagcgagactccatctcaaaaaaaaaaaaaaaaaaaaaaaaagaaaagaaaagaaacgaaattattgttaacttaattgggacaatgatttacaattctactgatgctgaaaggttaaggaaagactttggaaattcaaaagccaaccacaattaatattgctttattcttttctttcttatcaggtacaaaaaatttggaatgtttatagaatgcttgccatatgtaaatattgaaataaaaattattcatacaaatccctaaccatgaaactaaagattctaataattctaaatttttaaatatgaatattttctatttttttcacacacacacacaaacacacacacacacacacacacacacatatatatatatacttttaaaattaggatgctaaatctctgcccatctgtgtcagccttttaaagagcttgtgattcccaatcttcaatgccaggatacacagatgttagtaggtgagacaacagaccgacaaattcctgcttggtaagtaaaataaaaagtaaaatgtaaaacaggagatcttgttttctctactttggggaaaataaatcaaaacaaaacaaaatcatcaccagccctctcaagttcataaaaaagacattgtttaaaaaaaaaagagagagagaaaaaagcaaatgatagtaatatttatcctgaagcaaggtggctaaaatttgacccaagtacttcctaactactgaaaattaaatcattgcttttgtggatttgaaaaacagaaggtctgcatttcaagcatataaataacatgaaataattgtgtcttcactttgaaagggctatttaccaaaagaatgtgacattctgaggggcacactttggggatgaaatttaagcaaaggtcacatctcaaattcaaccagcctttttcacctgggctgcaatggaatggaatgattgaacaagtgtgaactcctaggcagggtgggcataggtggagttagtgggtaaatttgatttgtttgctaaggttagtgaaataaatttatctcctttggagtgggattccaggtgctaaaaaataaaacatggtgtttgtagccacatttctttccttcattttcaaaatttatccaaatgagattaagttgattggtactctacagagatagcagccacctaccattctgattaatatttcagtgaggaggcaatgtcttattattgagaccaagcaattatcagccttttgactatataacataaaataaaataatcaagaccaatatcccatggaaattatctgaagatacaaacacaagcctgaggagacatccctatagctaagcctgttgaggtaaaggactggagtttgaaggggctcttcctccttcacagaagcactatggcctagctaccctctccgtggtagtaatatggagtgggcccaagagagagcagctttaaaattcaaaacaagatcctggaggactgtggttgacttggccaggtacttaggagccacagttttgctcgtaaagaggctttgagtagtcactccctctcaggtgggctctagggtggagattccatctttgtggtccttgggacatctcaaacaacagagatgtggaagctataaagaaaacctctgaggaagactattcactgggacagggcagatattacatatttccagcatcacaaaattttctattggacaatgctgtatatctaggtgctataacatttaaagtgttagctttttaaaatttatctgcaaccatttcttctcttaattcctcagaagtaggcaatctaataccacctctggagctactatttcaatgaataatcatatgtttgcttagccatattggaaaatcaaataaatctgaaagagtatgttgtccctggaatgtgctaatttctagttactcactgctatgcgtaagaagttaaactaaaacctgttcttcacattaacagacaaaaagggctttctttgtctgactatctaaattgacttcccacacaggaacctaagtgatagcaagccgttaacaatggttgactcatcctttaaatatcaggtctcctttatgtcatatttctgattgtcaccttttgagaaagcttccctaccatcctactgactcccctccatcattctatccccttatcttctgtattaccacctggcatattatatacttattggcttgtcagtctccctattctacagcataatctctttaaaagaaagtattgtattttattcactgatgtattcctaatgcctagaacagtatctctgtttttgttcactttatatatgcttagtaaatacttatagaatgaatttatgaatgaaacctccagaaagcagatacaaaattttcttcatatacattcctctggagagcaaatgtataacttagatcttattctgaacagatttgttctggggcttaaaaagactaagaacctgagttttacacacattatgccatttcattatcagcaacatcattctctgcaatgtccatacatgaaagttctgcaactgatcaaatgcttactttattagaatcatacaaaataaatataagttgaaaaagcaatgacatgaaacatttatatttgaagggcttgttgttgttgttgctgtaattgtaagaaaatttacaccaaaaagaacttcatctatcctaggtaatttagatcactccaaattctattctgatctttcttattaaacatacctctatatttacgcatgtgtaatcagtaatcatgtaactgttgtctttgagatttccttaagagattttagcaggagctccaaaaggttcaagtttggctgcagaacatggggcatttttatgtagatgtggattgtgattctcagtaccaatggcttctccctgctatgtctgctttcccgcctcccatttgtcaagatataaactgcacagtcagggctgaaggagctacaaaagttaaacaatgtgtgtaaatgaagataagaattctgcatgagagcaagggttagaagaggaagctaagaaggacagaaaaagagattgactcaatgttgtgtaaaaatagagaccaagagggctcaaaggaaggtgataagaaaattaaattagaaaaagccaggaagataaaggaagttcaaaatatccataaatagccaaatgaataagaaatacaaagaaaatactaagaagcagtaaaggatagtaacaataagggaaaaaagaaatgtgtagcaagggaaagaaatagtaaaaaaggataaacagtgatacagcatgaaaagagaaaatgaaaaaagactgtaaatacagaagagagaaaataacaagatgatcatgtgcacatacaaacacagtgagatgcgataaggagagaaataacagaaactcatctattggcagaaagatggcctcccaaagatgtccacacacccatccctggaacctgtgaatattttgactgacatggtaataggaacactgcagatatgattaagtgtatagaccttgagaaggagaaattatcctggattatccaggtaaaaccaatctaatcccatgaacctttaaaagtgagactcttccagttggagtctgtcaaagggaaatggaagaaaagcacaaaggcacagggagatgcaacactgttgactttcaagatggaagaagggcacaaaagccaatgaatgagggcagcttctattaataggagctcaaaaggcagggatctgcccctggagcctcccaaaggaaccctgctgacaccttgattttagcctagtgagatctgtgtcagaattctagtctacagaactagaatataatacttttgtagtattttaagacactaagtttgtggtcatttattattgcatcaatagaagactaatgcttatgagatcacaaattattacagcaaaatgcttattttgtgcagcacaattgttaaaatcatgcttggttgtcattttacagcatacaaagccctttcccatatattgtcaggtctgatcattctaagacctgtggaatataagcaaagaccatcaattctacccctcctgatgagacaaggggggcccagagaggtaccatgtccaaggtcttggtactaaatgttacaattaaggacagaatgagctctccaagacctcagtttgcttccatagtaaaaccatgattgccagcaagacattcacatctaataaactcaagagcacaattaaagtaatttgcctggttcaatactctggtgctttgatggcctgcagagcaaaattcttccagtgtgagtcccatacctcatgcttcaacttgcacactccaaatgatcaatccctctgttaaatggaatgggattcattgtttccttgttgttctgctttcccagaaaggtaagctctttttccaaccagtgcccagcatagtgcttggcacaaaatggatcccaaagttttgtgttaatttaattgaatcaagaacacagaaacgtgatgctaaatgaaagaagccagtcacaaaggaccacatcttgtatgatttcattcctatgaaatgcctagaataggcaaatctatagaggcagaaagcagattagtgtttgcaagggctggtgggtgatggggaaaatagggtgtgactgctaatgggtatggagtttcctttggagtgatgaaaatattttaaaatttattgtggtaatggatgcacaactagaggaatgtactaaaagccgttgagttgtacactttaaatcagttaattgtatggtatgtgaatcagagctcaataatgctattaaattttttaaaaagattatatcaatttcctcatttgccccatattgtgcttaaaatccagaagacttatttcaatgtcacctttgattagtcccctcgtgagcgggattttagtagtagaatttgctaccattcattcgttgccaacattcaaatgaggctgagggtttacgacagtgagagagataggtccaggacagaaaaagtaagaaggatggcaactggaagggacagttgagaagtggagccaaggaactgatctgtgggcccaaacacaggacatagatctcagatctaggaaaagagggtttctggccaagatgaaagggactgttttcatgatggatacaagcagcacgtcattgttactcactgacagtctgggccaggatggggaagaagggctcttccctgcatctacatggagtaccactggcatggacacagtggtggctctaggctgtgtggcacatgtgggcaccccaatggttcgctgcgtatagtgtcatctgagaaagaagaggaggatgctacctgtacttgacaggatgagtttgggtattcaaatgaaaacagccccctccagggactatggaacataactggtggggattttcattgtttctttgtttaacagctttattgatatatatttcacatatcataaaattcaacaatttcaagcatgcaattcaatgacatttagaaaatttaccaagtggtgctaccatcaccataaaccagttttagaacactttcttcatcccaataagatccttcatggacatggttacttttaataagaactctctcattaaatatcaagtgtgatcaggagagaaacatgggtttcatcaatagataactggaatattttttctttctcaaaaattcttccataactatcctttccattcccgaagaccatcctctgcttcagagcttcatgactccagttccataatactacaaaagtctcacaggtaatatgtctagggacagccaaaccattccttctaactcatggttgtatttaccttcctaaaatccctgttccatcattccattatctcttcctattgcatcacttacaaacacttaagacttgggtaccattattgtttggccactaatcactttgtcttagttgaagacctggcaccagattatttctatggcactttcacacaatactatgattcttttggctggcttttaaactcctctataatttgagtcagcactctctatccagttttatttttgattatttctcaataagcgtgttctacttcactcaagccaactttctcgtgatccaacatgttgatagacccttctcttcacggttttatcaatactattatctttacttggaaaattcttttcttctctactcatgtgtatcagtcagctattgctgtgtaataacctactcggaagctggagagtggttgatcctgaatggactagctcatgcatctgcagggggctgtgctctaggctgggcttgggtggagttgcttagctatgcagctctacgccacatgtctctcattcctctccagcaatccggctcagacatgtccttctcatggccatggcagaagcacaagtggacaagtgtgaacaagaaaggtctcttgaggtctaggattacaacaggtatgctatcacttctccatgtccctattggccaaagccagtcaaaaggctgactccagagtcagagttagagggcactgtcatgttacctaaagagcatgtatacagggatgagtggaacactgggtccatcaatacatgctaccacactatccaaatccttcagatggatttcttggtcactgttgtatttggcataggaaaagaaagtattccagaaactactggaacctttcaaagatgacaatgagggatctacaaacaaattaggttttgaagagctggaatactatgaactcacataaaaataagtatcatcaggtttaacaaacaaaatcctttaataacaaatagcaatatttatatcttcagtccctgaaaaagtatgatagaaatggctccacttattcatgtgtctgttgtttagggcttgaactgtccagaacataatctttaatctggaagtaaccccaaagctttctcatgaaatttcttcttgagataggggagctctgagatcatcctctggccagagttgattaaggtacttaatgaacttgattgcctggtttcctgtgtcagccttaaattctactcttagttatagccaagcagtaggaatctatgaggtgggatggaggacagtgacgtacaaactacctaaacacagatgttttatctgacatttttatcctttacaatacatccttgcctataatgtatgccccacaaaaatcacrtaaaataccaagtgatgagcaattattgaagagagacccatataaaaataattatttcactggctctcagaagacaatttgtgattagaaaaatgcacaaatagagaagattacttatttgggccagtaaatacgaaactcaatgtaatttctaatttagaattctgtggctctccaaaatgggttttacctaattcaatttaaggtttaattttagataatcaaaccccaaaccaagcctgtgtayatgttgacatcttttgaacctagactaagtctccgagacttcccttcttaagtagagaaaataagagaaaaagaaccttcctagattttcagctgggtgtggttcctggatttgtaattgcactgatttccccatgagtcacatttgttcctagtgtacgccagactttccccttttagatgcttgaggagatacttctatgcgacaacggaacactgaaagtggtgaggaaaccatacgattgtgtctagctcaatagacacagaatgatctgttgttttagagcagagcttctctcccttgagtgtgcaagaagaacttgggggcttgtagaaacacacgttcctgagctccaaccatggagtttctggttcactgggtctgggacagggctcgtgattctgcatttctaacaagctcccacgtgttgcagatgctgctgttccgtggaatacattttgagtagcactggttaggagtacagtttctcagctttggcactactgacatctggaccaagtaattctctgttgtgggggctgcactgtgcattacaggatgttgaggagcatccttggcctctaccgactagtagcacctctccaggtatgacaaccaaaaatgtttccagacattgccaagtgtcctctgggagtcaaatcacccccattgagaactactggcttaaaggatgggttctgaataaaagagacatgagctgaaatctgccctaaccatttgactacgcatgtggttcaggggagcagtgtccacatggctaaagcttcggtatgagtatgcctccctcacagagttgttgtagggacaggttaagtgaggatgtatttaatcaagtggcatggggcctggccccaaagcagcagtccatagsggttcctgagtattgtatcaaaaaatctttctatgaggcaatatcatccaaactctgtttggaaggtaagcagagttacctacctagaagggtaagtttccgtctacttagttcaagtgtgtgcgttatatttagaattctagagtcttttctcagttcagaggcaataacaataaaataaacccaatatctatctctatgatcatgaagcttaaaatctagttccatggctaatacaccgagcatatttttatgatcctgaaataatctttatttgaaacatagatgtgtttttcaagtggtttctgaagcaaaatgctttgtcagtttgtcaaatccctttcatcccaacgaccatagaagatataaaccagttgttgtccaaagaacaaaagtaaccaagggggctgagataaaaatctcaggcaacactggtgaaaagggtaaagctgtatttacatatctcgtaccctatcaatacactcccataaggagcactagtgttagtttttccttttgccaccagggggagaaccaaactttctcacagagtcacacatatttgtcagacgtgcgttacagaggctggcagaccagggttgaacaaagcttttagttacttcctaccagaataaaaatatctgctggcatgaattcacgagagaaggcagtacgaaccacttttgtatacaaggtcttttaagcttttttattccaaacactgcagcaacaactatttttgatcctgggagtcaagagacgacaaagttaactatctctgggtcttcttrctttctttacatttaagatgaggcattaggaataagacaagtaacattaatgttacataagacataaatgtacatttggctccctttagcttcctcaagcctagtattaaaggatgatgacaatggtgatgatgacagtggtggtgattgtaatgttgttggttgtggtagtgatggcagtaatgatgacaaagatgataatggtgatggaaattttagctaaacataatgaacacctaccaccataggatagatcctgggctaagcaacttatattagtagctaattaaactctaggaggaaaacatggagctttcttcatttacttattaaaattttaaagttagaggaagtttgggcatcctgatcactcccagaaacctttgaaccccccaccacaggaaaagataaataagtaaatagatagatataaaggttattggtaattgttatattaataataattaaataaagagtgtttttatgctcagatacaattccacagagctgtatttgtgaaggctggctcttcatgtgataaactattggcctattttcattgttgtcccaataaaataaggcaagaatacacatagtatatggatcctgccatgtactcagaattttttcttattacaatccactctttataattttgtctatcgttgcaacttttttacaatgagtgcatgttacatataaaataataatgcagcttcgtcatcttagaataaacaaaaggtgtagatcccccaaaattacccagaataaatatcacctgcatgtctgagtctgaaacatgggcacttgtgttgattaaactgtctcctaaatcactacagattcactgagtttttgcccaaacaaatcaaagtaccaaggaaaccaaaaaacaacaacaaaattacaaatgaaaattcatctgtaatgaaagtcagaaacaacgaggtcaaagcagcttatacggacatcaaatttcacttggctttgtctgttagaaatttacctcaatggagaagtggatgtggcatctctagtcacatttttagtgatgataattattatttggtggatgaatacacaaactccacattatttattagatacgttacttcctcttggctaaaatcactttggggcttaagccaaagccttccctacataaatgacatcaatcagattggcatttaccagaacattccaaaatcaataaggcgtgtatttttaagagccttttttgctatctttagatcggcaaatgaaggagttctgaagaaccaggagtgggagttccacaaataaacagcatgcttcatggttcattgtggagaaaaatctggaaactctcaaggggattttattgctgatctgaagtgacttgacgaaactcaggatcccaaatgagggaaatcctttgatagtaagagtttgcctaatatcttctcagagtgaattctaaaattaagagttaggtctaagattaagtcagaaaacactgcaaaagggactgccttcttaagatatgcccccttctctctcccatcactttccctacaaaacaacccaggatgagggcaaaactcactaaaataacatttatgtgggttttatttttgagccttggcctgtggtctctgccattggtggctgtactgttctgactcaatttctgccccatatcctaaatctatagtctcaggtacaaattatcagcccatatgaggactgagagggtgacctgctcgtacatttctacctctttttaaaaggcaacaaaatacctacttcctctcatttcagaggaaaatccactttccacttcatgtataaaactcagttggctataacttatgaagaaataagctaaggagtgatgactcttcagaaaatatgagtactggagaacgaagaaattatcaaactataaaaggaaatagagtttgtgcctggaaaagacaacagggtgcttccccttgcctctcagaataaactagaaaataaatgaagtctatacacacagttttcctgattctcagttgaaatttgaaaggaaagtaaataaaagagtgacagaattttaatgcttgaaaaaaacacaaagaacaccatattgatttatagaaaaaaagaataaggataaaaaagtatctacaggatggacaatggggatgcacaaaaaccatgtgagagaattaagaatttcaatttcagataagatcatggatccaagatctacctactatgaatgctcttgtaaaacaacacgatgtgcccccgggtagccaagattttggtctctaaaactttcaactaaaaagtgaaagacacagggatccttgaaaagtagttgattccatgtcttgtggcaggaaaaaccaggatgagtctggaacactttgttgttaccaagaagcttgaatactttcaagggtggtgctaactggacaaatggaccagcttaatgcagttgtcactaatgaaagcatgacagtttaatcaacaacaaaaaactctgtgaaaagtcatgagaacacatatactcaaaaacaacaaataacataatctgctcaagaaagatgtgcatgacttcccccaggaatatttactggaaatacttcacattgatgaacccaaacacatgcttgtcaaattcaagttttgctaagttccaggaggtcaaagtagacaatacaatgttgcatagggtgtttcaaattgggtagagaatgcagaatgatggttctcaaccttggctacacaggaaaatcacttgagaaaatttaaaaaatatcaatgactgggcactatccccagacaaattaaatcagaatctctggaggtggggcttggggcctggtatgtttgaaaagttccccagaccattctagtgggggtggagaaccactggcctagaatctaggataaccagtcatcctggacactttcctggttttagcgctgaaaagttcccatgtcccagcaaaccctccagtcctggaaaaacaaggatgattggtcaccctctccaatcaggcaataaaaagttgtcacagaaattttcaataaaaattacataagaaaacactgtaagaaaattaagtataaatgaccatgattcaccagactacaagaaaaggttgaagcttagaaattcttactactgtataaatgactatagcacaataaaggcccagtgggattgaggaatcagaatggcaaaccctagttcttggtgtcttggtccaaaatctctgactgaaaacccccaatttataaatttgaagtcacattctcaaccaataactgtatctatcatttctgttttccttatttgggtcagtaaccttgcaactctgagaagtatactaatactaatataattctaagaccaaggctaattctatgctaatagtgctggtgctggtactaataatgatgatagctctagcattaacactattatgaatactaatgataatgctgctaccagtattaatactaatcaggtactagtagtaatattgataaaatacatggggcaaatgaagaaattaatcaaactttggtattaatacaattgagttgagtgtaaaaataacttctggaatcaacatgttaggatatgcaagttttatttgttctttgaggtgtttgaattgttttggagaatctgacatatcgaacttatgattttaactaaaatacttgggacttaatgatttaagtttgcaatctctgtttaagtgtttgaggaaatctgatgagttaaatctagaagtttaaattttgtaaggaatatttagatgctcagtaaaaaattaagtgctagatttgaaagtctcactagctggtatttaagggatcaaaagaaaggtgttgtgttttgttttgtttttaaacattaatgcaaaaatgataaaaaaatgagatrtataaattgggcttaaaggcttaaaaaaggtgtttttaaaagactagcttgatatactagtattacacaaagtgagagtcaacgttaatattcttgtacaagtgaacccacaagcaaaagctaaggctttaaaaaaatacaagtggtgtgatgtttctggaacagctgtggaagtgtgatctcagagaacacaagaagacagcaaagacaattcctgagaaattagaagggaaaggacagagcaggcacagcaaatctagcctcaagtctcagtgaaaaggcccaaaggggccaaacactttgctgagttgtgggaagctcccctgccaaatctctggaacgaacctgagatgcctttttgcaatgactcagatactagaattgaaagaatgtgacgtaagttttagcaatggggcaatttatgatttattttagaagaactaactgaggaaacaagatgaaagttgctggtagggcttagcagaaatgctctcaagcaagccaaggataaagatctttgcaatattacttagaagtccaaaggttgctagagaccacggagttcagggagaggccagcagctacagggctggaaggcaggtgagcctgtcttgtgggaaggggagaggtgaatctagacgtgacgagatgcctgaggcctaggatggtttgcctggcccagatccaccggccataataggaacctgggagcccaacagacatgaggtgtcacatttaaacgcttaggtggggcaaacagggccataagaacatacatttttaaataagacacaaaccaaatacacgggtctgaagttataaagcacagaaaacttactttcccagcatcttgaaacacacctaattcacaaaacgtgagcatgtcatctaaggatggaaacatgaataaaaaagagcacaaagaaaagaaagaaaattaaactataaatagcagtaaggaaaaagaaatagaggcaagtgatggtggtaaacatagacaggaactgcgtataatgatttgctggcaaaggaagaaatacccgcttaaaaaccatatatattttttaaggtggactgaggttaacagttgaaataaaggcagcagttgaaaggaaggcagcagctgaaagaaggtcatggattaagtagactgatccagcagtttccacgccaagtccaagtctgaacaaaggaaaaacacttggaaaaaatcatttggttaaaaataataacaagggataggcagaagagtttgaccaggatgttgcagacaggaagaaagcaggctacagggaaatgtgggaaagtgatcaatgaaggagaaaggcagcaaagccctatctacctacatcagtgggtgtcaaccctgactgcactctagaattacctggggagctctacaaaatacctatgcaccaccctcgaccactgagctggaatctctggggcttggggattgggtatgaagtttctaaagctcccaggtgatctcaatttgcagctagggctgagacccactgctttgcatgcagagagagtaaatgtgaggtcccatatctctaaattatcaggcccaaacagccacttgcacctgaagcactccaataattgtagccaaagtcatttccttatttgaacttcgcaggtaaatgactagatttttcacttgacttaaggagctttaaaattcagaaggaagaaaggaagaaatttttttattatcctttaagttttagagtacatgtgcgcaacgtgcaagtttgttacatatgtatacatgtgccatgttggtgtgctgcccccattaactagtcatttaacattaggtatatctcctaatgctatccctccccgcttcccccaccccacaacaggccccrgtgtgtgatgttccccttcctgtgtccatgtgttcttattgttcaattcccacctatgagtgagaacatgcggtgtttggttttttgtccttgcgatagtttgctcagaatgatggtttccagcttcatccatgtccctacaaaggacatgaactcattgttttttatggctgcatagtatttcatggtgtatatgtgccacattttcttaatccagtctatcattgttggacatttgggttggttccaagtctttgctattgtgaatagtgctgcaataaacatacgtgtgcatgtgtctttataacagcatgatttataatcctttgggtatatacccagtaatgcaatggctgggtcaaatggtatttcaagttctagatccctgaggaatcaacacactgacttccacaatggttgaactagtttacagtcccaccaacagtgtaaaagtgttcctatttctccacagcctctccagcacctgttgtttcctgactttttaatgatcacygttctaactggtgtgagatggtatctcattgtggttttgatttgcatttctctgatggccagtgatgatgagcattttttcatgtgtcttttggctgcataaatgtcttcttttgagaagtgtctgttcatatccttcacccacttgttgatggggttgtttgtttttttcttgtaaatttgtttgtgttcattgtagattctggatattagccctttgtcagatgagtagattgcaaaaattttctcccgttttgtaggttgcctgttcactctgatggtattttctcttgctgtgcagaagctctttagtttaattagatcccatttgtcaattttggcttttgttgccattgcttttggtgttttagacatgaagtccttgcccatgcctatgtcctgaatggtaatgcctaggttttcttctagggtttttatggttttaggtctaacgtttaagtctttaacccatcttgaattgatttttgtataaggtgtaaggaaaggatccagtttcagctttctacatataaaattttctcaactaaactcagaaaaggaagtggggaaatatgtttgggtggcttgtaaactatcaattattttacatatttgaaaccatctttaaatagaaatccagtgtaccattggtcttcacactgaaaacaattcactcagccacaaaataaaagctagcaacacggagataagaatgtcttatttaggtcacaaaatgcctacagattctttttctgttttcatctctactgatcagtgattctcaactgggggcagttttgcacccttaggggacatttggcaatatttcagacattttttattgtcatgattggcagcttgttattggaatctaccggggatcgaccagggacactgctaaacactctacaacgcatgacaaatcccttaaagtaaagaattatccagtccaaaatatcaatgtgctgaggcagaaagatcctgctctagatagtaaggttaacatttctgcaaataataactaatactctctataataactctctattgatactctctactaataactgcctttcaaccgaaacacaaataagtttaaacatgcaccaattatatgctgaattaaagaaaaacaaaaaagcctcttacagaaaatcaaagcactaataaaattatcctgtgggtttaccacaatgagagatcaaggactggagaattaaaacattggccaaccaagtgaagttgctaaagcaaaaaccagatatcaaattattttgattgttggaattgagtttacactcagacaaattgagagtcctctaaatgaagacttctgagcatgcgttatcatcaatatttagtaaattatgcttaaaatatctgtgtttgctaaattttacatgtcctaaataatacatttgtaggggaaaaaaaggcttttcaagctatacaattatataaatttcttccaaatcacttggtaaatttgctcacttcatggaaaacaaaacagaggtgggataggaagatatttttcagaattgcaatgcaaatacagtgagaaataatatcacccccaaacatgagaaagtcggtgtggttagagctgaaggaagacaaggaaaacttatcatgcatcccagtctctgatctgtgataacagtaatgttaaccactagtctagttctaatgggaactagaagtctattctagagaaagatttacaaattattaagagtattcattaaaagccacaaaacatgcctatgtcctgaatggtattgcctagcttttcttctagggtttttatggttttaggtctaacatttaagtctttaatccatcttgaattaatttttgtataaggtataaggaaggaaaccagtttcagctttctacatatggctagccaattttcccagcaccatttattaaatagggaatactttccccatttcttgtttttgtcaggtttgtcaaagatcagatggttgtagatgtgtggtattatttctgagggctctgttctgttccattggtctatatctctgttttggtaccagtaccatgctgttttggttactgtagccttgtagtatagtttgaagtcaggtagcatgatgcctccaggtaggcaattccattcaggacataggcatgggcaaggacttcatgtctaaaacaccaaaagcaatggcaacaaaagccaaaattgacaaatgggatctaattaaactaaagagcttctgcacagcaaaagaaactaccatcagagtgaacaggcaacctacaaaatgggagaaaatttttgcaatctactcatctgacaaagggctaatatccagaatctacaatgaactcaaacaaatttacaagaaaaaaacaaacaaccccatcaaaaagtgggcaaaggatatgaacaggcacttctcaaaagaagacatttatgcagccaatacacacatgacaaaatgctcatcatcactggccatcagagaaatgcaaatcaaaaccacagtgagataccatctcacaccagttacaatggcgatcattcaaatgtcaggaaacaacaggtgctggagaggctgtggagaaataggaacacttttacactgttggtgggactgtaaactagttcaaccattgtggaagacagtgtggtgattcctcagggatctagaactagaaataccatttgacccagacatcgcattactgggtatatacccaaaggattctaaatcatgctgctatgaagacacatgcacacgtatgtttattgtggcactattcacaatagcaaagacttggaaccaacccaaatgtccaacaatgatagactggattaagaaaatgtggcacatatacaccatgaaatactatgcagccatgaaaaacgatgagttcatgtcctttgtagggacatggatgaagccggaaaccatcattgtgagcaaactattgcaaggacaaaaaaccaaacaccacatgttctcactcataggtgggaattgaacaatgagaacacatggacacaggaaggggaacatcacacaccggggcctgttgtggggtgggcagaggagggagggatagcattaggatatatacctaatgtaaataactagttaatggggtcagcacagaaacatggcacatgtatacatatgtaacaaacctgcacgttgtgcacatgtaccctagaacttaaagtatgattaaaaaaagaaaagaaaagaaaaaaaaaagccagaaaactttaaaacataactggtactctcaaacaagcaatttaaataattgatgaatcccatttccacgtgcttgatagtcatcagtgattgagggcctgtgagtgagaacaatcaagtcagtggtcttcaagttttgctgtacgttctcatcagttggagattacaagctttctttttcttttttaaaatgatgccaaggcaggcttcttcccagaccaaataaatcagaagctctaggagtgaagcttgatctttggcacagtattgtacagcacatctcaaactttaactttcatgtagattgcctagggatcttcgtaaaatgcagattctaattgagtgggtctggggtgtgcctgagattctgcattttgcaatgtcaacagtggtgttctaaggaacacacttggaatagtgaggtgtcaaaagcttcctgtttgattctaatgtgcagccagcattgagaactgtctatgactaagctcctagttgtaagctgggtgctatgtgggcacagaagtaaaatagaaaaagaagcattcctcaaataaggaattgttccatcctaaatcactgtcatgcaattcacatatctttggcttatcttttgcaagaaaaaagggtcaaattttctaatgggaagaaattccattgtagaccaaaggaagctcagttactcctctggaaggacagcccatttgatgttatcttatattaatacaggtaacttgccccagccttagcttttgcgtttccttttctggaaggctctttcagcagagttctgcatggctgtttcctgttcatcattccagcctcctcctatgtaccattcccaaccccaccccatcactctcatttccttatcctgggtttttcaccagctgtttatcacgagttaattaatcaataacaataaatggccagtgagctcaaagaaacccacaaccattcccatgccctgctgaaacatgaatgaagcctgaatattggttagtactattggtcttgggagagagaaatcctaaaaggaagaaaaataatgaccttattaaaaaatcacactggctagcattttggaggaggctttacatttatagcttaatctcaaattgwttgtctcatttgatgcctatgaaaaactcatagggtggggattttccccattctcaaggtaggaaaactgagtttttgagatgccaaagagcacaaaatcacagaaggaagaatcaaaggcaggcatctgaattcaaagtctaagttctttcaacttctcctagctgacttctttattttttcaacacactcttaagaatcaacaaccaagtcctaagactgtacatacatttgaacttgatattaagtaaatttaacccaccagtatctaaaatgggaaataagagatacaaggcaagtcacgttggtgtgtttgtcccaaccctacaccctactttctccatgtgatttttaatgggggccctttctatttactgaattacaagaaggatatcctgaaaaagacactatcaaattcaggaaatagtcagttagtttgtattactgagtatttataaagcagtattattttcttatttaaagaaaatggaagttttaattattatttattccaaagattataaaaggtgaataataagtgatttaagagagtatatgataatgattacaaatctattcaagagcaatttaagttttttagtctttaatttttcctatttaaaaaagtaatacttttttaaagaaaacaaacaaaagcaaaaaccaaaaacagcagaaatatactgtgaaaagaagaaatctcctatagttcctccccctgaagaaagccattgtaagtaataatgataataataatataactaacatttgttgagtgtagtaaaggccacacactgtgctattaatttgttaaaattttctatggatataacaaaatatatgcatagacattatgttattaatataacttgcatcatattatatgatgtgttctattctgttgtgatacactagcaaatggtagtacatatctgtacataacagaatcatcactcatcattgtagaaatgtttacatttagtaacatttgttgtactaagcactgtgttcaatgcattacctgacttatttaattctgtcaatgattctctgaggtagtgtgtagtattatttcataatctaggaaatcaagtattggagagatttaatagcttattttaggacatggctttgagaggcagagctaggatttccactgagagctgtctcagcccagagcctgaattcttatcaatggtatttttaacttgttttaatactgagaaaaatattttttaaatattgatgaacattaactcaaaaaagcgtctttagaactgctacaatatgtttgcaatttagtagtaattccagaaagtgtgcttggtagtaattgaactcaaatattaagttcacttacaccctcataaatagcttaaagtttctcagaaggtagggtgagtagttgatccagaaggtgccaaaatgataagcgttataagccaaaaatggacttcctgtagaatgcaatggggctacctttccattctcaatgaaaatttcagcaaaaataaatgtgcactcacagataagtagataagcattatttgtcctacaccaacctcacatatcctataaatcttagcgtaaagttgtgcattgacctgctgcaacatgaatgagcctcaaagacataatactgagtgaaagaagtcaatcacaaaagaccacatgtcatgttgtatggttccattcatatgaaatgtccatagaaggcaaagctgttccaatagaaagtagattagtgggtacctggggctgggggtgggaacagggaatgactgcaaatggggatgaacaatttcattgggatgatggaaatattctaaacagattgtgggaatgttgcacaactctgtaaatttattaagaaaccactgaattgcacacttaaactgagtaaattttatgatgtaaaattacttcaataaagttattttaaaaatatatctcaataagagaaccagaaattacttgcaagtgaaggattaaaattaatcttatacattcaaaataagtgagtaacattataatgtatcattttccttcctaggacacccatttagaaaaatcacaatataatgaatgaaaataaacatcatttttttgttactacttatttagtatttatagtgatctgaccaagcatccatctgtggttaatatagaaacagcccactgatctacacaccagacttctaagaaattcagctttctaaaatcagaagcaaaaaaggcatctgaacaactatcaggattggctacataatttatggagccctgatcaaaatgaaaatgcaggacctcttgctcagattaataattttaaaatgatgacagcagaacattagtcatgttgtccttctgagcatgggccctgtgcgaccacacaggtaggatactcataaagctggtgttggcaatcaaactagttgtcacaaaaattctggactaaggccatgcattttattcaagaggtttattctgtaacagaagtcctctaactctcattttattctacatgcacatttatggacttggttatctcatttgatggactaagggcaatcaaaatcaacacataagaactgagtggaagatttcagaaggaagaagccctcttctgaagggaaaagtgaagaaacactaagaagctaacccagcaatatgaagtataataatgggaccaggaaatagtaaatttttctattacaccctgtttgcaaagacagcaacatctaatacattttagaaaatattcatcaaaaaacaaaaaggaaggactcaatggggcagcagtgtgctgataaaacatttaacaactggttctctggaggaaagctctgatttgcgccatttgttaatttccataatataaatactcattgtggcggattccagggtaccaaggtgaggacacaggacatgcagttaggaagagatgcacacaactggttctccagccaacgcaagctggctccagcatactgctgaaatggggaaaacattaggtactaccggcagtgaaaatataagacaggcccggggcacaggaggagaaataaaattcagttctgttcccttataaaacattttgttccaagggttagcaaagagagaaggtgactgttgctatttgctaaaataagatactaattctaatggcaaaatcatcttggataatcaaaaattgactacataactatttcccttgtcactttccttccaaaaataattatctctgaataatttcaaggttaaagattgtaagcctaaagagcaaccgactgtaaaaacaactgaaaactatgccagtgatatggcttttaaaaaaatagtaatatttgtttttaaaaaagagagcatggccaagtaaaaatattttctcttttctgttccaatggtttaacctatgaatcaccctctaggagtactatcataccacagataggcaactcttactctttacagcaaaagcataagtcttcactatcagttttagttgcttccaatagaaaggagagtatatgtgatattaaaatgtaaacatttcaaatcaccataggctaccttgagaatccctgattcaaaagacctctctcaccctcaggaacactttaaaatttcttcagagtcaagcagtcaacggcattctggctcagggcatgataccacagaagacacttccctgatggtctcttaggtggcagccatattactcacccagcatgcctggtgtttcctaaatcccttttcaattgcccttcttacacccagaagcatcaaagagaggtctggggatgactgctccctcttactgtagcaactctctcctccagagarggcaggggttaaagttatcttttttaaattatctaataaaaccgtagttgatcaacatattttttccaaaagtatttacggagtgcttattacatccaagcactgttctaggactcataattttgatatttttgctaggtaccagtccaattctgacagtacttagaaggcaaggtaacatactgtgcacatgcaagcctgtttaaaaacagttctggaatgaatgccaagatgagagacgctgacttacattagggaagcctatacaactgattatcctcattacctctgtttaacataagctcagactttttttwaaaaaaatctcagaacctatatggacattatcagttttaatctagtgtcttttttgcctttataactttctagtatgagcgcatagaatatcctacttaatgagagatcctctaggcatggaggcctagagatttggtaacactaattattttggttaaaacatatacacacacaaacacacacatgtgcacacacaccctaaatgggatccatctttgggaggccaagtagatgagtataggtttcccattcttgggagtagatggtatcattactagcaactgttgtgagatgcccctgcctgtaagaactgcgacaagaaactccttttgatggaagttgcccccaaagcagaaaggtcagaatcaggctgcaaagctgtggacatgtcagggtcttcagatctctctcctacaaggcatccttactatctggagatagatggaaattattgatctttcaacatcctcttcaccaagaagaaagaataataacctccaagaatattagtagcactgtacttcctgaaagtctgagaagaattattacccaagacatggaagcacatgggaaagggtagcctgcaaggggctaagcatttatgtgtgtgtataacatatgcatatatatgtgtatgtatatcaaagacagcatgactatacataatatgaagatgtaatataatatatattatctataatgtataatgtatggtatagataatccattatatataccatcaaacaggtaggtgacaatgtatattttatctctcacatttaatttcattgctctcctaagctgtatgaaaatatcctgcaagctgaacatggtgactcacgcctgttttcctagaactttgggaggccaaagtgggcggatcacttgcgcccaggatgagaccaacccaggcaacatggtgagaccccatctctacaaaaaatacaaacacaaaaaattagccaggtgtagtggcacacacatgtagttctaggcactcaggaggctgaggtgggaggatcaactgagcccagggaggtcgaagctgcagtgagccaaggtcacaccactgcactccagcctgggcaacagagcaagactctgtctcaaaacaaaaatgaaaacaaaaacgaaaacaaaaacaaaacctgcagccaagttgcctctgaaacctagaatgatgtcagaccaacagattccccacattgatagtaactaattaaatcactgctttctttgagataaagactagaacaggcactctttactctggggcaggcctactccactttggaaaaggtgccaaatctcatgggcttacactacctggtgaccttacacaagttactgaaactctcaggttccttatctgtaaaatggggataataattgtatatgtttcctagggttgttatgaagattaaagaagtatttgtaaaaattctaaaccagtgcctgttaaatagtaaggactgcgtaagtgctataaaaaaaaaaaaaaaaaaaaagaaaccgtgggagtatcttattgttttctaatgtttgcagagggagtaagagttttactcatctatatataatatgagcacataactcattctcagtttgatttttccttaacacaaacaagcctcttttcagagtttaaacaaatcacaaaagaatttttaagtcattgttaaaattgacatgatttataagctggaatgaaagtgccattcttgtcccttaaatgcatgaggtgatcaatacgttttttcctagatataagaaattcctttaggtacctgctttggcatggctggcatagacatatttatattaggtaattaagaactcagatgaaaacaatttgatactattgttaagcacaatatrttttaattattatagtcataattatataattatacctttatatatagtataacaatgcattcttttctacagtttgcagtttgattccttttatccttgatgtcatttaggaattctaaatgtcctaatttctccaaaacactgaatgagagttgcagaaagacaaacataaaaccagattaactgcaggtgaaaatggcatgtggataatttatttctgaatccagaggaattacatttttgatgctttgtctctccttagcctagagtctcaagaagcttttatacatacaagtcaacagattaacattcgtgatgattcactgtttcaaaataacttacatggtacatccaaagttactgctagaaatattgctggcattgatttctttaagcacatttaaacacaaaagcccaacagaaaaatcagagcttctacatttggactaaaaagaggacacacacagagatctgttcctctctaatagaatgtattaaatagtagacttgagtggtgtttgtaagtatgacattgtgggagggaaactatatgaagcaaaggctataccttgaataggctgttattactgcacccatcaccccaaaacaggccagtgtgattttatgtgcctcccccacaaaatagagcttcttaattaaagccttagcacttaccagttcctgccacacaataagcaatcaaaaaaaaaaaaaaaaaaaaaaaccactggcttaaataaagaccaaataaatggatcattgtcctaagtagcttacagtctaatttgggaggtgagactaatttgggatgtgggataatcaatcctgaggacaaatagtgacatcaacagacttgtgcagggtaaaatgtcaaagaggatatggagaaatctgaatccctgtattaagattggtgcaaaagtaattgcagtttttgccattgcttttaatcatcactgttacatcactggtgggaatgtaaaatggagcagccactttggaaaactgtctggcagctcttcaaaagtttaaacatagagctactatgtgacccagcaattccactcctagctatatttcatttcaagagaaacaaaaacacatgtacacacaaaaacttgcacataaatgttcacagcattattcataatagctaaaaagtggaaataacccaaatgtccatcagytgatgaatgaataaacaaaatgtggcgtacccatacaacgaaagattattcagccacaaaatgaaatcctgatacatgtacaacatagatgagccttgaaaacattatgctaagtgaaaggagacagttacaaaaggccatatattatatgattctatttttatgaaatatccataaaaggcaaatctatggggacagaaagtaattagtagttgccagaggtgttaaagggaaagggaggggtggttggctgctaatgaatgcagcaattctttatgaggtgatcaggatgttctagaacatgtggtgataaatgcacaattctgtgaatatactaaaaactactaaattgtacacttttaaaaaggggaattttatggtatgtgaactagacctcaatttcttaaaacatgcaaaagatgcatcactgcaggagttcagtggagaagtattaataaaatttggaagaccttagaggcttccagggggaggggataattgagctaggtcttcagggatgcattggatttaggtttaaggagggaaggcatttcatagaagagaaagaaggtgacgaagtgaagctggtcattgttccagtcatgaaaaaaaaaagaaccaacataccttgcaataatattgtcaatgaacgtgcccccccgcaccccgtccccccctggctaaaagcactgtcgtttacctctgcttcaggtggaatttacagttcaaggcagccaatatgcaaaccacctaagcctccattttcacagctgtggcttaccaatttctctttaaaacaccaacttttagatttctgtcccactcaattacattgaaagaaatcctagatatcctatctttcatccagaaatatttcagcattatactcttaatgtttgacattaacctagcatgaactatcactgtatgatactcatgctgtgactgtgccgtattgtatttgactttcccaatatttgggggtctgagtttcaagaaggacatgaatgtcaacttctagtcatgtaaatagaattaaaaactcctagtgctgtttatcttgataaggtttctatagtttactattaaatattagagttcaagcctccacttggaatcagatccattcaggagactgtatcatggtgttgcatagcagaattgctatttaagaataacattcttgtcacattcatccacattccaaaaatactctgcttggccttgatggcaggatctgagaagaagctggtcatggtgaacacaaagtttgggagagattcttgctgaaatatagctttgtgtgacaaaagaggaaaagcacgggattcctgggattggaagagcatccaaaagcagctaatccagcctcccgcccaatgaacaaattccctccgacgatgctattaggtaagtatcaccttgagttcaagtagtcacagctttatgtccaaccagctcatgactggacaatttttatctagacagtcctcatagcatggccaaagtcacaaatgatgaaagacataataaactctagaaaaatacataatatcaagaccatgtttcttaacctaggcactgtagacatttgggtctggataattctttgctgtaggggctgttctgtgccctgtaggatatttagtagcatctctgacctctacttgcttatacgccaatagcaccctccccaagatgtggcaagcaaatacacaaaaatgtctccagacattgccaaatgtcccttggtgggggagtaggggtgggggagggcaaaattgcccccagttgagagccacagggctagaggcattacatgttaagagctacaggagggaagctgtgacctaacggccattcatatgtacaggatattaggatacttacgacctgaacaaaaatatacccttcagtatccaacagtaagttatttgacattaccaaaactcagcaaatgtttgttagcttaaataaaaccatatgattgtatatatttcctgttttagaataagaataattcagtaaaaaggctagtgcattatgttttcattgcatacatatatacatataaataattgaaggagatctgataacatgttaaattttaaaattcagtggtgttattatttagtcagactttgtcccatcactgtccaataactttatgtacatcattctgcttaattctgactccatctctgaaagataggtctgctgactcaattatgatataatactaaggctcacaaataacttgctggaagtcatccaattagtagatacaagagttgggatttgaaaccatgcctgattccaaacacaaacccaaagtacaacattgcattgagatttaggatctgattcccaagttcttggccacaaaagtatgctgtacgtttgtctgtctcgttttaaagaattacaaatatgaacaaatgagaacaattcaaatatgtgtcaagtttttttcacccattttggttccaccttctttgaacattttcaaaacataaaagactgtgagtcagactttgagcctatgcctaatttaagcaagactttatatactagattaattaacaaaatagaagattgttctgctctcttgatctcacattgcaacaacccaggctttattgtacaggggtcacctcccttctagaatggctttatccacaactatgcttgtatagagaagtctacaagtcactagctctctgtgagtatcagctacaagacattgctctggcaacaccaaggcatgcttgcaatttaacaaactctgtaagtggaaggaaaaaagagccttccacctaaatgccaaatctatatgtttcacataggagtgatgtttgaaatatctatttcatttttgcctgccactcccctattctctcagagctctgttacataaagcattaggtgttctggggaataattgagcatcagttgtggcagagcgtaggaggatgcctaggttacctccattatcacacactctatttaggaggtgggcaaatcctatttatgtaactccagatgaagatacaccctagcaatttgggagggtgatcaccaaaataaataggtaatttcacttgaacaccttgtactaagcacaaatctgcttactgccttcatcttcttcgaaaggaacaggtgtcattgaaaacaatagtttgcgttggctgctcagtatgggaaagccaaggggttgaaattcaaagctgagtagaatacgggcagagaacagcagctgaattttactacgaaatgtgaaaacacagctctgtatcctccccacctgtgaagataagacatcctgactatttcagtgtgagaaaagttcagcaatcttggggtgctcagggctgggtgtaggtatgggggagagttagagatagttgatgtgaaaacttccccagtaggaaactgagtcaaatcagtcatcttttggttgctcattcagttctctaaagccctggtgtcaaatacgacagccactagccccaagtgaccaatgagtactggaaatgtggctagtcagaattaaaatgtgctgtaagtatgaaataaataatagtgcaaagacttggcatgacaaatgtgtatatctcgttaggaacttttctattgtttgcatattaaaataatatttcagatatattaggttaaataaaatatattactgtttctttttatttttaaacttatctaaatgtggctattataaaatttaaaattgcatatgtggcttggatttcatttctattggacaacactaatcaggctgaaagttactttaaggcatgatttatgctgagctcaaaggaaggcgcttccataggaaagtgttgcttgactgagcttggctccctatctcaaaatgttaacttcaaatatacttcaaaactgaaatttcattcactgccttcttggcaaaatctgttagataaacaaatcttctactctttgagacatgaaaaaggatggttaacaatgtaactaaactttcttcctttgcagacatacttaaaccacgttaaagcagagataaaacaggctctaacattgaaatgggctcataattaggtgctaatgttgaatatcctgtaatgtttcaaaaagacacagatgcagaaaggccaggtctgcacaaggcaagagagaaaacgttgcatttatgaatgcaaatatgttacagatatccaagttcaccagtctatgccttactgatacttcttgctttttggcatctcctctttaatttccaccacttaactgattcacacctgggtcagaggcaaagccgtcttcctcatctctctgatgagcctctccactctttgcatctcccattgctaatctgtcttgtccccctaccattgcaaatcatctcaacttttggcttaagaacctatgagagtagcaggcagcccaggatcraggtcatccttgcatcaaagccttaaaatccgattctacataatccagccaagcaagagattccaaaggcaagcacgagaatcattaataatgaagtagtcttccaatctattcaagtcaatcctcagtctttttaatgcaacatttacattaaaacataaaaataatccctttgttttgcatttgtttaattcatttacaaattattccatataattagaactcaaagaaagtatcactgtctgccaacaggaaccaaattttcttttcagttcataagttttttaccctccaaaacctcatcttaaaaagttttgtgtttgtgggtggttataaatgtttttctaatctagagctcaaagaaaatgtggccaaaggatactgctttgggtaacctcaggaaggaagaatatctccaaaaatattaaaaataaaaaagcagatcatagctcttaaggcccagtatgctaaatcctcagcgagcctggatcatgtaggaacgagtaattctagataagcacacatcctggatagctcagggttaacattctaactatcttattgtaagagcttctatttctctaatggagacattttcatgtcttttaaaaccattgaacagtttgtcttataagcataattataggtgaaaatacagattaaataaagagctgattgaatctgtcatgatattaccacatgaagcaaatgtctgcaggcatccacactgacaatccattatgactgttatatcttttcaatatggcacccagcgtcctggtaggcctaatataaggggctgctggctgcccctccagcaaacgttagagcagttcctgactctacttcttcattgctgctctcttttccactgtcaacaggaagggcaaactgctgtccctctgttgattctcacttctaccaccacatggccatgggtgcccaccttgaggtcccaggtgaccccagtactgttgccactgtgatctctaccactctgctcctctttgctttctccatccttagttctcaaaatgagcttttcatgcacctatcaccactggggtggaatgtctttttccttctataagacaaatccatgacggaagacactgctgggtaaaaacacatctggatcccaattctacttttaaggagaatttcttttttctttctttttaaaaaaattactagtcattcctgcaggttggtatcctacaaatcaagggtttactgtatgattattacatatccataagaaaaaaatgacaatttaaaaaattttaatggcaagctctggcatattaattggaaatccttggttcttagtstaaacattgaattgttgtgtaatcaatttctagtcaaataatcaatttctacttcagtttcattaataattatgattaagtcagtagcaaaaaagcatgttatttctcctcgggaagatgtaagacagcttaacttaagggaccctaaatatggtctttgtaatcagtggacttgagtttacaacccaacttcaccacttatttttgtgactttggaaaagttacttagcctctacaagccccagtttcctcatctataaaatgatataaagaaacctattagagagttgtaaggaatttttttttagataggatctcactctgttgctcaggctggagtgcagtggcatgatcatcactgcagccacagcctccctcgctcaagtgatcctcccgcctcagcttcctgagtagctgggactgtaagtgtgccaccatgcccagctaatattttattttatttttagagacagggtcttgccatattgcccaggctggtctctaactcctgggcttaaatgatcctcctttctctcccaaagtgctgggattacaggcatgagctaccatgcccagccgagaattgtaaagattataaagtactcgcataagtcatcaaggaaaatgtatgacacagagtgggtactgggatgggggcggagattttgcccattgctgatcccctggcaacagactaaagaagactatactgagcctcagctaggaaaagcaatcctcaaatacttgacagcatgtaagaatgcacttttaaagataatgatcttttttcctttttagagattcatggtactgtttggcttacagcattccgcctgagcttgctgtaaactatacacacacacaccccacacacacactcacacacaatgtaaacacacacacatatgccactgccaccatgactatcagccagttaaacagattatggtacattcacccacaaatgtccatataaaaagcatcctagtatcctgtggttggccatcgtggttactcccagcatgttggccctgattaatgtgtgtgggatgtgtgcgtagggggtattgaaatatactgtatcccagtgtccagcgaaaggccagaccgtgttcacgtaaacagtcctgacatattctgtttcagtttcccatgacataaaataaactgtcacctacaaactgcaagtaaactgagaagattgttaagcacatatataacaaagaaacatctaaatagataaatggggagtttttttttttttaataagtaaatgtgcctagacagactattaccttacagtggaatagaccatgcatgtctagcattgcttggctttcttggttcattttttataactacattattgagatataattcacatactttacaactcacacatttcaggtgtttgattaaatggttttcagtatattcacagagttgtgcaaccatcaccacaaccaattttagaatatttttatcacctcaaaaagaaaccccatacccattattagtctctctgcattttatcccacccccagccctagggaaccaccaatctatattccatctccatggatttgcctattctggatatttcatgtaagtggaatcacaagagaatatgtgatctcttgtgtccagctcaagagagacttagcaccatgttttcaaggttcatccatgtgggagcgtgtgtcagtacttcattctttttcctattgaataatattctcttgtatggttgaccatattttgtttatctgttaatcagttaggatggattcttgggttttttccacttttttgttgttatgaataatgcatgtgcattcatgtataagttttttgtgtacacacatttcatttctcttgggtagataactaggagtggaattgctgagtcatatggtaactctatgcttaactttttgaggaactgacaggctgtttttcaaagtggctgcagcattttacattcccaccagtagtttatgagggttctaatttccctacatcctcaccaacacttattctttgtatttttttcatcattactatcctggtgggtgtaaagtggtatttccttgtggttttgatttccatatccctgactgctaaagattttgagcatgttttcatgttcttattggctaactgtatgtatgttccatgtgttcattggccatttggagttgaacggggaggaggtgtgggatgatattcaaaggaatagtgtaggaatcagatacaggaatgatatcctatagtccagtatttttttctttctgctggcacaatgaatgttctaaggaatttatgagtagctttttaatcttaagcctgggatttgtgagctaactataaatcacttaaccaaagcatgatgaaatgctattcaacaaaatgctgaaggaagcagtaagattaataactaaagacaacgtatgacttcaacactataacttaaaaaaaatcaaaacaacaaaaatagaactataagtcttctgtccattagtcaaaggtgttatcactggctcctaggtcacagattgagacctcagcctggttagtctgtcaagcagagttcactgaagtaaacgtgtgtaaggaggcagggagggggaagcggaatggaagagtttataacaaaaatcgcaaccagattctcaatgcatacagtgtggcaaacgttgtataagcctcacgggtgaactacaatattggttattcttgccacaagtctgccaggatttcttaaaaagttgttgctctcattggtggtttgcttgtctgtaacagagaagggcaacaaagttccttccatgtacacagtttcctcttgctctgtttaatagccacaagcagcttataagcataaaactctatccaggtacaacggaagcacccttagccatagctataataggcccagggagaggaggtgaccgatgcagcagttacccagtcaataggggtctatgaggaagcatgatggaagagttttcccagtatggacgctgctgcccaaattgagagttgtagaaattgccgttcagtgggtgccgggaacagacagaagcagatttaaaggcagtaggacgacaaagtagtcatccatgagttcttcctaccagagtttacaagatatctgagggtggcaatgctatgggtatcctggcaataaaagacctcctattctgagtgtccaaaaggctgtaacacaatttcatcacatctcttttttctaattgaggaaattgatcatcacacacacacacacatacacacacacacacacacgcacacacacacacgcatcctccaaccctcacactgcttaactgtttctataacttccccttactccaatatccttactctgtggcctgtaagtccctgccatttttcttgaccaccgcacccatctctccaaagctctgttctgctactgttccccttactccttcactcagtctgctactttcttcactcatttgcttgaacttgctatgccactttgctcctcagcatctttgcacaaactattccttcttttctatagtgttttccgtatgttaatccacctaataatcatcagcctgtaggtcttggcctagtcttcacttttaaagcataacagatataataactagggccaccgacacgtagatccacagcctgcaagaaatggggtggggggttgtctctggcttgcaccccatgattcactggatatctatgtcaagtgttcactcaggagcacaagcaggggcctgtggccacatgtcctctggcctctccaagtcttgctgccaagtgccagggctggaaaatggttgaagtggatgaccccctgccacttcctccaaggtgacactgtgaaggtggagcaggacatccatactcaggggacacagattctcaagcaaggagaggtggagggagccttttgtgtacactttactttgataatggatactgctggaatatgggcagactgcagtggactatttttaaagaaaaggatctggttttaaattcatatgtggttttgtgattttaaaaggaggactacaaaaaatactgttgtgaagcaaatgatcaccatctaatgtgcctcttgtttgttatacaaataaaagttataactaaaataaaacacttcacactggctaggatggctactatcaaatagacaaagctggatgtggtggcacatgcccatactcccagatgctcaaaagattgaggttggaggattcctcaaacccaggagttcaagaccagtctgggcaacatagcaagatgctgtctctaaacattactactaataataataacaacaacaagtactggtaaggatgtggagaaactggaaccctcaaacaccattgtgggaatgtaaaatgatgcaatcactttggagaacactctggcggctcctcaaatagttaaacatagagttcctataatgaccaagcaattctactcctagttatatacccacgagaagtgaaagcatacatccatacaaaacatatacacagaagtccatagcagcattattcataaaagcagaaaaactgaaaacaccacaaatgtccatcacttgatgaatgaataagcaaagtatcatgtttccatatgatgaaatattatatggtgataaaaaggaatgaagtactaatacatgctgcaacatgggtgaacctcgacaacacactcagtgaaaggagacagtcacaaaggaccacgtattgtatgattccatttatggaaaatctcaagaacaggcaaatctagagacaaaaagcaaattaatggttgtcaggggctcagagtagcattggtggaggagataaaaagagagtgactgccagtggcatggagtttcttttggggaaacaaaaatattctaaaattagctagtggtgatggttgtacaactccgtgaatgtactaaaacccactgaactgtacactttaaatgggtgaattgtatcacatgtgaattacatctcaatagagagggtttaaacaaatgatgctataccttgagtttacagagcaaaatgtccctacataactttgtgtttccatgtttgaccacttagcaggaaggcctctcaagttaatgaacacatttccggctctcgcaagacagtcttactgattgctatgagactaaaattccacatgaacagaaccatagtgtctggatgaccttgatgagcaagagaattataaatacaagttagaaaattttcaaaaaagaaggaaggaaaagaagttaaagtgggaatagggtgttaccactgtgctagaaaaaataaaaagagagaaacaaacaaacaaaaaaatgggtgaaaagttgtttttagtagaacctctttaaacaaggggaatgctttcaacagtcccaagcaaatttcagtgtcacatggttaaggccaaaatatcccaaaataagatgaataagataagattatggccctgttgctatgacttcattatgtggaatatagatattgggcctgtgtcactggcagacattatttatatatatatatatatatatatatatatatatatatataaaatatacaaatatatatgaaatatataaacatttatttatatgtttacgttagatttatatatgcatatataataaacataaatatataaacaaatgaacatatatttataggaagataactttattttggtataattgatacagcataaaatttatgcattttatgtgtacaattcaatgatattttagtaaatgtaccaaattgtgtaaccataactattaattcagttttgcaacatttttatcaaattatatagacagtcctggtggctgctcagatatgtttttgcttttgattttagaaagtcgagtttcttagaagtctggtgtctagttcagtgggatgtttatgtcttaactacaaatgggtgcttggtcagatcactgaatcctgaacaactagcaaaaaataaaaaggtgtttcccctcatttattagattttgaactttctaagaggtggcctagaaaggaaaaaatatatatataccattactaacgtatttcaagtttgattgtataatattgattttaatccttcatttgtaaataagtactttttgattctcttattaactcatactctaaaacaacttcattgagatgtaatttacattctataaacttcacctgtaaacttactgcgttggataaccatcaccacaatccaatttgagaacatttttgtcacttcaataacatccctggggctcactgacagtcactctcctttcccaaccacagccccaggaaaccactaatctattttctgttcctatggatttctggaaggcattacactttcacacacagatagaaaaagatatatcaaaaatatatctctcctttaagaaaatcctatctctaccccagaatttcagtgtttgtgatgtttaaaatttttaagtaataaataaaagttgccacaaatgctatgaaaaacagtcccccaaatgagaagtttctccaccataatatacattttaaagtttataataaccaattaatagacagcactttaacaccatgtgatattttcctgattaaagccaaaagctactaattctaccctgctccatgactaaccagcctcccaccaaaaacaaaaatccaaaacactttagaacacatattgttcattttatttgcagacaaaactcctggactactggtctccttcaaatttggatcataagctgaattaagcaagggaaacttcccaaaatgacatcctattctgcagctttttagagctacagaaacttttctagacattaaattctctttaaagataatccggaattatgttagactagtttaaaaaccatcacttttcatagcaacatgattatattgtgggcatttccaagttaattatagatctgtcattttaaggaataatcattaattgagatcttttcattgaattaatgaagggatattgtacagctgcaacaaaataacccttttccccttaaccatcaatggagagaattcgtaccatggtaatttggaagctaccaccatcatgtatgcatatatcatagttctcaagaaaatattgttcccgaattgtcttttcctactaaagaaataacccttggtcaatgtgacaaatatatgacattgagtcatttccacataactctccagcagaccacatctgtgaagctagataaatcctgtttcaatttggattgccataaaacacaacactcttttcaggccagtccatggacttctgatagcagccttcacaggccacaggttgccactttccaagtctaggatgctgtggctctcacaagggtgctgacccggtttctattttcaactggaatttcctcctctggggtcatttgatttccaccctcagagacattttcctggttctctgttctgtgccccgacctactcgttgcttcaaaaccaaaaagaattccaggttcatcctcctgcacagtccagtgagacaaagactcgtggacattatgctttcaatctggtggaagccatggttttttgaacctcagtgagaccctcttagaagacaccaaggtgacatttactcaggaagctgctgagctctaagacaagacctgcaggaaatgatagcgggaggccatggtgtagagctaaagctgttaagacgtcttcattcaaagggtcacaagaatgtggaagagtcagccaaaagaaacatcacaaagtgtaagacagggctacttcctttggcacaacacyggctgcattggcaggacccagagatggctcacccccagctcttgtggctgagcgctcagcaagccacacggagtttaaagaacaggagactggtgtttttagagtcagctcctggaggccctttatgttcttgcctctgagggagttctggatacagtaacataaaaatctcagatacatccacaagaagaactagcattttaaacccatgagtaaatgacacttttctgagtttaagtctccctttcgcactggtaagaatggcaatgtttatgaaaattattctgcctagaataattgcaaaataaaccatgaaacatatactatttttaacttaaaatttttaaagcattttccagtgatgtagagattggacaaggcaaatagttttcagacactatacttgcagatgcatcttcttattcaagaggaagccttagagtaaaaattggagactaaccttttaaaaaaatgtttcccttagcgctatacacatacccagttctgcacatatactggtgaatcaatgaatgttcactgacattttgcccttatctgaaatatacccaccactcccctccataccaacaatatgtgtccctttcttttgccttcatactgatgtaacgtagacctatctacagtgtctgtggtaatttgagacatagcattagactagagataggcaaactttttctgtaaatggccaaagagtaaacattttaggctttgcaagccatgcagttcattgcaaccaaccactgaactctgctatcatagtgtgaaagcagccaaagacaatatgtcaataaatgcacatggctgtgttctaataaaactttatttatgaacactaaaatctgtatttcataaaatgttcacatggcataagatattcttcttttggtatttttttcaaccatctaaaaatgtaaaactgattcttagctcataggagacacaaaagcaggcagttgtctggatttggcctgtgggtcatagtttgttgacccctgatttaagaactgagctaccgtaatatggcagacagtctactagatatgatcacgtacagagcaaactggaaaaaaaaacaggccttggcaactgttcaatcaagttgatataatagaggaagatatggtgaaggtgttcaaacttcaatgagacaagattctgtgtgtgtactttaagtgcattgcttttaatgtagcttatccatttacatgtcaaaattgatcaaattaataatttaattgccaaacgttgcctctggtgtgtttggcctaaaggattaatatatttttctttcattcataaatcacctcatccttaatttcttctaggttttgaaacagtagctaaattcagaaatcttttaaaagtgatactagtaaaaagaagcagataaaaaatctccagggagatgttggtcaaggatacaaaattttagttaggcaggaggagtaagttcatattccttgttcaacatggtgactatagttaataacaatgtattatatacttcaaaactgctaagacaatagattttaagtgttctcaccacaaaaaataagtatgtgaagtaatgcatatgttgattatctcaatttagccattccacaatgcatacatatttcaaaacatattgtacatcataaatatatttaatttttaattgtcaattaaaaataaattttaaaaagtatccagggaggtgattctgaatggtttctttttgatagtttgaggaaccagagctgctacacacaaggaaacagggacgagtgtcgcaattctgtttaaatgttaatatcattcagtctatttctatattcccttaatgtctactcagtctttctccaatcactgtggatttatgggaactgatatcagtgagagaacctcaaaaccctgcttttgtcatttaattgggtcatgatgacatagatattgacatccatgacagaaagaactcactgacgaaacagaaaaagaaaatcaggatagatttgtaccttcttaaaagtattggcattctcaggataaactgattaaacactgaggtaaagtgaatcaattcccccatctcttcatccctcgttgcttcacatccttaccacagccccatcatggaaggagtgcatttccccacacactgaagttaggcttttacatgtgacttgctgtggccagtagcaggtgggtggagacaatagtgtgtcaaattcctgcctacgtctcaagagtcttcagttgatcccacttgccatcttgtgcctttgtcattgctgaacttctttgggtagatgctgccagcctgggccccaggatagatacacatgggacagaattgacagaagagccttgacactttggcctctggtcaaacagctgagctctgtctagctaagccaaccctaaccgacccacagatccactaggatccgtgatggtttttttatgccactgaatgtcagagtagcttgtcacacagcattagtgtggtgatagctaactgatacaaacacacttctacattttagacaacacagctataaggtaaagtacgattttgtgtgtctatgtgcatatatgtatgcatgctaggagttctatatttcattcctttctaatgacgccttaaataaaaatgtgccctcccccacctgcggcagcacagaaatatcatggaaggcctcattctcaaaccaagtttcctcttagactcactacatgagcctttgatcctttacagatgtttgcaatgggtgatacaaagtatctgcgtggtaatggtgacattacctgtctaattttaatgcaattaaattgcattaaaagcaagagttgggctcagtatgactacatttaaaaaatgttcttcctttctaataaatatcaagtcataatcatatggtaaaactgaaatatgtgaagtatctagtaagtttgcctatgtttgcagaatcagacagcatcagcagtttggacaccttttttaaaatagtgagcaccaaataaatgcaggaagtctttctaactgtgtcccgatgataaggtttcactcttcagcaatcctgaataaaaacagctattaaggattttttgaaccagttcatcatgataaggttcaaacctttccccaagagaggtctacgaacggccactccctttgaaatggatgaataaaaatgcatgtgtgccatgaatgccaaggtttacgtaactgttgtgctgcccagagcccagctcggtcatggctacctcaaatccatgcaggactcgtgtttatccttgttcgtaaatacttttggaaaaccctgacaagggcagagtgccagctctcatgtaccttttccaggctgctgcaagttcagtcacgcggttgtcggtccagaaatggatgtgccgttagaacagccatgcaaagagggagtgtgccgcatttacgcaggagataaactctgccgtgtttcaatcaaaagcagtttgctagtgaaaacacaggtgttggaattataaaattaccacaaccctcaaaccctcaactaaaaataacaaacaggatgttctttatatgggtgtgtacatatatatatatatatatatatatatatatatatatatatatatatatatacacatacatatatatgcattgctgacaacaaggacacaccaaaatcctctctgatctccctatcaattcaccatactttcttctgttatgtttatggatgctttgggtgtaaataatcaatggagacaggaatgtttccaccgtgcagcaagaacaggaggaagaatttaaaatgtgtcatcttatggagacagttcagtggtagcccagattcaggatgagggcaggagtagggtggatgtgaatacaaaggggtagcatggggggagtgcttttgcggtgatggaccagctgtgtattttgaatgcggtagtggatatgccagtctgtacaggtaataaaattgcacagaactgcacgcatatatacatacataaaagaatgcatgtaaaaacctggtaaaatgagaatctgtagtctagttaataggattgtcccaatgtcagcttcatggttttgatattgtgtaaataagatgctaccattgagagaagctagataaggggtacatgggacctctcagtactatttttgcaagttcttataagtcttcaattattacaaaatgaaaggctttaaaaagtattacctcaaaggtatcaccttaagccaatggcatgtcaacaatcacccactgcacagtgattcaagcatgcagacttggcaatcaaattaagagacaaggatttgagtcccagccccactacgtactagctgtgtggccctgaaacagacataaggtcagagctttggtttcctcatcttttaaatgaggataataggacctatctcacagggttattttaaggattaagtgagataatatatgtagaataagcaggactcatagagagcattcaataaatattggctattattattactctaagtcagactaaatatttctgagagctttaaatcactgattaatttcattgacactcaagtacatactaagcatcaggcacatgctataaatggccaagcattgagtcacacacaatatagtccctggttctggtctgcgtccttttggattttctggttctgttgtgaatatggtctccaaagaagcaggatgaatatttatgaaagtgggtgcacagaagactcaaggaggaactaacttaagaataagaggtactttctgcagtccaggttgaaatgagagttttctctctgctaaaatttactggggtacagggcggtttaactgcaatacttagctgcaaccattccttgaccagcagagataaatgaaaattgcctttcagtcaagcacaggttagaccatttgtgttgatgtgcaattttaagagttaaaaccctttacccatcaaccagaaaaaaagccaaaccaaatcttcctttttctttgtttggcaaggaaattacattagactatcctaatgggcttagagggaaaaaaaatctaattgtagtctatattaatacatttacatattttgaattatattaataaatactaataaatttagaccagggcactttaaagtaatgaactttccaatattagattaatgacaaaatatacgtagaatatatcactctctactaaatgctttaataggtttgtgatataaaaatccttaaaagcaagcacaccacgtatggatggagctggcatagcacctgagtactttaaatgtggtagtcaaaataatctacagtgtggaagaaagagacatttgaagcaatttgggagacttctatatacttaggaatttaaggtctttcataaatgtaagcaaaccccaaacaagactgaaaatgcttgtaatgatattttatgtttgtcaacaccgaccccccctcccgccagccctcaacaaaaataggaaataaaatgttctgcccttctctgtgctggtctcactggattggctgggcttgggcccagaaggagatggagaacagggagaccaagaagtcagagtatttactgttccagtctatccctgcttctctgtattttgcccttgctggagtcttctctggacacattgccagggtcccttccagccaaggctgcaagtcagtgggctctggtaacgctggtccctccctggtaacagcttctcagtgttgctaattgctgggtgcttcaccactcaccgttggttcctttaaacctgtcaacacattggcgtagttcattcctcaaattaagccttttgagtgatttatctgtttcctgtttggatcctgatcgacacaaagcccttgactgtgaatcagtagctaatgtgggaggatgccttaacttttgagataaaagttaagaccgtgttttgcattttgctcagaccatcgaaatggcatcttaacatgaatggaactgttgaaagtcatgtgcatagatacccacagaaataatactatgtgttatgttaccattttcaaatcattctagcaaactcaatgttccatacccttgctaatctattattcatctgtgggtctaattaacatggcatcaccaagctaggaacctagagcaatgtccagggatttgtgcccatgtggagaggcacccacctggcacagagatgcttggcaaatatggagcccacgtgctccacaaagtgctgagatgcttttagcctctgtattgcacttggactggcttatacatttctttaccagatatttcagtcaactgcagaaaggggtcattcaaaaatatgttaaaagtttattcatctaaactacttctgttgctgttgccatggcaacttttctctaaagccacaactccaaattcttctaaaattgttatttcagaaatctaatttagctgacatcccaaacactcaaattttactataagatttttttttatgttagaaaagttctaagaaaatgacaagtatccgaagagaagaggagaacaagcctgacaggttttcatttgaaagagtcatggcatctttcaaggaaattggaagtggaagagtcttcagtaacagtaactgtatttgaatgaaaaaatttggcttatattttgtatatgtttcttgtattgaaaagtatcccatattcacatccaagtagtcaccacaaagatagtgaaagcagtaccacataatgactggtgggagtccttgttgcatcactggatctacctttacgtttttaagtattcagggtatatttaagaataaaataaatcagaaaaattggtcttttgaaaataaggttagaatgagaaaacctgagaacagaaagtacattaaaagatattaaattaattaattgtgtttgtaaacagtggtctcagtccaaaatgtggcaagcacccaagaccgttaaatctatccccaccctccccatcatctcgtaactcacaatctaaaacagaccatgctaatggacatgcagtgacatggccaggagttaagaacgggctctgcaattcaatgggagaacaggtaggccacaaacccgcctgccaccctgggctgctcaggagattttgaaccctgatgtgattgagagagaaacgctgggagccactgtttccctccctctttcctttggcttttctttcagcaactcttcccttttccccagagcaggccggtctgtgtcattatcctcaaggagtagggacagaagcaggcactctagtttctcactttcatacagatgcagatcccacatccacacaccaaggctgctgagcactccacacatcctcatttggagattataacttctaattttaggcccacgattaacacatttgttaaacgggtattctggctaaatcagaagagaggtggcaaattaggcaaggctgttagacggtcataaaggaagaagttagctaatgtctgacatgagagagaagacagtaaacatttttttaacccaagattaggaagggctttggcattgaggagtgaagaaacaaaaagcccaagatgctgaggcttctggaaggaccaccaacaccctctccagagtaatccccacacagtatgaaacacactgttcataactgtgactcacagccagggaagctcactcacattttctcacctctatctctgaaaacccaagaaactacgaataatgtattttagaaagtgccatacaaaattgttctcaaaaacatttaagattttgatatctactgagatacaattaagtcagggtttctctgtctcagcactattgacatttgaggctggacaactccttgttgggttgtgttgtgctttgtaggatgttcagcaacatgtcaggtctctacttaatagatgcctgtggcaacccctgccagttatgataaccaaaagtgcctccagacattgcccagggtcctctggttcagaaccactggtcgattttacctagaatatggataccgagggacatattgccagatgacattatatagaggaagtattcctataccttttgtatcattagagagtttggctgaaatgaacactgggtggtaaaacaaaggactgctctgaaaacttgtactagattacctcagagtcagctgaggtgaagtattgtattgcactttctgaatctactttgctgctgaatcctacattttgtaggggctgcttgagtagtaagtggttcaccgtgtaaattaatcagtgtttgccaaacccagctgatattggaaccacccccaaagctttttcaaaggattgattccaagtctggtccttagagattctcrtttagtaagaattcagtgaaactggaaagctaatttttagtctcgtctctccctctgacctcaatcatcaactaataaagggttaagtttggaaagtcctagcgtaacctagggaaaaatacacaggcagccagattcatgttctcataaatatttattgtatgcctaccctgtgccaggacctgctctaaggcagtggaaagacagtgggaaaggatcattgggtccttgccctgaataaacttacacactagtcagaggagacagacaaacaatgaatatataatataataccaagtggtgatgtgaacaatgagggaagtggctagtgtgatatgatccagggtaactgagtgggctcagaaacacttcagagaaagcagtcaggaaaggcgacatttttcctgcaatttgaaggatgtaaaaaaaaaaagcctatcacacagaggacattccaggcagaagggacagcaagtacaaaggcttggggcagaaaagaactggtcgcatttgaggaacagaaagggcacagatgtggccaggcaatgataagcttgtggagtggggtgtggtatgaggcagagaagaccatgtaaggagcacttggaaggtcaaggtcatggatgaagctattattctaagtggaatggaaaccaaccaaagagcttaagcactgaaatgtcactatttcattaccttttaaaaagattgcactggccatagggacagccaaccactcactgagatgggaaagtctgagaatgaaacaggtgacagggaagtgaggaatcaagaacccaatgaagactttgtatgactggacaataatttcacaaccaagttgagagtcatgtgtgtgtggtccagggttatcacaatgtgggaacaggaaaagtaaataataaaagttcatcaccagaaaggactaggcaaagggtggtaattgttttcaaatgattggcagagatgtctgctatgcaacatccaacaggaatctgattttttatcaattagtagtggtacttaatgagtggtttgaaggaggggagatgtagcttcctaagatgatggggcttccacaccaaagaggcctcatccaggaaaatttctgcatgcagcagaaaagtaagcatgccaggttgggggtgggagtagaaaaggtatctacaattagtagaggtgtcaattaagaggattcaataatctctcacatatttgtaagttgaaaaaattttgcttttatgaggagacaaatgacaaccagagtaatataaaaatggttttataaaagtaagttctgggccatgccacaggtcagtataagttctgctgagtttcctaagatgtctacactgttagcaccgatggatgataactgattcatatcagcataggcctgcaacggcgcccagttctgggcatcttcagaattaccagagagtatcctgtattcaataccactcaattattaagcaaacttaatgacttcaaagtctttgaaaattgaatgttcatagagaacaaacgtggaaactttcatagtttccattctatgtgaaaacaggttctctgtcagggtaagcagcttggcacttctggtgagttccttaggaaggggttaactggagcaagggcagagtcagcatctgattacaaggctgtggtcaaaagcacagatggtgcagtgaccacaccaaacaggaagtgacatcagcagcagaggagctcagactagaccagtacaaggaaggagaatgagcagcttaggacctcaaaaactaggtctcaactactagattcatgaagtcattcaacacatttctactgagcacctactgtgcttccagcactctgctaggtgtccaggtgacagcagggacaagacacacatagtactactcccagcaagttttcaacctgccagcgagagagaaatgaatgatgtcagtccagggattcctgatggtgactgtataatggacactgatttgcttttctctgccccacttgagggtaaagacaggttggggcaccaggagagaagagcttgagcctcctaaggtccccagtaagtcacaaggccaagcttttaatccagattttttttagtgtctttcagaaagacataaagatattgcattgaacttaatggatacttaaatttttagtttttgtctacactagtcaaatttaaaagctatttggccatgcaatttgacaatacagatagtcacattaagtcactgaaggtccaacatttggttgttggtttattactgtggcaaagtggatcgcagagggatgattaggttcgactatcctcattgtctaaatgactcagaagagcactgcaggatcagggcacctggataaagctctcagttctgtcagcagcgacacatgtgctgccttgaattctactgttctgagcttagatttcttcaatcaggaaacagaaaacctgcataaggcagcaattggatttcagactgaaattgacctagactgtgttcaaatattttgcaatctgtataagacagtaacaaggagggaaatatcattatgactatttgcttattatataaacttcaagagcttctctagaaatgctgccagaaaatcattgattcattcatgtcatcctcatccttcatactctatcacctctttatcccatccaaactaagtctgacaggttctatgttctaagcatctctccaatatgccaactgctctcaacctcctacccagctgccaccctagcatcagtcatcttctcgaatctctcccaggcccaaataccaggatgcactctagctcctcctcatcctcactccatactgggatcatttcaaaatgtaaatctgattcagtcaccaaaaggcatcaaggacaacacccagctggaaggacggagtcaccataatctgaacgtgggaaaactgtaggaggaaattttttgaggagaacattagctgctaacacacattattttctgtgtgtgatgataaagcaagaagacagttgtattatactttgaaaatgtctgtttatgtaaatggaggatgttcttgtctagttaattgcattttgctctctgtgaccattatgaccatttaaaaagatgagtgagatgtccatagcaactcctaacattttcactatctaactgtctctttggaaaattgaccaaatacctggaacacaacaggcattcaacaaatgtttattgaatgaatcaaatgtgagccactgacctcttatatgcagtctcaccttggacaaacgaaaaagcactgaaggaagagcattacatacttatccccgaattatatttcagaggaggcaggaggtattaaggacacatggagggtcattcatgtcaaggaagacagacccaaaaaaaacccaagatcacaggaaaatgcacagtgggacaaaaccctgttgagcaaagtaagtggaatatttgtgctaaacggcaaaacaagctctggaattatcaaaacccaaatgagggaagtaaacaaaagtgcagcgttagaatagatattataccaccaagggttatactaatatgaaaaacaatgggtcgcacttaataaagaacattctctggacacgtgactgattcagagctgctgctttmtcatcctaaagtatgcataggaaacttcagagagcccgggtgacttattccaacctggaatcccaacaaattccctctggaatcttcctttttatagtcttaaaccagaatatacatacatgataatctgtactagaataaagggctatttcatcagcagtcttcagagccccaagaggggacattagcatcggcttgactcttcagtttatgattttagaagaatcagacagcctaattaaatgacaattttaaaatatttttgtaatatatttacataattgaggcaataaccattcattgaatgaatagatttttttaaaattaaggagcccgttctcacctttcctcccccacccgcactcttgcaaatggcaaagacctcagatcatgaatcaaagggtaccagcacacagttcaaaaaggtggtggggtggagatgttgaatgggcacaatgagcacagactctacttccttcagtgtaaagcaacctctgttgaaaagtggttaccctttaaactactttaaaaggcaaatcactgagccaccggtgtctccaagacagatgaacgagcattagtaacttacaagtatctcatttggtgtttcaagacaagtaactatagaaaaaccagagaaagagctgttacaggttcctggaacgtttgcctgggaaggtatcttaacaatttcctaattcaggtcttcatttttccagtggaggaaagcgaagtgtacgaggtgtgcaatttgcccaatggccctgcaattaatccaggagccccgaggtgacaccaggaaccaactggagcagctccgggatgcctgagtccaccacccctgtccacctctactcctttcttcaaaaaaacaattttttttttttttatgttggggactggattttggaagacacgaattccagacagttaactgtctttgcctgattataaatattaatgattcttgtcaactctctgcctgcttctctccaatttttaaagttggcagtcagaacgtccagtctcaacagtgcaaatcaattcaaggaaaactcagtaaattagcagatgacagaacaactgcagtgtctcatctcaaaacgacacatctcacacgtggaaaatcaatgtctgaagactggaataaggtaaaccttctccctgcccccttcctggagggggcatttgaaatcttcagaagtagtagtcattcctcagaaacaactttccttttttccttctttcctttcttttctctctctcaaagaatatactcatctagtatctggatttggtcggtcgttaaccttaaaatcttgactccttcttcaaagaaggcaaatcccatgagctttctctctgttgtgtttcctgcagtacctgcagcacctagcgcagtccctggcacacagtaggtccccagtaaatctttgtatcaacagggagaacagaagccaccataagggagggggaaggtacgacagaagagcccctggtattctcttgtattagcgtgcaacattaatgataatgtgcaacattctgtcccgccacaaagtaggagggaaatgcactccctttctaaggagtgaaacggctgcaccccaacgctcccrgcagcatttcttcagcaaatcyactcgccgcacactgagatcatgaagcggccctgcctcctgtccagtcttattctcgtcctttcaacatatctgactgaaggctgaatgagcgacctaggcctaaccccaggaaccccatttgtcagcctttgtcagcgaggtggtggcggagtccagccccgtcccagatgcagtgaccacagcgttggggcaaagaaacactgaattcagggttggggctcccctgtaccttctaaaagatttcgggaagcgccactgagttagtgagcaggtggcacttcggggtgacgtacccggccacccgccaccccctcagccgtggacctgtggggagccccgactaccatcgcccctcgcagtccccacccggagcggcccagtggcgccccctgtgtcctctgcacgcgtcaggacactcaccgcgtagtgcagctggggcttctcgccgcggtacaccgggtgccccatgtcgcctccgggaggagtggcgcgccttgggctcagcctggggtcacggtgtctctctgagttccccgcacttcactgccatcctggggcagcccctgggcgcgagccctgctccgtgcgtgccgagtgctgtgcaaagcgcccctggcacagcgtcccgctgccgctgcggagccggtggggacctggagaaggcagcggcgcgaagggggagggggaagaggaggaggaggaggaggaggaggaggaggaggaggaggaggaggagggagcggccgagtctgatgcgatgggcgggcgtttaattccttccgctcctggcgggtccctccggcggccgccgccgctgacagctgttgggggctgcggaggccgaacgcgcccacgacaggtgtcaggctggccggcacgcctgcctcctgccaccccaccctccccggacccgtgggaccccggctgctgaggcggggactgccaaagcctttaatgccagcgagaaggcgaacttgggtttccaagaaagagagactttcactaactttgaaggaggtgtgggcctgacagtggaaggagattcagagccttctcctgggagggcagagtttccctttctagaaagccttcttctgtgagagtctcaaattgtggggacccttggggagggcaggactgagaggaaccaagtcatgctacccaggagaactgctgcggggacaaggctgcccaggatgctggtcacttagggtgacccgagttccaggggggcttgcagggcacattctgtaggttcacaataacccttaaaactggcctctgctctgaaatcccctcatggaaacctgcactttaaaacaccttggagaagatcagcgagttccctccacagccttgtccttctgtaatttacgtccagcctcccacaagttgagcccagaggaaggccaggcctggggccagagtagagactccagactcatgaatcaatcaatgcaagccccagaggggtggctacaaagtggaagatgtgcttgggggtagcttgtgccagtttgtcagggtcccactgtactgaaccggctgaatgactctccacttgctctgtgtaagaggagaggggaggagaggggaggaaagttggatgtggccccggaatttcagcccttacaatttagttgaatgaaccatccactggcatgtaatattttaaaacaatcacagcataattataattagcagtgggaatgtgaagccaggggtgcaagtggcctgaggaatctaccattagatagtcccatgacagtttatccacctggaaaactggatggttatatctgctaaagtcaatcataggcctaccttccaatccagcaaattccacccctagatatacagagtacaataatctcatcatataccagaatgctcatactgtgttgaggcataattgccccaaataaaagcgatccaaatgtacaccaactgatgcatgacaaaccaactgtagtctgtgcacatgatggaatactattcagcaataaaaaggaaaatgctactgatgcacagaacaaatggattaatctcacaaacattatgttgggagaaagaaatcagacacaagtgtacatactgtaagatttcacttatttattctgcaactgaaattcaaatgtttaagtgcaataggcaaatggaatccatggtaataggtgtcataacagtggttaccaaagtgggaaggtggtattgactaggaaggtggtacaagggaaccttctagggtgctggaaatgatctatatcttgatctgtatggcagctactagagtacacccatatgtaaacattcactgtgcagtacagttcagactagtgtaatttacacccttcactacatgtattttatactgcaaaaataaaaaataaaaataaaaataaatttaaaatcaatcccttgccaaacccaggaacttccaaacagtgttgcctgtcttatgagaaagtcaattgaactatttgcccaagtctttcattctcccacagcctgatctacccaagtctcctttcttctgctttgtaggagaaatgagcatgcccattgaccttggaggccttccttgctctgtgacatgtccaggcagagctcgaaaaatgacacactaaagttccctctttactctcactctgttctgctgctaaaagcaacctttagagcaaagtcatcaaagatcctcagaataagacagagaaccagcttgagcttcaccatctggcatctttcagagaattgcagccagggcagcctgatgggggcacgtgtgtacagatgtaattcaatggcctagacaagccccagtttagggactttcacttcactgtggtctattcataaaggtgaacactccagccttaggactttttcttccatcacgcttgcctttaagcccctgaagctaaaaatccctttccctacaaatactatttaattatgaatatatttaaacaacacaaggtggatccctgggtcttaaaaccttaaccatagccttttgatcattacccctgagtaagtcacctcttaaaactgggtcatcctggatttggtttgtattctttctttcaaaaatgtagtaagtcactaaatgacattcttgtaagccaaaaatactccatcagccccacactgtgtacttacattttaggaatgacttctgccttctagcattatttattgctaaagtgtcatagctaagttggagtaaaatgttcaagtgcaataggattgttttttctctgtgtttgaagagtttgtgagattgggcaaagcacctaaagaaatgatcagttcatgctgcaagactcttaaatcaccttggaatgaatcatccacctccttcaattcttagtccaattgtgtaaggctcaaagctccagaaaggatctagaagatcatgcagaactctaagaagtctgttcaatcttaaacaatttgaatttcacacattattcattatttcatttaaatatatttcagggtatatttaaaacaccactctaatcaaaatttcttatttgcatatctctacttccaagtatccttcccatgttatttgttcacttggtcattattcaacaaatattattttaaattttaaattttaatttgtataaatgtatggggtaacagtgtaatttcattacatggatagattgtgtggtgatgaagtcagggcttttagggtatccatcaccagaagaatgtacattgtgcccattaagtaattcaccatcatccaccccactgcccttctgagtgtccattgtctatcattccacactttataaatatttttaagtgcatactatgcacaggtattgttctaggtcaactaaactgtatattgacatggcatgtggttttaaaatgcacatttgatcctttggggtaatggagagagataaaaaggcagcaagaagcacataaaacctcacttcagaggaggctgaagttcatccaatttgttggttaagagcctgctaggctaatgttcttttttgtttgtttttcttttttaaaaaataataaatttatctgatgtttatcattcaccccagagaggacttaaaaataatctgtatgagttactctactagcatcacctttaagagaaaacgtgccctgctaactgtggaatttccatgtcttcctgtccctaaacattacagcatttccagaactgaatgctgccctttctgccagagcatttaaattaaaatacttgtttgcatttattctgcctgcctataggctgagttaaaattttccacagttaatgccaatgcaagggtgattacttttttcagaaaaactttacccaaatctgtggaagcaaattcaacttcagagtgtaggaagagctgagggcccatctgagtactaaaaatcacttcagatggcaggacaggcccttcttgaaggcccagccccaccattgttaacagagttactatgagaccctctaagatggggaatcccctcccccaaacccagtgcccacactatgccatcctattgtcctgttaatctagcccctggagtatttttaacattttgaaatggaaaaatcaatagcatataatgtgcagcttaatgaattgttacaaaacattcacctgtctaaccttcactgaggtcaaaaattaaaatattgctagtaccctagacccccatgtcccttggctgtatttccctcctccatcccagtggtagacactgtcatgacttcacttcttcacttcccttttacagcagggtttctcaaccccagcactcttgacatttgggaaccaatcattctttatggtagaggctggacattgcagaatgttttgcatcatccccagcctctacccactacatgccagtattattccccctacgccaattgtggcaaccaaagatgactctagatattgcagatgtcccccagggagtggggaaaggcataatcacccctggttgaaatccactgccttttaggaagtcaggcatccataaatattagagcttagtgttgcctgtttcctaactttatgtaaacagattcataagtatgtttttattatagctgacttcttttgctcaacattccgtttctgaggttcatccatgtttgctgtatgtagctgttgtttgttcattccaattgctgtctagtactccattatatgtgtttattactatttatctttgtaactgttgatggacatttatgtccttttcaatcttggaccactgaaaaccacactgcttgaacatcattatacatatctccttgtgcatatgtgcatgcatttttatagggtccaaacccaggaatataattgctgggtcataggcatgcatatcttcaactttactagacaatgcctaacagttttccaaactgtattaattagaatctttatttacactattgtataaacagactgaacacagtttatatgaagactgaacacagtttagagttgtctcttttttaagtctttttcatggggctacaaagatgaaattaaggaaatcaaactccaggatcagaaaggagagctggagtagcagcttaaggccctccttggctgaaatcatgtgtctcctgtaagtgaaggacctaccagccctgctaaggccctggcattggcagtgataaggccgacttcacccacacgcacagacaggagcaatggatacactgaatgtgcttttgagggaggacatctcattaggcagaatttcagcaaagtgggggtaaaatctcagcctgataactgtaaacatatatgccatttcaggaattatcattttactctatagccataatttcttcccaccctcttaacccttccagggatatggagatagaagaaatctaaggaagaatgaaggttctcattcctttttccaggtaagtttaaggagacaacccccagcctgaagacagctgggctgaagaccagtgaaggaggaattcctgcagctggagctgcagtcacataggagagatggagaagagagaggagaacatcctggcacagcatagtaccattgtctttggcctcaaaccctagtacaaagaatatcataaagttatgcatcaattggagtcgagaatatgataatccgagaattcagggaaagaaaacaagtgaggaagggtgaggaaataaatgaccattacagtaggttctatttggtattattggtttatcttgttttttgccgttttgatattttcactgaagaatttctactccatgccacagagccagggagggtatccttaaaaagtgcctaaaaagagacatttctaatatatatgttctattcaagggtcattaggcaaaaaggagaggccgcaatttctccagctacgactttccaaataaccatttgggaattaagaaatgatttttcatttatatccataatctaatgttagtctattgccttcattcctctgatcataatctcctttcttctgcacagttgcacagtgtttcagttgtctaaagcctgcagaattcccatgacaacgccaacaccgcaggtgctagaattattgtttgaaatggtaacaattccactattcattaagcacctacatcacaggctcaactagatgctttgcaaac

SEQ ID NO: 98146 - DNA, 44738 bp, Homo sapiens
tgcctagcgcccctggccaaagtcatcactgacaactttggtatcgtggaaggactcatgaccacagtccacgccatcactgccacccagaagactgtgaatggcccctccaggaaactgtggcgtgacagccacagggctctccagaacatcatccctgccactactgggctgccaaggctgtgaggaaggtcatccctgagctgaatggtaagctcactggcatggccctccgtgtccccactgccaacgtgtcagtggtggacctcacctaccatctggaaaaacctgccaaatatgatgacatcaagaaggtggtgaagcaggcatcagagggccccctcaaaggcatcctgggctacactgggcaccaggtggtctcctccgacttcaacagtgacacccactcttccaccttcaatgctggggctggcactgccctcaacgaccactttgtcaagctcatttcctggtatgacaatgaatttggctacaacaacagggtggtggacctcatggcccacatggcctccaaggagtaagacccctggaccaccagcctcagcgagagcacaggaggaagaaagaggccctcactgttggggagtccctggcacactcattccccaccacactgaatcttccctcctcacacattccatgcacaccccttgaagagggaggggcctagggagccccatgttgtcgtgtaccatcaataaagtcccctgtgctcagccaaaaataataacaatcataatagtttaggcagaaaggataacataagtaaaaaaaaaaacttgtaaagcagccagaaataattgaattttaacattcacaggccacaaaaagaggagaaaccgacaaggatgagaaagagggaacagatatataagtgatgttacagaagtcaatgttttccctcagttgttattcacatttgcttttgtgtatagtgtgtatggattcttcaggttcaagacagtttctccaagatcagaggggggtcatttatctttgtatggttcacaggcaggtgagtcctactgcaaagttgctgagtccataaaattatggttcatttactggaaagtttttaagcatttattcacatataaccattttccttaagaagcattcctgggtcatcgggatggctggtaggagatagcttctggaatcaactaaatgcttgcctagaaccaagtatttttctgatgtcttgggtttttaaaagtaagtccttgaaatacagctggtttctttcctctatcatggtgagtttatttcccctcaggctctttttatcttctcctaccctgaaaccagattgctcttcagtaataggaatatgagagcagggtgaaaaggcattccccattaacacttggaatttattaccagatttcttggaccaaagtttgttgatatccatgaagacagatatgttagagtagtaagtgaaggaaatcacaactcagacaatactcaattaagagtgacaaaacttttcttggtatagccaagccaggaaaaacgggcagaaccaccatggtttggccctcttatcactatatgcttgaatgtatgactaaaagtgtgggatatggccttgaaacatggctatgtgaagagagactgggctaatggctttgaccggtaaagaatacagattgggtgtacatattgggtcacaccaaaacaatgaatatccaatgtaagtaatttgtagttgtcattcttaggaaaggagtagcatatgtaccttagaaatatgcatcaggggttgcaaagctgagaaggcattctgatatatgattctggtggaggtggtggcgggtgaacctaacttattcccagcattcaatatgcctagttgaaaatcattataataaatttagtaagagacaaatagcaaactgggaaaatatatttgcaacatatgcagacaaactgttaataactttattataagaagatgtcttataaatcaataagaaaaagtagacacaactaatggaaaatgtctaaagaattcaaacaggcaattcctgaaagaaggctaaaattgcaataaacatgataatctgtcaagcaacaatgaaatatcaatctttacctctcagactggtaatgattacaaagcatacattcagtaaagagaatggggtggggaaatgagcaccttttcataaattttggtggaattgtgaattggtacatttctggaggttaagtgggcatgatgtgtcaaaatttgtaaacttaaaaccctttgaccaggtacagtggctcacacctgtactcccagcactttgggaggccaaggcaggcagatcacatgacaccaggagtttgagactagcctacctaacatggtgaaaccctgtctctaataaaaatacaaaaattagctgggtgtgatggcacacacccgtaatcccacctactcgggaggctggggcatgagaatcccttgaacccgagaggcagaggttgcagtgagccgagactgggccactgcactccagcttgggcgagacagtgggatgccgtctcaaaacaaaaacaaccacctctccacccctaaaaaaagtcccaaacctttgacccagaaatttcccttgtaaatatttatgctaagagttattaaacaagtgcacaaaattgcatattgtggatactaatagcccaattgatacagtagttcaaatttgaaacaatctaaatgctaatctatagggtaaatggctacataaatgagtgtgtatccatataatggaatattaagtacttggtattacgttgaaaagtattcctgatgtattaaatttttaaaaaagcagattatagagtagcattattttaaaaaaccatctgtgttaagaaaaaaaggcttatataggcatgtaaaatttatttagaatgggagacaaaattataggggggattttcattttgtttctttttttgttattttatctgtgctaatgtattatcaggataatctatgtccatttaaataaaataaaaataattcatacaagctaacaaaaaggtaaacatctttaaaagtttgaatgaaacatatctcgtggaaaacattgtaattccaagttagtcaagcacctgtgttatatgatggctataacgtgggggaggagtaatgagcagaataaaacaaaagactggaactaatagtagttagtgttatcaacaattttctccattttctctaagtagcatccatgtagcaaaatttacttctagaagattcaaagtctttctctacaactctttaattaggttatttctttttactcctgactcaacaggcttccaggttcacttttctttgaaagcagaggttgctgacaatattaccaacatggaaaggtggactaggaaaaaaaagatggatagcttgatttatgttgctaaccttgtatggactgtaggacatttaaaaatattttgtactgggtgtggtggctcactcctgtaatcccagtggttttgaaggccaaggcaggaggattgcttgcaggcaggaatttgagaccagcctgggcaacacagccagtcctccttctctatcagctatttaggaggctgaggcaggaggatgaggcaggaggatagctcgagcccaggaattcgatgttgcactaacctatgattacaccactgcaatccagcctagctgatagagtgagaccctgtttctaaaaagaaaaaaatattgctattttatacaaaaaaatttatgataaaatgtcctctcctttaggttttgtaggtaactgtatcctatttgcatttgatccacatgaaagaactctgttctcaaagtttgcagatgctgttgttgcttgtatttgcttttactctgttatgatgctaccaagattttggttagatggctgttattctaggtggcagacatgcgggtttccctccctttgcacaactaaacaaggtaggctttggttctgggcagtcactggtatttacaaaccacttattcatgccaggtaatagggttccagattgggtaagttttatgttctggttcttggtatatgtttagacagcttataaatgtaaataaacattctactcttacaggtggagtgtggacacggtgatatccgtgtgaccgccattcccagctgaaggttatctcatctatgattttcttatacgtgactggcgccccctagtgaatagggacttaagttgacctccacggtagaagaaataccagggaaatacctgaagctgttttaacaatttctccttgtattaagtattatgctgcagttttgcgtgtgtgaatggaagtatgggtagagatctgttctccctaaaaactccaggattccacaatatagaaatagtaatcaaatttttaggtgaagctcgaactaatccgaactttgttagatcatcactgtaaatgaatgggtatttatccactccctaaatgaagagacttgactggatttcttttttttatatagctactagaatctgttacacataatttaggattgagacttgagaaattgtcattccaatccagaaaactttagatttgcaaatatatttgacaaattaataaattaacattttatttggttaatttcaagaatagggcatttaaagaagtctgtgtttgctttagttcggcaataaagttcctgccactcacaataatccttattattctctgaaagacatgttatatttttgtcatcataaatatttattaattactgtttatagcactgggttaggtactcatcaagcaaccaaaaataattcttaccatctaggatgcttccaatataaaatatagacaatatataaccaggtcaattgggaaatagatcatttcagtatgataaaagatagtattcacattaacagtgtgaaagggcaggaacaataagacacttgactcactggtctttaaaatgtagcatccaaaatgagcaagtggagaaaaggttaaacaagtaggtgacacatttaaaaaacaagtagatgaaaggactattctcaaaaatcttgttttatgtgagaaaccatcaaattatgaattccaagtactgtattttttttacttttcaagggtaggctctcctataccttatctaaacaatttttcaaaatagccacaattactttgttttcctctctacactaaattgccctttgcctcttgagcgattatctttttcagattcacctcaacttcttcaggttcaagcggacttcacctgtaagcccctctcggttctccctcttctctgaactactaatggcctaatttagcacaattatattgctttgttcattccatgtatagtaaaagagtctacaaaacacatgcaagcattcatgcaattatatgttgatttgttcatgggtcgaccccaaagtctattctccatcgctgaagcatggaagacaaatacccttcacttcttcagaggcataacacatgcacttctcttgtcatggtgacaggcatgtgctggtggaggtcaaagaaacaggaacacaagtgaaatcgaggtgagtgtcaggtaaggaccaaagcaccacgcctacctcatctttgcccacagaacacccattcttcccgtgtcctgtttcccaggacgtatccggggcggataagaaatcacccgtggggaggcggtgaactcctccgcaggggccgatgcccgggacaggggcggggaaggctaatgaggcgacttgtgcggggaggggccaaggaggagcccaggtgtcccgctcccgctcgacggcgcgcgcctgcgcgagcccagttggcgtcgcacccttgagcgcagcatccctacgccagcgagtcccaatactagggagggagggagggaggaggggcggccggccccccgcccccgcgcgcggccacgtgacgccggctgaggagattggaggggcggctgcgcgaggctgcagactggtgcagcgcactgtgctggcggctgggcctyctccacctcctcgtctttctcccgggaaccttgacgacgccttccgcttggccctgccttctgccgcatccccgccgccgcggcgccttgaggagcaggagaagacgcagccgggccgccgccgttagaggggttcccggccgccsctcgccccgtcggccgccaccgcctccggggtcagccctctctctgggtctccgctttctcctgccgccagcgcccgctcatcgccgcgatggggctcctggactcggagccgggtagtgtcctaaacgtagtgtccacggcactcaacgacacggtagagttctaccgctggacctggtccatcgcaggtaaagccgctgacttccccatcctcgctcggtcccccgcggggggtcaccggcccctggtctcgcagctcccgggcccggccccacaggcccccgcgccctgcggctttcggatgctgcggatcagcggaggggccggcgcgggcactgcggttgagcactggttaatctgatccgaatgttaaggcctcccctcccccgacactcgcagggttttcttctgagctccctccatctctcatcagctctcggatgcgggagctgacatatcagatggagcctgtgcagccaggagctcctcgcaggagccgccccaccctgtgctcccacatctcccgagctcgcctccctcttccccgtgcacaggattccttttaacatttagtcctattttgtatggagagcgggctggggaggaaggagggcttcaggggcagctgaaggtacaggaggtttcttcagcctcctggtcgctttgacagaaccctgctaatcttttcttctatctagctccttcatctatagtataattcggactgaaaagtaaaataatattgtttggctccttgaaccttgaagaatgttagtttccgaggcattttcaacagcaaatatgtttgaagtgattgtctataatggctttgcgcactgcagtgcagtcagggggagggggaggccaaaacaccggggaagaaatcagtctttaggaagggggtctctacagcaacacctagaggttgtcccagatgcctacatatatacagttcttaaatcagcaaacttttctttagctgttgcagttaatttggcagggctgtcaattgtttgatttatgcagctttcctagcgtccaactgtgatattatatttttacattgtactgtttatttcttcatttgcttcgctgcttttgattttaaagcatttaaaagtctttgaaatctaaaataaggtttaaaggatttcagaaatgattttacgaggtcaatttttctggtccttttgcagtatcacactgcatcctatcagtgaaggatattaacgttccatcttatgactctgccttccctacttcgaaatgaaaatgtactcctgtagtttttgtgttcattgttgttagaggaaattagacagtggttacagcatgaatgtagtccgatacatagggcttatgttttgggaaaaacgtatgctggaattatttttgtgagagacaaaatgattatttggcattaatactgcattcacttctttagaaaagtatgttctttttcagaagatctcaactttgacactgggaaataagctatttaataagccattacagctgaaaatggttaaaaggcagttttcaatggagtgtttcttcagtttttttttttgtttctatgcgctattacactgatgttacactgtacctgcaaaaactgggaaagatgtgcccttcccttcacgtctgtgatttcggttctttaaacgttgcatcagggcttcccattacacaattgtatagagctgaacatcagacaagttctttagcaggtaattgcacttcgcacacctaggagtcagacactgttgagatactccagtctccatatagccagagccacacccaggagttctcggtcctgtcattcctatcctatcccggagctttcccatctcttgagtctcagaaggaaaaattgagggcaaaggtagaatacacctttctgtgatggtgaattccttcctgatgatgtttgtgtaaaagaaaccacacacacacaaatgaaacaggaaattttgtgcagttgccgcatgtgaaagcttgctactaggcttcgaagggcatataaaataatataatattgtgggccaagcctgagaagtgagagtagccttagaacacaagtgacctctcactagcaggccgaaggaaggtatttgcctatgctttgactatccacttacgaaacctgagactgcttccttgctttctgtaatgagctaccttatgtaggcagatggtatttcttaaccaacagagaggcttagtggatatagtctgttctgctgtactgctgtgtgaggaggagtatttttcaggtccaggccgaatagacctgaagtctgtggtgtcccatttacgtttactctccctcattctatgcccctcgtgttcctttttttttttttttttttttttggactcattcactctgctctgattccacctctcagcataatttgatgaaaatctgggtgggggatatcaaartagaaaagtagcttataagatgaggttaaacaaaagttggtgagtcaaatgtttggaaagaaggggaaacagaaatgggcgggatagaaagatggtcttgagaaatagtgatgagtgtggtgaaaggatgcaaattattgagggagagcaagaaatgaggtaggctccttgtccttggctgctctcattcctagtgctgtagttacatgcttctttcattcttttattaattcattaaatgccattttgtgctattatatcaaatggtgctttaaatatccaaacatatccaaagcaatgtctgaaaactgggcttttcagaggcacatatgtagcaaatacaaaatatggtccataataatgttaacaacaaaaatgttacttttactacagtattaacactttgtacattggaattgaaagtttgaaagagctatacttttagaaaaacaacaaaaataatttttatttctctgtatttgtagacattttgaacgaggaaattagcgttggtttatgttaaagtataggctggtgtaggactttatactagttgttagtattagagtaggtattccatgtcatcatgttagtttttttcttctattctttcacttcatgagtacatttaaattattaggattggagtcctaggctcaacgtatacatctaataaaagttgtatatacattttttaaactgatgaatctaaatattccccaatctatgaatacccaacttatctacattattcatttattcatgcttttaataaatgtttaatagcttttttgcatacctgacatttagcatataaacaccctagagagttagtaggatgcttacggtaaagccaggtgtctcctgtgaggccatgtatcttctgaccatttgtttctaaatagctgttgttcacagggtatgggtgctgtctgttggttgggggtggtaatgattggcattggccctcttttcgcagatayagtacccygcattttggtgaaaaaaattgtctacttggtagttgcagttagaacataacttgctgggtccttgaattaactttggaggggtcagaaagaagggatgagtggtacaggaagagggaggagagctgtaggatgacgaaatgtggaagccaggcttatgataccatttctttccgtatttacttgccatgtacaggcacagttctaggctctggaaaggaaaggaggacacttggtcactgccctcatgcakcttgcaaagtctaggggktcactgtcattcccctttccttgatatcatggtctggaggcagtgtgatctgtcagactcaggactagctggggcctagggaagatcagaaaagtccttccctgctcttctcatctctacttctcctaagtgaaaggaatatacagttgtttttagaatattttagctgtttcaccacagtttacttccctctacccttgaatgaggagttgaygtgagtactgtcagagtatttggagaggcatactagggcaaaaggtgtcaaaggcaaggggaacagcttgactgaaaaccatggaaactgggaaggtgcttaagggtcaggccagtgagtcatccaggtttgatgaagctgggggctagtgggaggggatgtttaactcagctcaaataagctgaagtaaaagcaggtttgtcttagggattgstaggtcccagaggagcatgtattttaagtattgtacagtatgcttacattaattttattattcgtcacagttaatgtttagtttttcatctatgttattatctaaaataggtttatttgtttggctaagcctggtaatgcagttttctttgaatgtttctttgagaaaagacattctgattccaagttgtaggcagctaattaaaaaaaaaaaagaaagaaagaaacatcaccagctcctaacatgggatctcccttggtcactgttttcagtgacgtcctaattatcctttactcataagctccttgaagcctctgggatgtccatgccattttatggttttttgttttggtttggtttttattgtcttttccttcaccacagtttgatttttggtggtagactgctagactttaatagctaatgctcttatccattccccaatgatagcataaagtaaaacatccwattgcagatggaattccaggagggtaaacaatgcaggttctaaaacgggtgtcaggacacagttttaactattttaacttagattctttggcttaggaagacaaagttttaagaattatgcagataattatatcagatggcacttttgtaaacttaagagccacagagcacttggtcatcctttaaaaattcaatttgttttcttatttttttgctcaagtcctgtggataatgtcacctgtaaatgmtttaacattattaacgtaagtattttcatttgttaagccacttattattctgaattaggcatatattagcacaccgaaatgagtagtgtaacagtctatcttttttcactttagatgtttttttcgtcttcattatcaggacattttgcctgttaacaaacgaaggtactattgttttattttctattagaatatatattttaaaatcatgtgggtttggatttcagaaaggagatgggaggaaacacatggccttttaaagccaaggtccacattaactttctcgcttgatccttcagtattcccctgcccaaagacctgcagctctagccaactgggataactcactgacccttaagtaaaatgtgtacatgtccacctttatgtttctcatcccaccattccccttgcctttacccaccttttccctgtttacctctccagataccttttaccagaacccagtacaatagtcctcctttgcaaagcctttcttgtttatggtaccctggagcaagttgttgtctcacaggagctcattgtctttagtaattactcacgtatttcctgtgccattccttctatgaccctagtgtcaaactgtttaaactttcgttattatttaccacttcactcctttgtatctttctctccaacatcagagattatcacatatatttgttgatatgatatgtatcaggagatgaccctcttaatctagcataattttgaatcatgatatattgtggttgctaaacatgaataaggctttagaccacactaaattacagaaggtttttgtttttgtttttcatagagtggggatttcaccatgttgccctggctgctcttaaactcctggtgtcatgtgatctgcccacctcagccccacaaagtgctgggattacaggcacgacccactgtgcccggccagagagttctttaaaagaatgatattttttatgagttggtcattaattcagttgccgttcactaaatttaatgagtaaatcaggccattaagtcatttagaagcacaaaacagataaaaaatgaagattccaagacatataaaatcagatatgattgttctcttcattgtctgtgcagaagcattgccttgtgtggaagtgaggagggcagtgtggtatagtgaatgggaagaattctggactgggatttagatgacctaggttttagtcctggtctgctgctgatttgctatgagagtttggacaagttcctttgccttcccaattctcagcattgttctctgtaaattaagagggttaaattaggtaatctgtaaggtcctacctgactctaaaagtctagatatagatatcactttctttattcttggaataggtaaagcaatttcaaataaatatacatttatcagggattcagaaacctcattctttatagtaaataaaatttttttccagcaaaactgttatcaacactgcctaaatagtacaaataacagattcttatttagttctttttactttttaaaatttgctttataagaaataggtagaggaatagagcaacaaaagtatacagatatttaagcgtctgttttgaaataacattgcttttgttgctgtaacactatacctgtttaattatctggattccttgaataaccaagagccaactattttatcgaaaacagtagcaataatattaaagaataaaattatctcaattatatattacatttattttgtgatactcagcttttgaggatggcatattatgtcgttttaggcaagttattcatgactctttgggtctcttatttctacctgygctgtgagagggttgaactacataacctttaaggcttagtttattgaatccttataacatctcctaaaacagcagcctagatatcagtctaaactcagtcttcatatttttccaatagaaaatgtgaaattttaacatacatcattacaaatgattttctattataaacactttatatatgagcattttttacttaagtttggaagtatggcttaagatttttgtaaaattgataaaaatgtgtaggtcttacagaagagaaaacaaaagaaactaaatggttttggtataagtatgttccttaactaatcaaaatacaaatttttaaaatcttttgccatatatttttcttcatgaaatattaccatttgtaaacaaataccttagaatgatgttttatttatgattatattgtattagagtaaaatttttggaatttgaaagacaaatgcattagtccactgaggaaatcagttactcactgtcaggtataatcacataaaagcatttgtgattttgaactgcagaattccaagaaacaagcttttctgttttcatttttattcacttatcaaacaaaaacttgagcacagatgtgtgtttttaactaattttatatattttttcacacacgtacatagcagcattattcacagtagttaagaggtggaaacgacccagatgtccartgttggataaatggataaacgcaacgtggtatatacatacaatggaatattattcagtcttaaaaaggaaagaaattctgacatgtgctacaacatagatgaaccttgttactaagtgaaatagtctagtcacaaaaagataattatgtatgtggcattatggttccacttatatggaccctctactgtagtcaaattcgggctgggcccagtggctcatgcctataatgctagcactttgggaggtggaggctcaaggatcacttgagcccrggagttcaagaccaacatgrgcaacaaaaaaatattaaaaattagccaggcytggtgccatatgcctctagtctcagctattgagaaggctgagggagaaggatcacttgaacctgggaggtgaaggcttcagtgaaccataattgtgccactgcactccagcctgggtgacagagtaagatcctggcccwataaataaataaataaataaataaataaataaataaagtagtcaaattaatagaaacagaaagtagaaagatgtttgctagggcctggggagaaggagaactgatgacttgtttaataggtatagagtttcagtttttcaagatagaaaasttccagagagtcacaacaatgtggatatgcttaatgatactggactgtacacttaaaaatgattaagatggtatattttatgttatgtgcttttctttttaccgcaatgcaagaatttcatatattataaaattaatacattagcacctgtagaaatgatctctttagtgctcaatggtaaaacagtcaattcttctttattttttcaatttaaagtaaaatgactttataaagagactatatagctgttggcttaaaaaaaatccgagtggctagaaagtagcaaataacaagaaagaaaactttagctttgtattttgctttatggttttacaaacaacttcacaataactctgggagataggccttgaaggcattttttccatatatttagaagtctttgagatttacagaagttaygtaacttttgtaggtggtcactatagtgcaaatgaatgtgcatgggttgttttgtccctagcccagtgctcttgtcttcccgtcacactagccaagcaagaaagaaataatcaggcctgtaatctgtgtttctcttttattttaccttttcttttaytgttatctacagagtatcactgtttagaatactaaatctgaacaaagtcataatattaccaaagatcatctaaagaaagacatctaaatattcaaaggtgctataaaggctggtgtatgagattaaactacaaagtgatatttattcatatactatatacatacacaaatatgtgaatatatgtagaatacaaaatgcgatatttagcctgagaagatggttaacttccatatgacggtgtaggattgtttaaaaaaagtgtattcaaagtgaattatgaaagtatttgccaaattgcataatacaagagctagaaacttgttagtgaaaggataatgaaattcattcaggactaacmgtattttacccagtggctattcaacttatagaactgttagagtcaagggaagattttggctaaagttcccattaactcacacactcacacactctaatggtatcttccatcttttttgctaaagggaaacaccatttcaattttcttaaagctttgagttcattggcagcattgggtggatggttgaacttggaactcccagattaagttttatgactactttttctgagaagcccagcaaaattggaaacaaggagagaaggaaactacttgtattctgatcttggcttccaggaaacgaggcaacattcttcagctctctctctcgagatatattttctcccttgaaattgtctccttttcccttatgaactggcttttatgaataggccattttctgaagtcatgaatttggacatcacctgcacttgggcatggtggctcacgcctgtaatcccagcactttgggaggccgaggcgggtggatcattgaggtcaggaatttgaaaccagatatcgtctgcacatgatgaaactcactaccatttattgagcatttagtataggaccattttaagatgctgtagtactgtatttgatacaccttatatttaattttcagatcatctctataagttagatattatttaaccatctatagatgaagaaatagactcaaagctacatagctagaaagtaacagagttggaataggatcaagatctttctccttcccaacagtgacctttttataatgcaacatagcctacttatttattcaataaatacmattttattgcccagtaataatagtgaacatttattggatgcttactaagtgtcaggcactgtgtccagtgttttatatgtattatcacatttagtcytcatattccattgggctcggtaccgttattatccccattttccaggtgagtaaactgactttccctgaacctgattcatctaatactaaccctgtcaaattaaatcccagggtaaccagccttcagctcgaatcacacattgattctctcatctgtgttaactgtcttttctcctttacagcttctgaatctgttcttattttttgcttgctctaggaaattttataatttctctcactttctaccattattatgatctctattcaggcaaacttgcaatgaaaattctttttccctctgctttttaactctgtcctccattctttcaggctcttgggtaactgttatagaactgagttagaggagacatcttgttttaaccctgtgctgaaygactctcagggcacctgctccctcataccttgagacattgcagctttcccctctttcactggtgaaggtctctgttccctcctgtctgcccatcacattctgacttctttgccattttktagcccagcctctgccttatctacccctgcattctgcaaaagctaccctttcctcscattcatccaggtgctcttccaaactcaaaccttccatcctcttttttgagtacataggggttagaacagaaattttccctgctaatcatgctgactatacaggaaactgatcatgctattcttcacccaccaccttcaggatctgtttgtttctagagtgtgtctcagattgttcattacctgcctcatttgtccagttgtatttgaagggcccttctcttctagttctgcctttttcacctcactgatagacatggcttgaggaatatattaagcatcacattttagatttgaacctaggagaggcctttaagatgtatagagtttactccgtttgttagaaataagctctttccmagactcttcttgacaaccrttgtctacagttttcattgaaaatttcttttaacaaatgttttgaagactcttacatacctgacattgttaacagagatacagcaaggaacaagggctgtagcattggccctcgtgacatttataagaaatggaggaagacattgactatttccttaagaaaaagactacagttaccctttggggtacttgcagtgtacagtgtgacatactaataggtaacctttttgtgtaatcagtaaaggcaaatggatttttaatatcacttagtatattagtggtgatcagtagccagatgtttaaaaaaaaggaattaatttgcaactgttggttttaacaaattaaaggatggatagttttagggaatagtatagtacagacttcttggtgtcttgaatatactcctgaagctgctcaatatttagcgattgttagacttgtgttcttctttttttatggtagattaaacaaatgtagatggttttagaagatgaggaagtggctgatttattcggatagaatctaggaagaaatcaagtcaactttattttgtgacttaattgcmtgttaaagtaggctcacatttctgagtagaccagagcagtgctccttagactttaatgtgtaaagtcactgtggaatcttattaaaatgcagattctgatttagtagttctggggtgaggcctgagattctgcatttcttgtaaggttccaggtgatgcttttctgctggtgcatggactctactttgaataacaagggaatggagtattcctaatttgttttgcaatctactgctgtgtactgttatggaaaaagaagaagttttaaacatgcttaagttattaatgtaaaaatcaaatgctagatgtatttagwtttaattattttttatcctaacaggaattttgtgtgtcttctggaaccgtattatattgatcagtaactgttgctcattttacctgaatcaaaagggccaatgatttggttaatcttattatcaccttcactttacacatgcgaaaatagtggctctgagtttcaggttcatcatcatggggctagaaaataaatgacagagctagaatttaggtttttaattcaagtcttgtccctctccctgtatcaagctgcctctactccatgtgactccccttgccatcatctaagatgatttcctactgtattcttgtataccttttctttagttcttctaggggtttgggtgttctaaaatttttttaattactgttttttcttttgggagattatagtaaaactttattagcttagcttacttggggaagatagttcattctgactggtggagatcctgatttgcaaaaagctttaaaagaaatcagaaaaaaaattggtctattagaggtttttaaggaagttgctttaataaacatactgataatttgttgtaagtattaattatagttgtttgtrtattaagtagaagttacctgggttagttgaaaactattagattacaggcattttattatttattaaaatctggtttatattgtcatgaaaaggagtttttaaaaatagcctctctaaataattttaaaaatcagagtgagaatttttatgtattttatctcctgaataaataaatacagaattataaaatgtcttctcagtctatgtcataaaatgtttttttattctcagtgtaaactcttctaagtttaattattcatggtaatttttatttaatttggtttaacttttctctttgaagatagaggaggatttagtggttgatcagtgtcaataataatgaaatgccaaaaattattgaactctgacactgtgtcagatgctgtatacatgttgttctattcctcacaacagccctactatcatctataaggccaggggcactaagtaacttcttgggtttattcagctggtaagtgaagagtctaatgctggtaagtctgatttgagagtccatattcagaatatagaactctctaggttgagaagaaaaatcctggaagacattgaggggcttgacttttaaggggaggggctcagattatctctgacatgagacatactttgtgaagatgtaaatttgggagagaataggctgcagcagaagggaatgcatgacgtcgtggtatccatgtgtgctaggaaccttcgcatactttggttcatttagttatcacatcttaaccctatgaagtaactatttcctcattaaaaaaagaaaaaggaagaacagttggttttccagctatagattctgttctgcaccctttccttttggaaatttctcggtctttgtgacatggttttctcttttcctgcctctctggcttatttgctgccatttcacycactcatcttcaactgtcctcagagtcattcctttttcatgttattctctcactgtacatgctccttcccttgtgacctcaaactctggtgtgattgtcattgtcagtgacccctctgtgtgtccacagccctggcagttcctctgcagctccagaggctactggacgcctccacctagctgtcccaaaagtagctcagatgcgagatgttcaacattcacctgatcagtttctcccagatctgctcctcttcctttactctgttatggatcatgacttcactgtctgtgttgccagatagrccagaaatctgggagtaatcctgaacttttctttgactctcttctctcacatccacaacagtcgtggagtctgtagattttacccacgaaaccttcgtatctacctatcctgttcattgccagygcagctccctaacccaggtttccatcatctcttatgtcctagtggtctccaagtctgcctgcctgtcagaatcacctgggggagctcagatcatagtgtccagtcccacccgcagagattttgattcagtaggacctgggaatctataattttagcaagcacatgattcttacatgggtagtctagtggtagacaagtattgagaaccactgatgcagttggttttcctgcctcttgacatatccccttcccctcagtccacaccccactgcctctaccatgatcttttgaaagccaaaactggctgggtgtggtggctcatgactgtaatcccagcactttgggaggctgaggtaggtgggttgcttgagctcaggggttcagggccagcctgagcaacatggcgaatcctcgtctctacaaaaaacacaaaaattagctgggtgttgtggcatgcacctgtagtccaagctacttgggtggctgaggcacgaaaatcgcttamgccctggaggtggaggctgcagtgagctgagatcatgccactgcattctagtctgggcaacagagccagacccagtcccaaaacaaacaaacaaacaaacaaacaaaaacaatcaaatatctcttcattatctacatgataaattccagcatcctcagtgtagtttgtaagacctcctaggggatcatcacagtcatttcctgccctcttcctttgtatatatcctcttcatcatgtctgcttagtttccagattgttttatttcttgcttctgggctgcttatacattcagttctctcagggtattcagatattctcatttgcttatatcttgtcattgtactaagggaacttttgtaggtctttctaattctgccccstgaaaaaagacttttctccctgtctgcttgtcaaattcctcttctttgaaaaaaagttcaaatgtctgtgtttataccctgccttctccccttttctgtcctaccactgttcataagacactcctctgacataacactcatcacactgcatagcagttgaattctcatgtctgtctcttcctctgctagttgagcattgagagatcagggaccaagtgatctggccaaaatcactttgctgcaaaggagtagtatatgactttggagtatatgacttaccatctattccaccatgctatgtgatcttaagataaaaatcagattaagaataaaaacttattggtggaagatattcaagggaaaccccatttcaggtggactctatttttttttttttgagaaggagtctctctctctctctctgtcacccaggctggagtgcagtgcgtgattccagttcactccaacctccacctcccggattcaagcaattctcctgcctcagcctcccgagtagctgggattacaggcgcacaccaccacgcccagctaaattttttttgtatttttagtagagacagggtttcaccatgttggccaggctggtcttgaactcctgacctcaagtgattcgcctgcctcggcctcccaaagtgctgggattacaggcgtgagccactgcacccggccccctcattttttataaaggaataatacgcaaatagtaaaattgactccttttagtgaacagtttttgaattttgacaaacacatagttacataattattacgtaaccttttaataaagataaaattgtatgattgctgaacacattaaatcagtccctcttggcataagctttaaaaatcagtctcaaaatattttcattacaaactatttattaactctttaagggtccgcaagggttaaggtgtaatgtgccttagtaattctcataattaaaataaaggcttttgctcctgagctcaatttgctatgatatttggctttaggtttgcttaaattttgttcaaaactatcatgggaaacccattaccaaaggagacaactccttctgtgtacaaaagggaaagacccactggttagaaatttcctgaattcaggtgaaatttactttcctataacttctgttggttctaattcctctctctgaaaatggagattaaatctgatttctcataagttctcttagtatttgctgaggcctctttctcttttccaggctttagtctttagtctttttcccttattctgtgtcatggctttgaagcattcatgatcctggcccaagtctgccagatgctgcacctaatgaagtataagacttggctcctttgagtaactcttgtcattctttctattgagggaacttttaaaagtctgtcttattttctttcccttgaaagaatagtcttaaaatatagcatttgtatctataattcagaaaaaaatcgatgggaaattctctcccttaagattaaagtacatggtgattgagtagtgcctacaacagctgctaggttacatgaggctcttgctttacgtgcagtggcaagtctcttgacctctctgaatctcatttttaagataaagggatcatttctaaatctaaaattttatgattctagtttaggtaaaggtttacatgacaacgtgaaaggcttaaaatggttaataggctcaaaataagagcaaatttattaacacatgaaggtacaaacatgttaataagcatattaatagtataaaatataaaaataatttgataaacaaatttgataatttgataaatttgacgagtccatttatatttgtgtcattttttccccctccaccccaccaaaactttctaaagagaaattcccaagaatgctacataaaacatatttggatctttgtactatttggcgacagggtttgacttcagttggtggtaggagaggtaggattttagtcgaagtttttcagtcttttttcttaatgaattaatgacatggaatcccactgataactgtgtaggattaggatgttgacaacataatagaaatgtatctcctgtcacactaatatgtataatctacatttggattcaatacatagcccaaatgagaggatttaatttagctgtaaaatattaatatatatttttaaacattcgagttaatgaaaatatggataatttaatatatttaaagtttacataaaatacatgaagcattagtattcatgattttcctttactgttttagccccccaacctttttttggtttaaaactcaggtggaactgttagtaatgatgaattttcatatcgttgtatggcactattgtgacacagccctttttagtggaaaaggaaacatatgaaagaaatatagaatatttgcatctcatcagaagcactaaaggaaatattaatgcaaatacatgcagaaaaacaaacataactagtatagtattataacatgtaaagacatggaggaatttcatccaaatattattaaaaggttgggaattgttatgctgtggattaggggttgacagttactgtagcttccatgataatcctgggaggctgaatttttgaaagctctctgaccctgctgaactagaagggctaatttgagaagggtatggtgtaaaatgtggccttttataggctgaaaacagggatttgttaagtggttgttgaatgaatgcatgccttgcattgttgggcaaagaagtgagggcattgcttttttcccctggagtaaggaatgaagtaaaaggtcattgagctttgtagagcacatatattcactaaatactaggttgatgagttgttgacttgaggataaagttattatgccarcatagaggaggatctgggaaaagctctaggaagggttcttggacactgaggaaaccttgaatatcaacaaatrtgcttttggatttggcagaaaggatagagaatagaggaatagtgtgaaaaaattatctactctttatttattcatcaaatatatttttaggtactttgataggccttgcaatacaagaatgaaacacccagcccctcttttcagggagaaaacagtttaaaagaaggtcactggacagtgtaatgagtgctgtaatggaatagtaacatgtgcaggtgctctggtcatgcaaaatgcgtcccctgaccagttaaaattttcttgatccagttttcctcaccattagtctattcttcctcctaataattatttttaaaagtaacaattttcagaagttaaaataaacctaaatgatcatgtagtttgttactgctcaaaaggggatggtccatggaataatggcatagcatcagttagagcttcctggaaaatgtggtcttcttagaaatgggctgcatgggctgggcatggtggctcacgcctgtaatcctaacactttgggaggccaaggtggatggattgcttgagtttaggagtttgagaccagcctaggcagcatgacaaaatcctgtctctacaaaaaatacaaaaagtaatagggtgtgttggcrtgtgcctgtaggaccagctacttgggagtctgaggtgggaggatggcttgagctcaggaggctgagcctgcagtggacggagatcgtgctactttactccagcctaggtgacacaacgagactctgtctcaaaaaagaaaaaagaaaagaaaagaaatgggctgcatatctgacccactgtctcaaaatctgcatttttaccatgcccacccgcccccctccccaacctggtgattcgttttctcattgaaactggagaagcactaatctggttcacctacttcccatccagttttacagatggaggaaatgaagatagattgtgctcctaaggtcctatgcacagtagcagagccagtgttagaactcagccagtcagctggtcatggtggcttcttactagtgcctctttccttctctcttttggaaattctctrttgaatgagagaacaacagtgcaccacactatatataaaaaagaatgaacatttttatttacttataatttgtggcatcagcaactcaggaggctkaggcaggtggatcacttgagccctggaggtggaggctgcagtgagccatgtgtgcaccactgccctctagtctggacaatagaatgagactccatttcttaaaaaaaaaaaaaaaaaaaaaaaaaaaacccagtcaccagtctacttactggtagggtcttgtgtgctttctctgatgcctctgttatttcctgtttctctttacttttttactcttctattggcctctrttagtgtttcatattgtaagatcttcagcttctcactagtgtctctttccctctctcctgtggtagtcctctctttaaatttctctgttgaatgaaaacgatacagcataccacactgtacatcaaaaagaatgagcacttttacttactcttaatttctggcagaggtttggacctatttctttaattttttttttctwcccgctactcagaactttctttgaagtcagtaggaattctgtgtgtggtaagggtgagagataatctatgatgttagraattaaaatctcctcacagatacatttatcttcctttctttgttacatggagtatggcattaatcagagtacttttgctctttgtataagtctcatgggaaaaacagcgcctgccttaaagttkgtggaaaagaacaggataccacagcaactccttctctgtgacctagaacagagagtttgtctaaatgtttcttctctaatatagggggtttgtctaaatctttttttttctataatatagaaaaagaaatacctaagtagatgcacacctcatgttttatagggggcctttagcatagaaagatatggtcatagaatgataatgaacataaaatgataaaatgccattaagaaaagtgaacagtcactgataagaccttcgtggcacaacgcctttttaacaaaagtcagccgtgctatcttttaagtcatttcctccttgtgagaagtttaccatctctcctgtggttcaaatatattggtttatttttaactctgaaatgtgtttgatttgagtgatatagccataatctctatgaatagtagacctccttttaaaactatgaaataaaatcagtttttctgttttcctggttcccatatgtgtttttctttcaagtcattatcacctttttttcccatatctcgagtcatcaagcaatagctcaccttcttaacaactctgatttcattaaaaccatagttgtgtcatttcctgactttgcaaattgtttgattaaatattgtgtttcgtatcttgtatcttactgtctattgacagtatatagacacagattaattttttaagtaaggtattttaatrcctagttcactaatccagaagcattttgcatatacaggctttagtaaaaatgacagtttaaatagggagttattatgatcaacaattaagttaaattcatttaggttggttctaagaagttgaattttcttttactactttaaaaatacattatttcttcaaaatacracataaaatgttttgcattgccaagaataaactagaaattagatttgcaaccttcaactgttgtttagcttttagaaatataaaaattaatattaatatatttttataatgtgttaaaagatgaatttttgttaatcccatccatatttcattatcatgcttgtttcagaaatgttttacttgtggcaacattccattataaaattgatttatggttgtgtatttgaatatgctggacaatcaattcattttaagtaaaataatgtgttgcattttatatatatagttacacatatgtaagttatgcgatttacagctctagagaaaaacattcaagttagttattcatgggaataaaataggtgcatgttctcaatgaaaaagttagaaaaatgtcttgaatatggtgactgtttacattatagaattgtaattaaccctaacttaatctctcagtgcccctgtactcttgtcttcagtgtctcgagatatttcagcaaatggctaccatcgcccygtacgtacctctccagttacattcttgcctgctttaggagtggacacacagagcagcctccaagctgccctgataaatttcacgtgtataatatggaagacaaatgtttccttaacatatttattttctgtgtatgaagtttttcattaactwttcatcccaagataaccacctctgtttttagtgcrctttatttcttgtttttgttctgtagggtctctgtaaaacataatgtgtgacataagtaatgaagcataattttcaaaagccacttgcaggagtcagtattgtttctttggtttttataccatgtattttttgttgggactcaaaggacagtgatccgtatttagtcaaattaggaaattaagttgaaacatcttgattcctaaaaagtgtattttataaaacatttactgattaatgaattttatggtattttgttctctctatagataagcgtgtggaaaattggcctctgatgcagtctccttggcctacactaagtataagcactctttatctcctgtttgtgtggctgggtccaaaatggatgaaggaccgagaaccttttcagatgcgtctagtgctcattatctataattttgggatggttttgcttaacctctttatcttcagagaggtatgtttttaagatcactttaataattttccaaggttattggaaatttaaaaatgagaatgtgtaaaaccatcattgtaatattttacccagacataactgttagctactctaaaagtacatttttgacatttttcacttttgaataacaaaaatattaaacatgaggtataggaaagttgtttaaartggaattttgaataagaccaactggattctaaagtaacccttattagctgttctggcattgaaagttatttaacttttcttagcctcrttttccccacttaaatacctaccatctcaggttattatyggagtaaagtaagataatttttgcatagtgtttggcacgtattaagcactcagtaaacagtagcagctatttatttataattcttattcagtagtttctggtttggtaactgatcaaaatatgccaatttcaagtaaatcctattacataatgttgtattttgggctggaattaaaatgaattaactgccatatagctgttgttactaatcattatatacttttctgggcactagcaaattctccacaacattttcaaaggaaatcctaaaggctagattgacacagccattttttaaattgcatatgtataaagaatttgtttcctaagagactcattaaaattctgtatgaasccagagaactgactagtaatgctaggaaaataaacaataactcttcttagaaaaagaaatatttctttacttgaaaacttagcctcgagtctcaacttcatgaacactttaatttatttggatacctgtacctaatttgttagatgcaaaccactctggatcaaacatagaaaccagttaaggtaggacaactttgaaatctgagtcctagcaataaaaatttctcttaatactgtgaagtatttaatagatagagtcaatgttcagtataaaatttacatgtgatttttaatttagattttaattatagaacaaattaatgcacagtaacttctagcaatcggaatgcatgaaatttttaatgcatttgaaatttttaaagaaaatattgygtttaaaataatttgaaaggctacattttgtatataattgtgtttttaatgctgtgtttactaaaactttactacaaatattattactctttttccagttattcatgggatcatataatgcgggatatagctatatttgccagagtgtggattattctaataatgttcatgaagtcagggtaagtacattaaaaatactcttaatcagtaaaagtggtttgatttttataggccycagtctgtgaaaatatagaatgtacttttttttaagagacagtttctttaacattcatttagagacagtttcttgctctgtcccccagacygaagtgcagtggtatgatcatagctcactgcagcctcaaactcctgggctcarttgatccttctgcctcagcctcccaagtagctgggactacgggtgtaccccaccatgcctagatatttttttactttttgtagagacagggtcttgctatgttgcccagtctggtcttgaactcccagccgcaagggatcctcttgcctcagcctcccaaagtgctgagattacaggtgtgagccaycacacctggcaaaatgtactttaatatgatagtgaaattatactagattgttatgagtcagtaaaactatgcttttttaaaaagtacttaatttaaaatttgtttttgtatctcaaaaatgttttttattttgcagcatgagtgaatatgcattgaattactagaatgcagtacttgttaaagcaaagaagtctcatgtttattttaaagacattattttagatttttgtttgtttgtttttgctcaagagtagaaactcttagagtccaagttatgtgttaagaaagtgaggaaaagtaaatgttttgtgaagtgtggaatatttaggaaattaggcatagaacaatttgtattggcataaactcagtttttttatatttgcagaaaaataaaacactagtaacaagatgttatattttattttccattcacttacatgagtaaaattaacattaagcaaaagaaacaacagattaccttattctattacgtatttattgaactcttcttatatactgtggttcatactagaaattacatataaaacataacatgttttatgttacctatagtatatgtagtaataatatctagtggcttcccttgagaaaaatagtttcctggyatggggagtggacaatatataaatatcagtattcatcaagactggagacaaaattggtttaatgtacttaacaattttatgtacgtatcttcatttccctattagaagacttatggactgatgaaaaatcacctgtcttggttgtcatgttggttttatttattcattaaatatgtattgagcatctactatatgttggtactggggacaggggtgaaaagccctgcctttgtggggctggcattttagtgagggtgagaaggcagacagcagccatgtaaacaaatgactaaggaggaaataaaacctagaakgtgactgagagaaaatgagagactactcagatgtattggctatgaaaaattttcttctgataactattgccaaagaatctcttcagttggagggctgacttcttgcttgccgtagggaagggaacagggatragtgtttgactgactgasttctgggagtatgcatagaaaaacccttgggtggggcaacatattactatttttaggataaaggtttaaaaataccactctcacttacagatgtaaattttcaagtctttaaaaaatgagctattatgagaactgtaatctaggaggataaagaacctgagatttgcaacagatttcatttgaaatcttcctcgtgctctcttctcctctctaatatgggatgcaatagagtgaatattttacgcagagactcatttctgtattcattgttacgtagccaagaagtatcactttttggtgtagtttatttaaagatatctagtgcagtttgcaaactaagcagacttatttgttgttattttatgtgaattgtggcaaatgtagaggtccagatagaggagaaataagagattgtatctttccttctagttaaaggttacgatgccaaaatggtgacagttactttattttaaagaactaatataatagtgaatattaactatagtgttgctgggagtagttaactatttcaagcttattttcaaccaattcatatcatttttaatgatawttttcaagtaaattcagtaaataattctcagtttgtaaatactttgtttcttatatgctttctgtttcttctttccccatactttaaaattrtaattttgtttttcaaatgcaaaagccaaaacaaacaaaaatctcatgacatataccaggtgcaggtataaaatgcaaagggatccttcaactctaaaacacctaagcctgtctgtgaatgaatctgacagggccctaacacatgaaagcttataaatagattttagttatgtactgccttaattgttatttgcacataggatgcttatcatagaaaatacttgacataaaaaattaagtttggtttactgttacagtaggattcttgtaaaacattttaaaacatacagaggtcacctctcactggatccttaatctcagtatgtaatgtaatctttctgtaccatctggtgccttaattagagcccaggaaaagaaaagacttattcatgtaagcaggattatatttatgacctgggaaatatttgtttgttcattccaattttttattttaaagatttaatacctaatacaaactgctgtgattggatatttatgttgttgcacatattggtgcagtcggagaggtgagggagagagggaggtgaggggagagggtgggcagacaggcagacacttgtagagaccagttgctacrtgaacttacttgcaagtttttctgaggtagtataatgtaggctaagcatgaacaactaaaatcattttacaaagtaaacatcttagttcctctaccaagttgaaaagcacagcagtctgaatgtgcttccagctctgtattcagcagtttgacactatgtaacatctacctatggaatagacagaaaatgttctctaacttattggcactgtatagatagagctttggactctttcttttctatttttcccatggagagatgcttaggtttttcaaacctacttagccattaatgattccatgccttgtacattttgtgcaatatacaaatgtttattttggacttacttacaatgagtataaacccatacaatagtgtcattttggtgtwtataacacgctttccctttttacagatagctgctgctctgtggtggtactttgtatctaaaggagttgagtatttggacacagtgttttttattctgagaaagaaaaacaaccaagtttctttccttcatgtgtatcatcactgtacgatgtttaccttgtggtggattggaattaagtgggttgcaggaggacaaggtgagcattttcaggaatatactgcttgcgtttaattgcatatatgtgttcagtggaaagcaatgagaacctaggactttgacttgatctaccatttaacttgctttcatggttaatcatttccatgttcatttctttttttttttttttttttttttttttttgagatggagtctcgctctgtcaccaggctggagtgcagtggcgcgatctcggctcactgcaacctccacctcccgggttccagcgattctcctgcctcagcctcctgagtagctgggactacaggcacacaccaccacgcctagctaattttttgtatttttagtagagacagggtttcaccatgttggccaggatggtctcgatctcttgaccttgtgatccgcctgcctcggccttccaaagtgttgggattacargcatgagccaccacacccagccatcatttcattttttaaaaaatttgaggcaagtataacttttgctttttatctgtgactactttaatacctaaagatttgccycagagatgagcataaaccaagactaaaggtagaaaacaatattttgatggggaacgggtctagtagttctgatccaaagaataccaagacacagcccctcaaatctgaagatttccatcttagcccatagctcactcctgccctaatacagattgaacatccctaatctaaacatctgaaatccaaatgctccaaaattcaaaactttttgagcaccagcatgataccacaggtggaaaattacacacctgacctcatgtgatgggtcacagtcaaaacacaagtgcagaacacactttattcagtatacctaagggaaaaaagaccctcttagcccttttccatgtacagcataatgttgatgccaaacaaccacagataatgtccacacgggtgacatctttgctttctgatgttcagagtacacaaactttgtttaatgcataaaattattttaaaattttataaaattaccttcaggatacatgtataaggtgtatatgaagttttggatttagacctgagtcctatccccaagacacatcattatgtctatgcaaatattccaaagtttaaaaaaatctgaaatcagaaacacatctggtcctgagcattttggataaggaatactcagcctgtataggtcttgttggttcttattcaaaggaaattttatatagccttgttaatgttaaagaggatctaaattcatagcttggccaagatctgcctcctgtcttttcagatgcctgtagattaaggatgattcacattgttgagcttgatgcagattattcctctgaggaggatccagggtacaagtcattatagtatagttcaccttgctgctttccattgtcatattatgataattggcagcttaggaattcatacatatattattgggggcccagtttaaaacaatacagttaaaggcaacttctgtaattttaaaagaaaattagtaamtctgaactgacttagatcactttatgacaaaaattaattattattacatctataccttgattaaattaatattctgaaaagaaagaatgtcattgagtttgactgactggaatatctctgtagatttatctatattaaatgaattattcaatgtgtgtagtgctgtcatattttaaactatttagaaacctaagaaataagtactgttttgttgcagatatatatattggcacatctaaaggcaagaatagtagaattaaaagtaacataggcaacagttctaagggcctatttaagctcactggagtactccatttgaaaacctacaactgtgaaagtcctttgcatttgaacatacatttttatttatatggtaaaacctcaaatctaaactttaaaaatatctagcttaatctgaagggaaaactttttcattagtactactttatatttttcatttctaatctgkactcaagattaaatattaaaaaataatgtgtattcatttattgtacatctcagtggcttactgcctaataaaattttctgtatcttgtaattacctgttgtttttctaaagcattttttggagcccagttgaattcctttatccatgtgattatgtactcatactatgggttaactgcatttggcccatggattcagaaatatctttggtggaaacgatacctgactatgttgcaactggtgagttaaatgcttccaaagtttcttctggtaaaatactgaaattgtttaaatttgattaattttaaagtgcaatgtcattttagacaattttctattatgaaattaactttatcctccagctatatcgcagttatgcccacttgactctagawgacctattcatagacttattggtcccagcaaatctttgtttttataatatgcttaaaagactagacatagcccttactcctctaaggaaaacattctctaaagatgtttgtggaaaggatgattaaagatctaagcacgctacaaagtacgtagatttatgtatgaatagaaaaataatatgtattttttccctacaggtgattttcttaacttaaaattttattacctytcttcatcttgtccttgcttaaaaattttgttttttatttcatttttcagtctttaacatatctcatatatttagactaaacagctgaaaagaaagcacatagccaaggaaggggtggggcaaaggaagggaataagggcaagagaactccttgtaattctctaaaacactgtccttaagagagcagagacagatattttcaaatggtggtctttagtccagacagttttcagcacatcccgctagtaagactgtttgtggcaatctgagtgtgtgcattagtgtacctttcagatgctaggcactagcctgtaatcaaactggaaattcaaagccaacctggtaactatttttcaagctttagaatttattataatttgctttaatcatagcatgtgcacaattttatcagtggaatcacatttggaaataatattcatctttgctttaagttgctaaacagctggctaaccaaacaggaagcacaacttttgggaaatgctgggtgcgaaggattcatttgtaaccggagtggtataggaagcttcctccagtttttgtgtaaaagctgttaacacagtttgtgtaattcatttctctcagtaagtagtaaatggacctaagaaaatgaagaggtgatcaaaatcatgtgaattagtcctatctggtttgttggagcctacacctggctctccttgagtgatgccatacccaatcacacccttatacacaccctttttggtgatgcagcttctaaaaaccattgtgaaaccacaagttcttcaaattaaaatatttgccaaggaaaattataaaagtttaatatagtataaatttttagcttacatggcatacattattttaatatttaaaataagtaatactgattattttaatcaataattaatattttaagaacaatgctatccttaaaagagaaaccacaattgtccatttcaaacaggatgttgagtttgtatttccaagccagaagttcccacaacagttagtcatataagttaattgtataaaaagttaacccttgttaacattatgtcttgacccattcttttattgatacatcagaatctatttcattttaatcatctcactttgggcttttttscttttaaaaattcttaaagttgaaagtgattctttttgtatttattctgaaatatctactaaattttatccaaatattatttttttctttttttgggacggagttttgctcttgttgcccaagttggagtgcaatggtgcagtctgggctcactgtaacttccgcctcctgggttcaagctattcttctgcttcagcctcctgagtagctgggattacagtcatggaccaccacacctggctaattttttgtatttttagtagaaatggggttttaccatgttggccaggctggtcttgaactcctgacctcagttgatccacccgcctcggcctcccagagtgctgggattgcaggcatgagccatcgcacctggccatcaaaatattagtttttaaaggatagtgttcgttcaaataaaaatttacctgcctactatctgtaagaaataaatgagccattttgataagctcattttaagtatgtgtatctgcttgctgacaatttgatagaaagaaaccaatgtaaaatgtgggaggaaaacaaaattgaagagcctacaatactattactttactctcctaggccattgattccctttcatcagataacattattcaacacatattcattgatcctgatgctgtgctgaggactcaagaatcaccgatgggcaagacaaagccctgccttctagagtcattttctagtggaaagataggcaataaagaaataacaaatacagaagacaatttcaaataggtataattctccttaaaaaaaatgcagaaagctctttggttaatgggattgggagggccaattgaaattgaagtcttgtcagagagtccttactgaggagatggcatttgagttgtgaatgaggagctagccatgggagccagaaaacaataaattttgcacagtgtggcaaaatttgggcctgtgatagctatgtagaagatgccgatgttgttaaaagttgtttactattcagattaaatgttttgtgctgtcatttctgtttttcagattcaattccatgtgaccattgggcacacggcactgtctctttacactgactgccccttccccaaatggatgcactgggctctaattgcctatgcaatcagcttcatatttctctttcttaacttctacattcggacatacaaagagcctaagaaaccaaaagctggaaaaacagccatgaatggtatttcagcaaatggtgtgagcaaatcagaaaaacaactcrtgatagaaaatggaaaaaagcagaaaaatggaaaagcaaaaggagattaaattgaactgggccttaactgttgttgacagtgaggaaaaactcccatatcatataaaatttcagggaaaacagaagcaaaggagagcttgggggtggggagaaaagacaaatgtgctctatgtcctagtaactcttagactsagtaaagtgttaataccatacccagatgttttatttatgaagtttttattttaaacattttttttaaaaattagccttgatattctccagaccaaagcaatcattaagtgactttggggattctccccctgttcacatccagttgtctaaaggatgagatttttcatgtatcttatagtcactcattcttcggtctgaattttagacgatcacagaaacggtctttatgaattattttgataaattactaattatcttatctactgactgaaatcagtggtgttacattttcttgtccaaagctgaaaatgtgtatacacttaaacttgcacatttgaattcatttgctgaccggaatggtcaaatctctccacctctagtcagagtataattttggttgtaattaaatttttaaaatctgctgatctctgtagaatcttagaggcttgatgatgatggtgttggtgaaaataagaaagaattgcagtaaagtcttgtctggtgacccagagatcaccatgactygaggcacaaatcactgtggggaaacaattttttgtgatgaaaaggcagcatttgaatactcctgttagtagcagaaatatattatgaaaattaagattattgtctgattgaaacatgaaacaactcatgtctttattagtaacatcataagatagttacatttatgtgctgttagaatatgttgatttttatcaggctttccttgttttgatttatggctgttcctgatttttcatatgtggaaatatacctacctcttccgttggaaagaacatttaaaattaaataaattttaattaaaaaatcaaggagtcttctaatgtaaattttaatgttaactttcaaatccactagtattttttttgcttttatgacaaatagcatacaccaaacatttctgtgaaactatccttctctttcaatgtgtttaattttggagtaacgttttccttgtgactaagttgcaagatcttatttattaactaggtatgaagtataaacccattttggtgcaatattcttgactccttggtgctaaagattgttaaattcaatgcttgatgttacaaggtgttgttaaaacacaaaatgaataaaagtgagagtagtcagaactataacattcaatttgctatttacaaatgaagtatttcatgtaatataagtgaacaactggaaataaagtaggaaagaatttgtatcatgttttactacataggttaattttttaagggatgttgcaaagggattactagagaaagacaaaatgtgaccaaaaaaaagcatgaatatttcttaagtatctcaacaacatgtcaaagctgcatgtgtaggatgtatgctgtttgtacaaactatttcagaatattttgtaagctataacatatttattgtgcattaaaattaaatactttttccccaaaggcatgcagtcatgagaattacagaaaatttgcaacatataaagtagtttgatctaagaggattcaacacctttgtttkgttgctcagtgtgtaatgactgagatttgtaaatctttgtgaacattctgtactggttcccaagagctattcattccctgctacctgatttcagcacaataaatatacttctgctgtgggaaaaatatgatttttttttgttaatcagtttattataatgtaaactgtctgctagatgtttatttgatttagttaattctaaattgttttctgctgctaatttcttatatagaaaaaatcaaactagaacttgggtatctaccatttctggtaaaaagcttattttctatagtagcatatttttactttaaaaattagctgcttttggaagagcttttcattcagacataaaacataccattttcttctaaattattcttaacataaatggggaagttcttgtattctttcatttaaatcattcagtccttactataagtttctttatagaagatgattataagatgtcataaatacagccttttccagtagctttcataatttctctattatcacagatatgttgcatgccttatatctagaaactgatgaataaagattgtgtctcctacttggtaaaactttgtcactaactaaagtaacattttcttacatagaagacaaggaatttgttaaatacttacaataactagaaatacctgagacatgtgagttttcctctataatagatgaccatagctctttctctttcctttgttacttcttcattttttggtagaaatgagatttcactatgttgcccaggctggtcttgaactcctcaccttaagcaatcctcctgccttggcctcccaagtctgttacttttgactgttttgctgatggaaactaacaaatgactagttttagttttaacattattaattcattctctttctcttgttgtgcatgctctcaaggtattcaaaaatattttaacatggattattatgtttgtactttagaacatggaatctagcagtgcttttagtttattaggaatattttaatttacaggcttgtttcatatatgcaactcagctaccctgtaaatgggaaagagaacatagaggtataagtgatttttgttgtattatctatttgacaatacaagtcagatactatatattgactattggagcagaacttttgaatctctctcaccttcagaatgagacaccacactgaagagttcacactctcccagttctttccttgttatagccataatctcagccagctgtactcataacaccgtgcttactaagaaaaaaacagctacagctaaccaggatgtgtgctggctggcctgctcagcatggacctgggtggcagatttcagcatcctgccagatggtaaatagggcagcagaggtgagagactgatactgagctctgtacacaggcacacaacacacaacatctgagcagtaatcataaaacctgctgaaggaaattggtcacctgccactcagcgtgcaagtaattttggcaagtgaccttagcaagtccttattagtggtgtaatttagaatccatgcttagtcttttgtattttaggcagataacttctgaatgacaagaatatttgtgaaaaggaagagaagtagaaatggattccttttttgttgtatttttgcaccaacctaatatttttgtttcaaaatactacaaatcatgtaagtgttagaagttagttttcctataaattacagaggggaaggcacagctgtgaattgaaaggcaaagatccttttgaatttgttttcataggaggctgtgaatcctggaggagattaaaaaacctaaatttaaaataattgatatatagaaccactgccacatgaagattgtaagattttagaatgtatcactggaagagccttgtgacttagccagaaggggatccagagctgtctttagatgatcaatgggaatgctatgagtcagtcaccccttggtgttctttcagacttagaaatgtcggttttgctgtttcctttgagaaattaaactttcttctatctttttcttttaattagggtgttgtttttttccttttccttttttttcttgtctttttcaatttaccacacaaagcatgtttacacatcaatacacatgagcaaatttttgttcatttcttccttggagacccatctggtcttaaatagaaactcaacttagattttgatttttttttttttccattctcatacatgaggttatcccagggaatgtgttaataaagtagtatctcctttgagagagaaaaagtgcacgctgaaacacatcacttaatatctaattataatgcagctatcagaaggtcacattgcttttgaacatctatacagaatatgtccaaattaaaagccatcctaaatacaaaaaaatcttgaaaggtttaaataatatggctatttctaaaaacataggatcttgaaattattatttctcaatttaaatacaagattgttataaagaatatttcatcagtccatgtacatattccatgtactctgtcagtctttaggtattcctgaatcccttttctacaattttatagaagccagtcagattgccccttttctcagttaaattttattttcattgaatttgccatgggagaaaaaagagagcatccagttgaaatcccttctttgtcattcatgatgcattatatttcaactgagtttctcctccctgtgaggaagctgtcctaggaaccagtcttgcaagaataatgattagcttgctatttggtaattagagggtgggtagattatgagtcttatacgatagatagcattatgttagcaacagtcacacctcacctgagagtgtggcttgtgttctaattaataaatctggggatcaaatacatttacaatttttataagcatattatatagttagggtttgtcagttgtacatgatacagttaggtttccaatatattgtgatttcagatctcagtaaaaatgtcataaagacataatcgcaaaagaaaagctgcttttcaaagctatatttattcaacatttgtttttgttatgcttgaattattactgccagcccttgtaaagtggtacctaatctttcctccagaaataaaagtaatatgggaactcatgaggaaaaagagcagccagatgaatttgggtaacaaatttctaatttatcgttaaaagttgagatttggagcttacatcctgaagtctaccccaaatattaactacttcagaaatcaggcgtcatctttaggttagtgtagtagctgtttatgggcactacgaatccattcctttccctttgatgtgttctcattctcccctccttcagtattacagagtttggggaactaaaaattacatttctcagattcccatgtgatcccctcgtaaatttaggttttgtcaatgtgaggcactcgtgaaattttacaaaggctgaaggaggtgggtgtcacctttctgtagtagcacaattatgtaagtgggctcctacagacaaaagtgttggaaacagttggataacatgttccactatcttggcatcaattttatgaatacagacagtgctaatggtgatggcacttatgacagatgtggttgtatgaatttgaagctaaagattaaggatagcctcctgacttttattcctccaagttaccaataattttataaacatctactcttttgaattaaagattttctgcttgaataccttgagtggtatctattatatgtgatgaaccttacctagctcagtattcagtaccaaaatttgatcaagaaattgacttttaaatacaatatgacattggttatctgacttagttgagtttataggcagtgataacttcatgaccactgggaaatgggatactgttttccgtgaagcaaatagctaaatgatcacctatggccacataggatggaatagctattgaagacaagcctttgacagactggctgctgcattgcactattgtggtgcaaataagaaacagagaaaacttgagtggaaggattgcttcctattgcactgaagagcttacagaaatagtgttcgctcttattttaaattcttggcttagggcaaggaaaaagttgcagacagcttctatgacccgccctgaccccctgcccaagagacccttttatatatcttagctgcagacttaaaatgccttaaaacaagatttaaagtttgctcctttggattgcagaattacaacttgatttcacagcctcagtggtttcctgtgtgaaatttgtggcattgatcatgaaaggatgggacctaaagaaacagaatggggatatttgggtagatttggatgaacctgagaacatgaatctttaaattgctttgaatatgcctgttcataaaagcagtctgtcttccctatcagatgacattagtcctttgttgcttgagatactataatgacctcaaccaaggtagttaccttccaaggggatgctgatcccctttatgcctgccttctcccctttcagtgccatcagagctgcaaagagaattagatcgcagcatgccccaggagaacaaatacaaaatctatcctgggaggaggcagttagaatgataggatttggctaattttcatttgcaggaatgtgtaggaataggttctcagggtgttaaggcagggagaaacatttctttagaatgaactgaaattattgatatagttcttatatattaccaaaaattcttattttgaggacatagctaaacagtgaggagcagctttactggtttttcagttgttcaactgaaacagggactcagtggcagcctatattaaactcagatatatgttagaaactctttggaataatgtggaggagagactccagagacttaatggagttaggagtgttggagaaggtctaccatgtgtgacccacttgactagcccctctctatgtttgagatatctattggtaagttccaccagcatccttggaaaattctgtagtggttactttctatagattgggatcatgacggagggaggaagctgtccctaaaatgagtcccttaatttcaatttcagtgggaattagagtatcagattggcagaggccaaatggcagtatttaaatgccagagacaaaatagacatgattatagtcatgggcaaaagagccagagttattattagaatagcttggcctgtgggcatctatggtggtggccaatttattttgatgtcctgaggactgaaatagatagactaaggtccttcttgactagtataactgactaatctgataaacactggccggacttgggtcattacaatgagagacacagcccctcaccaattcccattcttgttccagtacacagacccagagttttttaaatggagggaacatcggattcccttgaaatattctttggtgatgtcacaggatatactatcagtcctctttctagctttcaccaaaagggaaagaaaataagcacgctttgggaggattactgggacactgactctgagcagatgctgctcattgggcatccccaattgctactgtgctcaccagtcaaaatggaggcttatagaggccaggtgataaatataattttgatctgagttcatctcacagtgattcagtgggtcctcaaacatacccttcccagttcctgcacgtatagttggattagatatattcaacctccagctgaactcccacattagctccctgtcccatggaatgaaggccattatggtatgaaggaccaagttgaagcttctaaaatgtccccttcttattgaaacagtagaccaaaagtattgccacatttctgggtgaatgtcagaggtccatgtcatcatccaaggtctgaaaaattcaggggtgatgattttttgtcgtacccccatttaacactcctgtttgacccaagcagaaactggggagtcttggagagagtgtattattattaaccatgtaactccaaattcaatggctgtttcagatgtagttaactgaagcaaataaaatgttcagagctgacttgttgctatgaatctgttaaaagtggttttctcccttctaacaaagagatgacagaaatcattt

SEQ ID NO: 98147 - DNA, 47572 bp, Homo sapiens
  misc_feature (1)...(47572): n = A,T,C or G
ctcctccaccaagcctgatgctaagggctataaaccactggcccaacagaagcttggttcccagagaactggtccctgcctgggacatgctccttgctacagccccttgtgggagctcagagggcatggctgctccccctacggtccctcgcccagtggttctgtctctttatggcaggaagcaatgaggctccccaagaacacacctgaggaaaaggacaggtgagcctggagggccggccgcaccgtgggcctctgtgtctggggagttggtggccaggatcccgagtacctgggtgctgtgacggggcgtggttggcctgggcgtgctgggtgtttgggaatgacttcccatcgcccgcttctgcagcctgctcagccctgttggggtgcagtgtgtccactgcctgcctgtgtgtgccgctgtgctcaggctctcctcttgctcctttcaggcgcacggcggccctacaggagggtctgaggcgggcagtctctgtgccgctgacgctggcggagacggtggcctcgctgtggccggcgctgcaggaactggcccggtgtgggaacctggcctgccggtcagacctccaggtaggggggcccgggggaccccaggcctcctgccgcaaagcaggaagcagctgttggggctgagttgctggagagcacggtggttggctgggctgagccaggtagggagacctcacttcacgggcagttcccggggctttggcctcctccaacagggccggggtgtccgctgccttctaagatctcgctcacggcggcaccacagacggagacccaaatgtgtctgcagagcccaccctgaccactgtataagtgtatactcccccaagaccccttgtatcacccccactgtcttgttctagaaaacacctatgtcagcccaggcacaatggttctcgcctgtggtcccagcactttgggaggctgaggcgggaggatcacttgaatagaggaggtcgagaccagcctgggcaacatagtgggaccctggctgtacaatagatacatatgagccaggcacggtggtgcctgtggtcccagctacttgggaggctgaggcaggagaattgcttgagcacaggaggtcaaggctgcagtgagccgtgatcacaccactgcgctccagccttggtgacagagcaagaccctgggtcaaaaacaacaaaacacgagaaagcacacaaggcagctcttggaagtagatgcctcacactgacgggccacagctgggcagagggtcccagagaaggagcgtctctctcatgggctcagcactttctgcagctgccctaagacctcatggtcttcgggttctttataggaaagacgcctcttttcagcatctggtcccagagaagtgtcccctcagtccctgggaagtgtccctgggcagtgggcgggccgttagcctgaagctgcctccgggggccctccaggggatgactgtctctagaactgtggtcctggttcctagagtggcggagagcctccagtgtgactgctcccaggcctcctgtggggctgagccctgcttggataagagaaagttttgttttctaagctcagtggtggggcttagccctctgtggggcgaaagcgggggctgcgctgggctccttgtgaggaggaggacgaagtccggcctgtcccagagcccgtcaggcagagaccctccttccggcagtttgctcagccttgatccatgtaggggctccctggggtccttgcaggtggcggccaaagccctggagatgggcgtgtttggcgcatatttcaacgtgctcatcaacctgagggacatcacagacgaggcatttaaggaccaggtgagcaggaggcaggtgtggtgcccggaccccacgtgggggcctggattcacagcctcagggtgattgccgactggccgtgggcagtgggggtcggaggttgctgcccagcaagctgggctgaagactggaactaccagacccctctttccctgtgtccatcagatccaccatcgtgtttccagcctcctgcaggaagccaagacccaggctgcactggtgctggactgcttggagacccggcaggagtgacggtgcgggaggcctctccgggctctgtggcccctccctcgcccatccccagagggcagagctgtgacctcggtggggacacagcttgttcgtgtggggcccggagggtaggtgggcaggcagcggggcatcgcctgggaatggaggcgctggcagggacagaaggcccctagtcccatgtgacctccagtaaagttttggcaccaaacctgtgttgtgtgttggcggttttgggggcagggctgagagctgagctgcgggtcttggggcaggagcaggacatatggtcagtggcccatgggagccagggttggagggaatggggttgcagcgtgaggagacagacctcagcgccagggtccccagacacccagtgcagcccacagtgggcagggtcacaggtattcagaggacctggggttcagtgcaggtccctgggctgtgaggccccttgtctgagggaaaggggccctggttctgtgcatgggacagaaaccccagggacagcaggaccttcgacgctggaaggatagcctcgcttcccaggtgcagctcccggcaggtctggacagttccacagagcacggtactggccctgtcctcagttcccgtccacccttcaaccagtggctcctgggagacttttcctccctgcctcagctccctgcccagccagcctcctgtctccagagaagttctccattaaaaaataatttagcaaatcactatactctcaaattacttctagatggactattacatgtgacagatgatgtatgaatgtatttgttagtcagcactgcaggatattaaaaagaagattactgtgtccttgagtgaagcagaaaactcaaatgccttattggagagatttcccattctgaaaatagaacatacttgttcatgaaaaaagatgtcatcatccaagacaaatgacaagaatcctacagggagaaaaaacacccaaggtgtgtgtgggtacagggccatcatcactcagcatgaaaggttcctacatatccggccggcagggggtgacagggagggggtgccggggaggggagactgggagggaatgctgggagggaatgctgggaggggaggctgggagggaacgctggggaggggaggctggggaggggaggctgggagggaacgctggggaggggaggctgggaggggaggctgggagggaacgctggggaggggaggctgggagggaatgctggggaggggaggctgggaggggagtctgggaggggagactggggaggggactcaggagggaaggctgggaggggacattggtgaggggacattggtgttggggatggtgaggggacatttgtgaggggacattggtgttgggacggtgagggggcattggtgttgggaccatgaggggacattgtgaggggacattggtgttaggaccgtgagggaacatttgtgtggggacattggtgttgggacaatgaaggggacatttgtgaggggacactggtgttgggaccatgaggggacattggtgttaggaccatgaggggacatttgtgaggggacattgatgttaggaccgtgagggaggagacatttgtgaggggacattggtgttgggaccatgaggggacatttgaggggacattggtgttgggaccatgaggggacatttgtgagggatgctggtgaggggatgctggtgtggtgtaattggtgaagggccaatggtgagcggcagttgctgggtggagctgtgggtagagcctgtaggtagctggaagtcccttccagtgggactgacgttcctgccctgcagggtccgaggctgcacacgtgggagctggcacgagagaggggagcgccctctccctgcagaggccctgggcagctcctgtgtagctcctgtgggtggagcctgtgcacctgcaggggcctctgcctccctccacctgcgggacccgcggtgttcacctggagcacagagatctgagggctgacactcagggcgcaggggcttagcaaaacaggcgggcctcttctgcatctcctgctggcatttgcgtagtttttttgtgggatgggaaaaggaggaaaggaagagaaaataactgacgtactcccctggagctgcaggctgtgtggtcagatgacagagcggtggagtatgaagaaaagagtgagtcttttcaaaggacaacaaagtttcagggtatccagagtgaactgcatttccccagtttcacatgttgactcctgaccctgaccctcaccctaaacctgaccctcaccctcaccctcaccctcaccctgaccctaaacctgaccctcaccctgaccctcaccctgaccctaaacctgaccctcaccctgaccctcaccctgaccctgaccctgaccctaaacctgaccctcaccctaaacctgaccctcaccctcaccctgaccctaaacctgaccctcaccctgaccctaaacctgaccctcaccctgaccctaaacctgaccctcaccctgaccctaaacctgaccctcaccctgaccctaaacctgaccctcaccctgaccctgaccctgaccctaaacctgaccctgaccctaaacctgaccctgaccctgaccctgaccctaaatctgaccctgactcctgacccctacccccaaccccaaccccaaccccaaccccaacccctaaccctaagccccagacctctggatgtgaccttgtttggaaatggggtccttgcagatgcagtgagctcaggtgagatcatcctggagcagggtgagcttggtccagtgtgacttgggtgaggttatcttggaataggctgagtcctggtccagtgtgactccagtgaggtcatcctagagcaggctgagccttggtccactgtgactctggtgagctcatcctagaataggctgagccctggtccagtgtgactcgggtgagctcatcccggaataggctgagccctggtccagtgtgactcgggtgagctcatcccggaataggctgagccctggtccagtgtgactcgggtgagctcatcctagaataggctgagccctggtccagtgtgactcgggtgagctcatcccggaataggctgagccctggtccagtgtgactcgggtgagcttatcccaggataggctgatctctggtccagtgtctcgggtaagctcaccttagagcaggctgagcctggtccagtgtgacttaggtgaggtattctagagcaggctgagccccagtccagtgtggtgacttgtatccttatccaggagatcaggaaccctgggatgctggggagaggccggggcaggcccttctctagtcctcctctagccctccagaggaagcatggcccggctgatgcctccaggcctgtggccgatactggtagttgttcaagctgtgtctgtggtgccctgtgatggccaccaagcccactcctgtcaggtcagcacctgcctgtggagcctctggttcactgtggggctcctgagctgagcctgaaggaccctggggtctgaacagcaaaaactcactgagatctccacacagaacacaacaggctcagcacctgctgtctccccgtctagtgttaatcatgcgtccacccacagaagaccctcagccatggtgacacttcttagagcactttgggcctggctggggctggagggagagtttgctgatcaaggctgtggggtctgcacaggcggggtcagccagcacctgcagttgatgtcctaggaggtcagggctgggcccgggggagccattgaccctggtgggcgagcgacagctgcagtgtttccctcctggccacaagacacctttgaggtctctcctgcgcacagaagctcgcaagcaggcacgcaatgggttcaaagcctttattgggtcagggcttgctccagagctcaggggccaggtaggtcaggagccttgggatggctgcagggggagggaggccgggcagcctgcggagggcctggggagacctggggctgggcgggggccggggctacggggaccccgtgggaggagctggaraggygcrggcccagggcgtcgtccgagtgagcagcggtgctggccgtgtgggacccsggccygcttmgcaccatggacrgggtgggctcacgaccctcgactgcggggcccgggcggcggcgctagcagatccagcggakgaagcggtcgaagaagcygggttgygccaggctgtcatagtccttctcgtggaacacggyggcrcggtcacccaggctgagcgtggtgagcacgtccatgtccacgtcgctgcccaaggccagcacggtgggtaccacgttctgcttgcgcatggagtgcgccgactcgtgcagactgtcgttgcccgtgacgccgtccgtgaggaacacgaaggacagctctgcgtgcctccgggcccygccacgcgggctgcgcacgatggcattgatggcgtgcaccacgcctgcgcccacgtgcgagaaggagttcaggtattgygtggtctccagcgcctcgtggatggcmgtgaggttgtggctcagcgggaaggccacctgctgctcgccggggccaccaaactgcagcagcgccacgcgtgcgttgagagggtcgtcgtccctcygggccagygtcagccgccgcgccacctgctccacgaagcgccgggccttgtggaagttctgctcacccagccgctcggagccgtccagcaggaagacgatgtccacgggccgctgcgtgcactgtgccacggacagctctgtggggagacgcaggtgcgggctgggcggaggrgaggtgggcaggaccgggcaggtgccagccccgcacctgtgcccttccattcgcaccctgcctgcaacctcacagaccactgggctctgcgggggcgtttctgcagggcagccctgggtgtgggtccttagcccaaracactttcaggcggcactgctgggagccgccrtctcctctgctggtgctcccaggcctgagaccctgacacaggccccaggccctgtccacctgctgagcaccatccctgcacaggctgccctcctgggagggaaggggcccaaagcatcctttcatggctcaagaatttgctgcccacaaaagggccactgtctgtgtagtgtgggaggtacttaaggaggaccctggctctgacacccccagcctgacccctcaatcgctgggtcccagagctgctcagaacacctagagctggctgggccacgtccctcccggaaagaccaggagcccctgactcttctgattggccatggtggggagcagtgggcacaggggcagccagaccttctgtggcagcccaggtgggttctgccctatgactctgttaccaagtggggcccccacctgcctgggtggtcaccagccctgggcatcggggacagcttgggggcctggccatagccacaacccaggccaggctgcctaccacaygtgtgggtgtcacgtggggccagagaccacaggacaggacacggacagtccttgcgtggacctggccctgtggcctcaccaagacctcagctcctgggatgggggaggggagggacagagccagtttccccaagggtgtctgcttctcagcccaacccctggacgtcgtcacagctggtacatggacccccaggaatgcacacagaggaccctgacccgaaactcggtttctsggggccctggaggtgcaayggtccagccccgcaggcagtgagcaaagctctgaacacagcagggtgacctcacgctgcaccrcagccttcacagaacgcttgagacatggacgccgtctgagcacrcacgagctggcagatggggttccctcagtgagcttatgagtgacgcagctyattcagtgaaaggaagggcagcctccctgttaaggccacacctaggaaccggcttaaatgtccagaaactcctcaggtaccgctgggcttcccaaaccccctcaaaactaataacattttcactgctgtcaccaaacatatggagacagacatgcaaggggcagctggttttgggggtctctgtccattcatcagtgtctgtggggcctggaggagacggggaagctgtgggggccggccaggcacagggaggctgaggctgttgggatgtctgtggactctgctctcctcctcctgtggaggatccttcatccccacagtgggaagaccagcctggcctgccctgtgcagtgggtgtggggacgagaacctggccctgagaaatggtcacagccgtgcccggcaggagcccagcctggatgagggctcctgcagtcagaacgtcggggtcagctcgccgtgggggccgctccctttggatggtgatccctgccgctccccaacattgtggaccctgggattctctgctcagtcctctgaggaccgcagaggttgtgcctggtggatgctcccccgactgtgcttttggagacccagaggttgggctggaagggtgcagacaccccgggatcagggctgctggcaggcagctgtggccattcgccctactgtgcatgacaccagcccagatacgtcatggtgccaggactgccagcttcccccaggactatctgctgcccaaccggaagccttcacctgccaccaggtgggccgtgagcgcccacgagtcaccatgcacgggattagtgcccacacccagcgaggctcaccagcctctggggcctgtttccgaggctccgctggaacctggtgctggaacatcctccagcacctgggcagcaccctccctcagccccatcccagacgcacggcagcccagctgggccgctaagtaagggcctccaaagacttccacacccaaaccctggagcctgtgagggtgacctgatgcagcaaagaaggactctgcagacgggagtgagttaagggtcttgcgaggtcattctggacttggggtgggccttaaattcaatgaccagggttcttataaagagagcggccacwggaagacggaggagaractggaagatgcagccgcagcaagggacacggtggccaccagcrtgggaagaggctgggagctgccccagagcccctggaaggacygtagccccgctgacccsgattccagatctctggcctccactgagagccagcctgtcgggggcagccctgggaagctagtgtggcagggagggcccagcccggctgggcgggtgcccgggctttagcagagggccagcgcggtctcggggtcccccacgatgtccctgtgcaccagcttaaaggtgtcaatgaacagctccatccagtcctgccgctctaccccggtggcgaacttggcccgctcggcggtgtagaccagcacggccaccagctgggagtaggcggccgggtcctgcgtgagctccgtggcgtttagcaactgttggatcaggggaatggtcctggggaaggtggcgtccggcccctcttccgtgcggaggaaggtgaccgggggctcgccgccaggccacggtgcatctgcaagggagcgtccagagaagactgtaaggcctgcggtgggcgtcggcctagagctcctcctcgggcagccgctcagcgaggccagagtgaagagcggcatttgggctggcgagtcggtagaggaaatgcaggtggagcgggtgtgtggctcggccttggcaggaggcgtgggggcagtgagcacagggacaggaagctggcagggagctaggagacccgcacggtggcacctttgggggacaccacggaccccgagaaaacctttcagcacaaaacagctccgtccaaacctgtgccggagacaggccaaactccagtagggcttccagtgccgcaggcccgtcgccaggaagaccccagccacccctcaagagcccgcctgagaaagcttgcggtggtaaacccttcctcagcctctctgggatgtgagtcctctacacccagaactgtcttcccctgagcagacctggcctctgcaacgtctctgccttttctttccaccgactggagctcaggttacgctgtggcccctatgcagctcttatcgctgaktgcgccctgccctgactgccttcagctgcgtctggtttgtttctccagcaccctctggtccccacgcaactgagaactccacaggcctgctgcaggcccagggtggctgggctttggggtggacagggctgtctggagaaggccagggccaggccagggccaggccacagccagtggtgtccacccagtgcccaggagggccgaggaggatgcctggctgtgtgggctggtgaaagccgatttaacactgtccctgctgcatctcctggagccacaaggtcgagttcactttgaaattggaaacagctgggaaggaggatgagctctgagtgtcggggatgaggtgtcagggcggccgagaggaggggaggggttctgccagggctgctcccactcactgtcaggtcctggaggcctcagaagaggccagagcttcaagggcctccgtgtcctccctggctgctttccctgtggtgctctggtggcctgagtgacccactcccaggagggagaatgggctcactccatgtcaccgtctggggaggagccaccacgggaccctacgaggcccacgtcaccctgaggccagaaccagagagatcacgagaaaagaaaagtgcaggctgatgtcgccgataagcgcaaaccctcaggcaggcatcagcgaatcagggcccacgtgcataaacagggccacacaccacggccaggtgggtttatcccgggcacgcagggctggctcaacactggaaattcaatgacgctcaacgggctaactaactcccaactacratgataggctaaagaggaaaggtcacgtgacatccacagacgcagcacccacccactcacgatagaacctggagtggaggggaagccatagcggccactcacactggacccrgagtggagaggaaggccccccacctgatagcaaagcacccacagtgaccatcgccatgtcgcccatcatggggtcccgagacttccctgccccatcaggaacgagggggtgggtggaggagccaaggtctggttcctgccctcagggtccaggtgcccctgctgctgatgtggaccctgggggaggacgcctgcaccttggcggcagaagcacagcccactgttgtggggccagaggctgcccgcctgctgaagggcagccagacccaggtgcaagccctaggttctctgtcgcagcacgtatggggaacctcggctctgagtccacggytcctcccctggggcagcctcagggcctgtgaatgtgctcagtggcccagctcacccaccgggagctccccatggaacgcccgaacgcacaccgcgacccgcgtgctgaggaagcgctgacttcgtaccgcagaccctgaggtttcctccctgtggtcctccaggtcggaccctcccaccctgtctccatggcatcccyaccctcacactcctggaggggacggctcactgagggggactcagctcmtaacgcccccggggacctcctgtgggcccaggtacggtgcagcagtgcaccatgggggcagcaccacgtccagcagagcctggacggcacccccagctccagcttcacacccacgtgggccacatccgggacatgggctcccccactcccagagatgagagccgcagctgcagctccgaggcaggccagggttggagcaagacctgctggtgctggggggtgtcagtgcttccaccccgggatggtttcactcmctgaatccagggcttcctccgagtggcacatgcacggccagcccatgggagctgggcggcagctgagggagactgcaaggcccatggtgggccttcaagaccagtggccacatgccgagcacagcgccaggctagcagcacccacctcatggcctcgtgatgctgttcctgcgttcctgggagcctgccttccccaagcccctcctcccctgtgctgccatcctggggccatctccctaaggagcagcctccgcagtggctccgccgccccccgggtccctgcacggcccctcccccagcccggccctcgaggaggaaggacaccagggctgctttgctagtctggggtggtggctcagggtgccctgcattacctgtttggcagggaaggtctgggcacacgatctgagggtctggaagagaggagagaggccgggccaggccagggtcagtcyctagcgaaccctcagcggccgttcactgatctgcctagacaggctcagggtgcagctggcctctgccctgcagccccgagagggcccgaccccttcccacccacagcccaakatcctgggctgcacattcrtccctcaggtgaggggtgtccctggggctcacgctagrcagcrgctggggcctgctgctcctcggccgactgccccgcgcccacacgctcacccgggcagaggacgtcctccatgtcatcgatgaacttctcagcgaccaggtcggagaacagcgtcatgttgcgcacctgctgtggcttgtcgcaggcgatggagtagaggttttcactctcgtgcttctcgtggaacatgtccccgatgccgatggccgtcactgtgacgtcgcgrtcgcacagcgcccgcaagttgaggtcrtcgtcccgagggtcgtggcgcccgtccgtgatgacyaccgcaaacacacgtgtcttytgscgccggctctccttgatgaggcggtcgtaggcaaacttgagggctgagggtgtccaggtgccrccygcaatccactcgaggttcttgacagcctccttgaagctcgacagggagtcgataygttcgtcgtccagctggatggcctcaaaggtgccctcgtggctgtactgcaccacgcccacacgcgtccctgcaagccgcacgcgtgaggtsgttgccagaggcctcggggtctggggcatccccagccatgcagaggccctcgttggagggacgcgtctggacttctcccatctcatcgcctcccacgccccgcccggccccccgcaatgctgcacccgcccctgccccgctgacctgtctcggacttggggtccttagcgatggcacccagcctgttgaccacgttgatgacgaagttcttctccagtgtgaagttggtgtacccaatgctctcggagctgtcgatgacgaagaccacgtccagggcgccacagcgcttctcacagtctgggggggtggcagggtcatcggggggtaccrgggagacctcagaccctagggtcacgtgcacatgcrggacccagcgatgacccagccytgctgcactcccgccctccacccggtgcatgggccccgaccctgccgtgggcagtgcctcaccgcagcacccgcaggtctccctcacgtaggtcatgacgtcacactcctgcaatgcacacggcaggcagggyagtccccccggggccccagaagagtttccacagcaaggtcctggcctgggggtcccgggacattccagcccacgtgtggaggcagccatgcggggaggctggcgggtcctgtccctaccaacctcgctgccacyctcctccccccaccaaccttgccctgtgaccttccccaaccaagcttgctctctgaccttgccctctgacctcctccactgatcttgctctctgaccgtgccagctgaccttcccccacccctgctgctcttggtgtctagttttggcaggagaaggacactggttctgccccatgtgacacytaccgtgagaccggggtctccaggggggccgggctcaccctggggaaggaaggatgaggctgagactcyggggccaaggctgggtggctgagtctctcccaggccactgcycactgatacgtgggtccacygtgggcagaaccacgaggcttgggtgtgtgttggcctggcaggtyggggggagggcatggggactggccaccaacctacctcgggtcctgggactcctcttggcccccgagggcctggctcaccagggggaccaggatccgcctgagaaggaacaagaacaggtgsgcttcagtggccmcagggacagtccctgcacacagcagggccccctgtgctgtccccaaccacgggtcctcccttggcggggggggrgctaacaggtgcaaggagtaagacaaggctgtgcctcctccttccctatgcyggcaccagagctrgaaaggccatgagtggccaccgtcagagcctggcccaccagaggggtaggggcctggcagagctgggtgtcccagaaatrgcagccaaaacagctcattccaatccatgggtattccaccccattatcatgtacccaccaactccacgcccacccatccacccattcgcccattcgcccaatcacccatccatctatccacccagccacccactaacccatccatccatccacccagtcacccatccatcatccatccacccagccacccactaacccatccattcatccacccatcctctgtccacccacccatctatctatccactcacttacccatctatccatccacccacccactcacctgtccgtccatcctctacccacccacccattcatccatcggtccatccgttcactcatccatccacccactgtccgtctgtccatccactcattcacctaaccatccatccacccacctacccatccccccactcactcacatacccatctatccactcatccacccatcacctacccaaccatccatcctctatccacccacccatccatctatccactgactcacccatccatccatctgccaacccactaactcattcatccatccatcctttatgcacccatccattcatccacccacccactaacccatccatacatacacccactcacccatccatccccccactcatccattcagccatccatcatctaaccacacactcgcccacccacccatccatctacccacctacccacctactcacccatacatctactcattcacccatgtatccacttatccatccacccacccactcatccagcaatccatccattcatccatcttctatccacccactcttctattcactcatccatccatcacccatcctcccatccatccatttgcccacccccatccacttgcccatccatccatcgttatccatcccttgttttgtgctcagttccagaccaacctgcagccctggttaaacccttggccaggctagggatttggaggcacagagcaccttctgggggataactgtggggaggacattggggagggaacccttggggaatgctgtgtgtaggaactctgagggggatgctatgtggaggcatcttttgggggaggggactctggaggggatgctatgttggggtcgctggggaggggaccctggtgggggatgctgtagtggggatgctgggaggggactctggggggatgttgtggaggggtcactagggaggggacccttgtgggggatgctgtgggggggatgttggggggtcactggggaggggacgctggaagggaggctgggttgagggagggggcccctgagccagccgttccctttaggaaggtgggggtggtgctcatggctggggccaagctgcctggcgttctcctgtactcatagatgcacacgctcagcctcagggcccctccctgcctctgcccagctgctgtgggcttcgggacggygacactcacaggctctcctttctctcctttcctcccaggttctcctttcaagccaaagtcgcctcggcctccctgtgacagrgaacacatgttagcctgggacagaggagctgtctctaccagggacaccagtgagatttttatgtggaaaaatcgatctggcattttggggtcctttaaacgggagcatctatgtggtttttttggcaaagcctgaactttggttgraaagggaycagccagtggctgacagctcccccagagctcagcataggtgacatggctgggccttggggagccaggaccatctcaagacaggggtggtcctgtcagtgacggtgggcattgtgttcccagcaattgggcgtgcagacccccaccctgggtgggcacaggtggccaggacccacacatacctcggggccgcgtgggccgggctcgcctttttctccctgtgaagcaaacagaagccagggtgactcarcctcagatcccagtgctccttcctccctctgggcagctttctgcagccccgtttccctccctcgctcattcacactctgggtgaggccactgtgctgcgttctgagctgtgctcttttcctgatgctgggctggacctatccttcactgagtcacccraagccttctcaccactctgtcccgcaggagggacctcacactttcttctgcacagaggaggccttgagggaactactaggaatcttcagggcccttgggacaatgtccacccactcctgggagctgccatcccaggctgtgactcacgggtgctcctcggggtcctgggtagctgaatccaggcctgccggggtctccctggaggaggacgttgagtcggtcagcatggtcatrggacggggtggggctggggggctgtgctcaacagggcgcaaggtgcacactggggtggaagtgggctaggggtgccgtcgagttctggctgtgagcagaggcctggcagggccaacctcgccctgtccacctccagtgggggctggacgtgcctagagacccgaagcctgcccacacgcggggaggaccctactcaggccacgtagctgccctcaggccctgcctcaggaaggatgtgccaygcacacccaagggtcactgctgaagaggagagccaggggggcttcctggaccccggaggcatcccctcactccagagctgagaacaggaggcacaggcccgtcctgaggcacgtctgccggcaacagggtcccccaggccggccccctgtcctgctcctcaggcagctgccccgaacccctaatacgtccygctgggggaggggcacgtaccttggggcctggctgtcctgagtctccacggggtcctgcatcaccggggtctcccygagatccctgagggcaggagagaaattcagaagtcagcacaggcagggactggccatgcccaggggtcacctgacatgccccgtccagccctgaccaccaggccacatggccgcagctcctcctgctgcctgtgggggccgtggacctctgtcttgagggtcccagctcctcctytccctgtggcccatccaggacctcaggcccactgccttgcccctgactccacaacctgggtccttcagggcaggatggggggctggggctgagggtgggtatgaggtactcggggtctaggggagcaggtcctggcttctgaggccaggctctgctgcctgggtttgctatggggacagtggctagctccaggctgtccccacatggataggggagacccacccgtggggtcagagggcaccggcctcctgcactgacactgacctgctttccgggctccccaagagctccctgggggcctctgggtccaggcaagcctcggtctccctggaagaaaggggaggaatttggggttctcttgactgacagcagcaccctggagtccccagtatcaatcctgtggacactgcagggcctcgggggtaagacrggtctggccccggcccctatgaccctcccsggaggctgtggctccacttgaccttcagccctgagcacactgagtggagtaggctgggttctgggtgtagcccctgcctaagcamccctatcttgggttgcagccctcacctgggtyccctactttggggtgcagcccttgccttggtcccttaccttggggtgcagcacccgcctgggtcccctaccttgaggtatagccctcacctgggccccccttaccttggggtgcagcacccacccgggtcccctaccttggggtgcagtccyggccaccctaccttggggtgcagcccccctgcaccccctcagatcccctaccttggggtgcggcccaccctgctcccctaccttggctcctttgttgccaacctctccagccaggccgcggggcccctcagggccagggtccccctgtgggragggaagggaggccccacgggtctcagctgaggcctccggcctgggtcccatgtgagaggcgggtgtggccgggggttggggaagggggcctgggaggaagaaccccgtctgtcccgggggacctgcaacagtcgcctgtttcacccatagctccttcccggtgcctgtagctgccgctctgagcacggggtctctcggtccccctgaggccacccacacatgggtaggacctcrtccacttcctgggaggaagccccttcacctgatgtcaaggggagctggtggccggggttttaccacacagcccttcagcatcacccctgaggtcacgtgggtgagcaatgcctcagtgggctgggggtaagaggtgtagcgggggtgtgagcggtgcctagtgggggctggggggtgagcggtacctcagtgggggccggggggtgtgagtggtgcctcagtgggccgggggtgaatggtgcctgcacagctgtgcggggtgtgcctgggtgggtagtggagcttcctcagcagagaatggggtgtggggatctcagggctgcattcccagactctgcagagagtgaackctggagagtgaggccctggggttctgttgttctctgggaggaatggggttggggccctcgtcagcagggcccatgggcaccacagtgagacccygggctgcctccacacgaggactcaccttctcccccttggggccatcgctgcctgggctgcccttggtgccggggtctcccctgcgcccctgcagagaacaggcgtgtgggtgagggagggggctgagtccaagcccagagcctgtggagggtgggggctgtgccggggccgatgctccttctctacaggagggctctggctttgggacctgggacctcgatccccaggctccttcccaacagcctcagcctgcgccagtggctctgctgccagccctcgtccctctgctgcgtcggtcccgcccatgccgaggatttaggaatgatctggggaggctccaggtggagttggatgtctggtgagtggcgttttaggtgatgggctggggcctggtggggacctggtgctgtccagtcactgcggtcactcccaggcaggccccatgctcagacagagtccccttggagtggtcagcactgggacgggccctgctcagccctcacaggatgccctgggcagctggtgctgggtttagggaacaccatggaggacctgcctgggctttacctctaagtccagctctggggggtcccgtggggtggtccgggtccacttcttgggaggatgggggcctggctgtgccttgccagcaggggatcctgcctacagcccaggtgcccttcccccatggtcctcctcaagctgcaaggaggatgcccagagcrgggccctgaggcaggggcaggagggactcaccggctcgcctttgggtccrcggggcccaggcccgcccttggctcctttcacaccaggacttcctggggctccaytgttgccttgatacccctgaagaaggagaggacagcacagtcacccagaggcaggggccctgaggcatggtcacgcctgtgcggtgtgtggtgtggagcccctattatcttccagcggaatctgcttgccaggcacatgggggccctgcagggtcccctggaacttgttcagcctcgtgaggagggcacaggtcagaggggctggtggctcagggcacatggcctgttcttcctgtccctccccgtgtccccagagcccaatgcggcamcatggtgacagcagagatggtggccagcgtgactgttcatctgggccatgggcgtgagtgtggccagctcagctgcaggcgaagaggcagaggggctcaccttgcttcccttggccccgatttctcccgggggccctctgcgtcctgggcggccagggtccccctggaagggtttgcagaatcagcctcacgtcttttggcaggggaaggggggtgcasgatgcccgctgcgggggcaggacccacggtcgggcttgggactgcacctccctgatgtccacggggcacctgggatgccagatgctggctgggggctgctggaacctccgtgccagctgagggcagagtgtgtgtcacgggcaggayrcctgtgcatctgcwcagaggactcagccagacttgggcttgggctgagggaaggtggacagaaagtgggaagccytaagtccaagctcccagaaaaaagcccttggggatcctggggccgccaggggcggggcgacactgcaggcggcccaggagggcagagcccctggggcaccaacgttcccatggggagctccaggaggtgtgggtggggctccctggggctccacctgggaggaggtgggtttgttgctgaggcctcggtgagcagcggtggggccgcccaagccctggttagaagctgatgaagcaacgggcagggcaccctccaccacatcccacggccattggctcctcactgaccagtgtttccagaaaggycctctctgctcagcttctcagctggggctgcctccaggaggcccctggaagctggtgacccygcctgccccrtaccctgacaaggccacttaccttgccgccttggtctcctcgctcccctggactccctgcttcccccgggtaaccgtcggggccctgagagaggagtgagaggtggagctcggcacacggcgggtggggttctccccatgagccagggcccaagtgctccattgtcccagcccgggacgcacctcccaccctcactgtgaggccccaggctcagtgaccaagaggccaggcctggatctgctgctcagggaaatggagctgtccagtgacaccgaagtttgggatgcatcaggtctccaggccacggggatcygccaggagctcccagggggagttcctcacatgactccgacccggcagaatgctgggctggggctgctgggctggggctgctgggctgccgggagaacccaygctcccactgcagcagcaactaccctcccacccggtcaggcacccacaccccctgggccgaggctgaaggaggggtgcaaacggcccttacccggtttccagggtctcccttgcagccaggaggtccgatgcgccccagcttgccctgaaggagaagggggcaggaggagtctcagggcggggttctggggtccatgtgtgccaacgaccaagacacagcccacccggttctgccccgcagggctgcagcgctctcctcctggcacacgggtgcccacatgaggccacggctgctgtggagctgtctccggggaggcagagtggccgttgtgcaggaacaggccatccctggctgcctcccagaggccctgagggcagagctccctgggcacagaggatgttcccacggggagccatggaaggagtgggtggggctgtcctgtggtttgacctgggagtgggtaggcttgttgctggcctctgtgtgcagctgtggagctgccccaagccgggatgtgcagccatgaattagatgcaggctggtgaagccctgggtggggcagtgggatgtggcaggagctgaagttcgtgtgtgtgtgtgtgtgtgtgtgtgtgtgtgtgtatgcgtgtgtacacatgtgtaagctgacagatcaggctggatctgggggccctgcagaggctgggatgcctctgtgagaccagtccagctgtgagcccgaggctccctctaccttctgtccatcggtcccgttcttgccagccaggccaggggccccctgaagagagaaggaagagggaactccattagccccggtccttctgccctgagcagcaggaaggaggggctctgcctacccagccagcctaccttgcgaccgtcggctccaaattcaccctgtgtaggaggaaagccrgcgcagtgagctcggtgcctcaaagcatcatgggcactgctgcctctggggggcaaagcccttgggccaaactcaaggccacaggaccccccaggagcccccaaagccaccactgagaaaagaccaggccggtgccccaggagcagtgacaggctgcggcggacgccaagaggtgggtctgggccgaggctggcgcaggtctgaggtctgtcagggcaagagcctcaccttctctcctttgaagccaggaacgccctgggggcaggaggagagaggggcattagtgaggagctctgcagagacacaggcagggaagggccagccctgcaggctgagrggagtgctcggtgggccgctggcatctartgttctcgacaaayagtctgcggaggaggctgagccctgggtcgggctggaggctgggttttgggacggccatcaagttatcgaggtgcttctgttccttggtaactggggggagggtcgtagaggctgaggccgaggctgggctggggggagcctgcctggcagtgctggggcctcagggtggagccaagcccctggccgaggtcactcaccttgggtcctgggaatccaatggggccttcgatgcccgggtctccctgtgaaggacaacgcagcagtgtgagcccagccctggggcgctgggctgcaggcggggcgggcgtggggcaaggacactcacctgtcttcccttctggccaggctytcccggctcacccatgttgcccttggcaccctaaaagcagagaaaagagtacatcgaggyagggtagggtgggcggtaggcagctggggaccctgccacagctcctctgagaggtgacacagcagaggttactgattcccctgcccaagtggagaagtcttggtgtcagctgctccccaaagggccagcctctgtcagacaagggtttgctttgacccatttctcccagctctgagggaagcttcccacaaagccacctgcaaaatggagccagaagagmcccctggggtgggggtgcctggcccgtgggggtcccttctgcacccagtagctgtgactgtggccaacactgggctctgattctccagcgatgcctgggtcaccgtcactacaaagattaattcctttatctaagtaactttagacagatcaggacttcagaacaccacataaaggttacactctcttggaattaaaattttaacctatgatacagaactttattaaataaattcatctatttattgatatgctcccaatttaagtgcaaagaggagcagaggaaagrggaagaattaagaggtcaaaaggaagaaaagggaggaaactcagggcaggggatgaggtgggcagaggcttctggaacatcacagctgtgccctgtcctgggctccgcttggcaccttgccacccctcaaactctaaccacagtgatccctgtggcagcttccagtggcccccccaacagaacgggtcactgcactgctgtgtgcagccaaggctgccccaagtggcaaattcattcccagctgtagtagggtcggcattgccaccaggactggagaagccagggagggagatggcaggatttgacctgcagcctcgagatgtctcatcctggagaaagtacatccagatacctactggtctagacagctgttatccaaatttagaaaaacacgaagctacgtagcagtaacatcctctatgatggtcaattccttatttcatctccttagaagctactttctcctcctatgcttttctttataatttttaacagatgtgaattgttggagtttcacatactctgttagtgagttttggaaggactttatttgatgcacctctgttaggaaaatgcaggggatgttcaaaccagaaaatgcaggggacattcaaaccaggctccctaaaactgcttatttagtaagccacaaaagaggttccttcatattaatgagcaatcatattattaagtgtagtgcatctcacattttacttacttgaatatgcttgcttaccaaagtattttaatggcatatctcattttttacaagcttctgcttttctcaatatactatttaaaaggaattagacatatagagttttagtttctccagggacagaagtgttgagacaatttgagatacagctggccttaaatgtggctttcttttcttttttttttttttttgagacagagtcttactctgttgcccaggctggagtgcagtggcgtgatctctgctcactgcaacctccgcttcccaggttcaagcgattctcctgcctcagcctcccgagtagctgggactacaggcgcatgccactacgcccggctaatttttgtatttttagtagagacagggtttcaccatgttagccaggatggtctcgatctcctgacgttgtgatccgcccgcctcggcctcccaaagtgctgggattacaggtatgagccaccacgcccggccaagtgtggatttcaaaacaaatcaggggcttcctggtagcgcagaccctgcaggtaatctgggcatcttaccttctgtccacggtagcccttggggccagagggcccagggatttccaggcagctcaccttgtagcactgaaacgaggaagcagagacagaaggttgcatgggtgggacattcctcaggtggcagggcagggtctcagaacgtgtagcccacgactctcagcaggggccaaggagatgctgaaatgccctgagaacctgggcgggcgtgagggagctgtgagacatggggtgctgtgaggctctgcccccatcagggacaagccaaagagtttggctctcggtcaggtgttctaggcaagtttaaaaaaccaagcctggcttaagccatgacagaaaatagaagggaagaaaggccgggtgcagctcacgcctggaatcccaacattttggtaggccgaggcagggaggactgcttgaggccaggagttagagaccaggctgggcaacatagtgagatcccatctctacaaaaaaacaatacgaaagcgatcctcccacctcagcctcccaagtagctggaactacatgcgcacaccaggtatggtggcaggtgcctgtagtcccagctacttgggaggctgaggtgggaggatggcttgagcctcagagttcaaggctgcagtgagccgtgatcgtaccactgcactccagcctaggtgacagagaaagaccctgtctctaaaaaaacaaatataaaagaataaattttacaaaaggatggaagagcaaggggcactggtgagggaggcaccatttgtacayggcaatgaaaccactgttactgagcagcgattctgaggcagggcacgtttttgcaggaagcctcacgggggagatctcagatgcctgctccccttcctgagagctggagctgggacacacagggaggtggggatgtcatggaccccgatgatgtcagttccttctcccctgacctgctgggctgggctcgggcctcgagtccagggtggatggatcccacctgcccggaggccagaccctcgacctctccttgtaacacgtgctctgtgggtgaccctaacgctgaccctcacgggatctaaacagcctagctttggctgggagccctttctccagactccaaggcctcaggtccaacatggagcaggtgactccctctcctctcatctgttccagcctggaggcgccaggagtcggcagcctggcgcggtcatctctgctgggtcagctgccggccagcactggcaggaagggaagcgccactcacctctccgtaggcttcgtgtttctgcagaaaagacagacatgctggttagccgtgtgcctcgagacctggggcggctgcacctcgagtctgggtggggatggagggacacctgagtggcccaggccctgcccggagcttcctccttcggcctccgcactcacagaggggtaaagtgaggcccggagygggtggacrgcccaccrtggccacccctggcgygtggacggtgctcccgcccrcggctcaccatgaccttgatgatgcggttgatggtgtcctggtygatctcggtggagtcrggcagcatggtggcgtagtcgttgcggtagagctcgtgcggcgtgctggcgatgtcccgcaggccctgctccttcaggttctggttgggggccacggcgaagagccggatgccctcctcgcgggcccgctcggcctgcagcttgatgcccccgcaggggctgccggtgacgtggccgtcggtgatgaccacggcgaagtggacggtgcccttgctgcggtcctgccggatctgctccgtcatgttggccagcgcgcagtcggtgaaggtgccgcggcggaaggagctgatgccctgcaggttcttgatgaaggaggcccggtcgctgcccggtgggctgaacacctccacctggtcagagaagtgcaggccgccrtagcgccagctcagcgccacctggtccaggtagaactcgttctgcagctggctgatgaactgcggcacgaactgcttcatgtggaagagcaggatgtccgtgggggactgcatggtgacgctctccgaggtgtccagcacgaagtacacgtggatggggcagtcggtcttctctgtggggcacaggacctgtcacgagccagcctyaggagggactgctgttggagccccgtttcctggccccgtgcctgtttgtgggtttgacctcactgcccccgaatgccagagcccccggcccccaacccctggcacctgggtactggtcccaactgccccccaaatgcccagagcccccggcccccgacccctggcacctgggtactggtcccaactgccccccaaatgcccagagcccccggcccccgacccctggcacctgggtactggtcccaactgccccccaaatgcccagagcccccggcccccgacccctggcacctgggcagttgttgtttctctcggtagtgtccggcgagatgacctcctgctgctgggcctggatggcccccaggattccccagagcaggagcacggagcaggtgccctggagcatcttggcagcacctgtggccctgaagtcctgcaacaggggtgggggtcgctcagacacccccagtgcctctcccctggcaccctcccccatggcaggcgcacgcacagcaggtcagyrggattgggggcactgccstcagtcttcaaggaagcggggtctgygcccagcacacaccrtcaccagcatctggactggggggcttgcgccctcttgccccaccctgggtggggtcacagatgtttagtgggtgcctctgggctcagttttggktgggatttggatggttgaggcccttccatgtcctccagggctgggtggagtgggtagctgggcgcgtcggcatggaagggaatggagcaccactgtctggygccccccactgcctggggctgccctggaarcagtgcagaggggagggcgggagagagatcccagcttccccagaccggctcccctgcagagctaggcactctctctccagcctggctccattccctttaaacaggactttgataaggagggagggaggactctgtcaagtgtagggacacagccgtcattagcctggctttcctttctgttgggtgccaggaccctggggcaaacagatccagcccttgaacgtccatcctccctgatgccctgtggcttggcctaagctccagctccaggaggccatcaggacgggcctcactgtgctgctggctccgcagagtggggctggcagcagccgggcagctgggcagaaagggcaccgggcctggttcagagcgtgcagttccaggggtaatgcagggattggagtgccgccctctcctcggtgcagatgggaggagtgtccaagcaccgggactaggggaggcgctgccaggagagggccctgaagggttgctgtgattttgcggcgtctggagtggatgaggtgacccaggccagacctgctcagcctggggcccagggaggaatgaagtccgttcccaaaggtgccagctcaggcagtttgtgggtgagtttcacagcttcaaggacaagcacttcatgctatttaacttgttnnnnnnnnnnnnnnnnnnnncagggctgggtggaagtgggtagctgggcgcgtcggccatggaagggaatggagcaccactgtctggcgccccccactgcctggggctgccctggaagcagtgcagaggggagggcgggagagagatcccagcttccccagaccggctcccctgcagagctaggcactctctctccagcctggctccattccctttaaacaggactttgataaggagggagggaggactctgtcaagtgtagggacacagccgtcattagcctggctttcctttctgttgggtgccaggaccctggggcaaacagatccagcccttgaacgtccatcctccctgatgccctgtggcttggcctaagctccagctccaggaggccatcaggacgggcctcactgtgcygctgactccgcagagtggagctggaggccatcaggacgggcctcactgtgctgctggctccgcagagtggggctggcagcagccgggcagctgggcagaaagggcaccgggcctggttcagagcgtgcagttccaggggtratgcagggattggagtgccgccctctcctcggtgcagatgggaggagtgtccaagcaccgggactaggggaggcgctgccaggagagggccctgaagggttgctgtgattttgcggcgtctggagtggatgaggtgacccaggccagacctgctcagcctggggcccagggaggaatgaagtccgttcccaaaggtgccagctcaggcagtttgtgggtgagtttcacagcttcaaggacaagcacttcatgctatttaacttgttttagaacataaaaagataaactttttcccaattcatttttaaatgtkgcataacctgtgaccaaagcttgataaaaaaaaaagtccctaaaagtaactctacagataaatatcactataaatattactgatggcagcggcagcccatctggtgtggccgctgccatcacactggctgctcagggagggcccatggaagaggcagacaggcccccaaccccgcagactgcctccctgggggccgctgccatggggccgggccgggtggtgtgctgggtgaaggggagctcacggcggtgttgcccctgtctgggatgctggcccaggtctggagaccctgccccaggctgcgagaggacatggccaggtaccatgctccacggagccagcaggagccggggataagtgggatccctgccccttgcagtttggcgaggtgagagttccccaggtacaactgcccaagtcgtggctgtggatctgggccttctgctccatggaggaggcaggagccagcccccactcctggtgcagtttcagctgccccaactggggctgctgacccaggcatcgctgcactcttggggagccagggaaggcccctctttcccttgtaggcctggaggtgcctgttcccgctgcccagcttcttcccgctcccaccacccactccaatctcagagcagagttggggctgagcctgggcactgtcacagcctggccgggtgggtgcatgcttgtggcagtgctgacatgccagccccctgctgacttggccccctccaaactgtgggcactgagaagtgcaggaggggaggcttgggggggtgctgagggtggctgggcaccggtgccccttggtaccagcagcctgggcaccatggatggctgcaggaggcagataggctcctgggcagaagaggatgggtccccagtgaagccccaccttcaggctggggcaggcctgaagcctgggggccgggttgcccgtcctacggaccagaggggaactcaaggtgctttcttctgggcctgcacatggctgcacatggaccaatcagcatgcacttcccctctctgaggcctttaaaagccccaggctcagtcagagcagggcagagcatggcacgaccagctgcagagaggaggtgctctctctgctgagagcttcaggacctgaagggatgtcaggacgaccagctgcagagaggagctaccctctccagggctttctctctgctgagagctgaacactagttgagatgccctgtttgcagagaggagacacgctctcgagggcctcctctctgctaagagctgcagagacaatgggatgacctgcctgcagagaggagccacccactccagggccttctctctgctgagagctgaacatttgacaagacaacccgccgacaagacaaccygcctacagagaggggctgccccctgcgggtctcctgtgagctcccctaacactcaataaagcttctctgtcttgcacaccctccacttgtctgtgtacctcattcttcctggacacaggacaagaacttgggcaaaggcgccactggccatagaggtttcaggccagaaaagtgacaccctaaaaatcccataacattatcacaaaaattctagccaatattaaaaactaaaatccaatagcatattaaggaccactataccagaactataatatgaagttaaagtacagtgttgccacaaacactagggaatacattaatgtaagtcacattaacataaaatgggaaaaaatatgcaattgcttcaatagatccctgaaacatcaatttctaactaagaaacaacaacagccagacaaggtaaaacctagtaagaaatttaggagtagaattaactctataaaggatatacatttcaaatcaagagctcacatcatattttacacaaaaagctaaaatagtggttcttatctttgtggtcatggacccttttaagagtctacacaatttcaccttacacaaatgcatagatgctcatatacagaaatcatgtccaggaattcagggattccattcgtagatctaaccctgggttaaaaaatcctgcattagaagaatgcttactacagtacaaaaaaaatggggtgggggcaaacagtgcagatcttacgctaccattcagtgttgtgttggaagccaatgcaataagacagtaaaaataaaagtataactgttggaaaagaagagacaaaactgtccttattaaagataggattgtctacccagaaaatcatctgaacaaagtttttttaaaaaagagaaaaaaaaatatatatatatatagacagagagaaagagagaaagaaagagaaaggaggggagattagggagagaaaatttagtgagccacttagaaaaatatatcattgatgaaaagagtcaaactctgtaaaatattttaagagatttattctgagccaaatatgagtggccatgacccatgacacagcccttaggaggtcctgagaacatgtacccaaggtggctggggtgcagctcggttttattcattttagggaggcatgagacatcaatcaaatacatttaagaaatacattggtttaatccagaaaggcaggaaaattcaaagcggggagagatggcttccaggctacaggtaaatttaaacattttctggttgacaattggttgagtttgtctaaagacctgggatcatagaaaggaaatgctcaggttaagataaaagactgtggagaccaaggttcttctgaagtctcatagtggctgcccttagagacaatcaatgacaagtgtttcctaytgagacctttaaaagctgctagactctcggttaatctcttcagaattgggagggcctggaagaaaaagagctagctatgttaacagagattccttacagatgcaaattttccccagtaaaggacagctttgcagggccatttcaaaatgtggcaaagaaacatgttttggggtaaaatatttttattttcttcttggtcgtgtagtgtcatgccagagtcagatggaaagtaagtcacrgcatatagggttagataaaaccatctgatgagaatttatggtttgtagggcatgactcccyagaccccttagataasaatataggcaagataaaaaaatcagagcttagtcctcaacatacaaaaagttattgattttcttctatcagttagaagaaacattttctaacaaccagttagaaaatgttgcagaaaaatgctatttacactaktaagaaaaacaacataaacccaaggaatcaactgaataaaaatgtgcaggacttatgaaaaaaactcaaaaaaatttttgagaaatatattggaaagacaaaccttgtttttggataagaaatcatcccactatcttaaactgatttaaaaatatcagttattcctaactgaatctataatagaatgcaattttaattaaagtttccaagaaaattttttgcatttttgtagataggagtttgcaaaatgaatccaagttttacttggtagaaaaagcaagaagagttgagcaaaataaaaaatagagtgatgagaaagcttgtgctatcaaatgaaaygataaaattacagttttggttttggtgctggaacaggccaacactccacacaaccatgggcataacaacacacgagaacttaggctatgacatggtggcctttcagagtggtggaagcaggctgggatgagggctcaccctgtgactagaaataaaggtactacctcacatggtgctcccaaataaactccaggaaaaggaagtatctgagtgcaaaacaggaaccaaaaagtctttgaagaaaacagaatgtataaaatgtcaatgaaaaatctataataattgtgtaccagatactgtcctatatcccttcattcaacattcacaattggacttatggccttggacataggtactattaccatccccactccaacagatgaggaaaccaaggcccagtgaggtaacttgcccagggcactcagctaatagctgaggtctgaagcctggcagtgtgggctcaagtctgccctcttgayactgagctcccacatatgaccatcattacaacaaaagcaatatgagcagactggaagcagactgagagccagcaacaatcttcccagtgtaagatataaatattttgatggactgttattaggtgcataaatatttataattattatatcttgctgtattgagccttttattaatatatgatgtccttctttccctcttgtaaccttttttgatttaaagcctatcttgtctggtattagtatagccactcttgctctcttttggttactatttgtgtggcatgtcattgcccatcctttcactgtcaatctatttatgtttctggatctaaagtgcatctcttgtagagagcatatagttggatttggctttctaaatccattctgccaatctctgtcttttaacagagagagtttggagagtttaatccatttacatctaaagtaattactgataaagagggacttctttcattttgcattttttttctgtataccttatggatttttttgtccttaatttccagtatcactgtcttgtgtttaattaatttttttgatggtgaaacatttaaatcccttcctcattcccttttgtatttattctttagttattttctttgttgttaccatggggattgcattttaacatcctaaaattataacagtctacactgaatttataccagtttagcttcaatggcataaacaaaactctgctccctgaatggctctgtccccaacccttttagttattgatgtcacaaaattacacctttatatattatgtgtccaaaagcataatgttatttttaaatcagtctcttaaattatgtagaaaacaaaaagcagcattacacaccattgttacagcaatattagcttttataattgtctatatatttacctttactgagatatttatttatttatttattttgagataaggtcttgctctgttgcccaggctggagtgcagtggtgtggtgacagctcactgcagcttcaacctcccaggcccaaatgattctcccacctcagcctccccagtagttgggaccacaggtgtgcaccaccatgcttggtcgatttttaaaaatatttttattttatagagatagggtctccctatattgctcaggctggtcttgaactcctgggctcaagttatcctcctgcctcggcctcccaaagtgatggggttacaagcatgagccactatgcctggctgagatctttacttcttcacttgaattactgtctatcaccctttatttcaacccrcaggactccctttggcgtttcctatagggcaggtctagtggtaaggaacattctcagcttttgttgatctaagaatgtgttaatttctcccttacttttaaaggacagttttgctggatgtgggcttcttggtagacagtttttattcttttagcactttggatatattggcccactgccttgtggccttcaaagtttctgatcagaaatctgctaatagttttattgaggattccttacatgtgatgaatcattctttcttgctgttttcaaaatctttgtctttgggttttgacaatttgattagaatgtttcagtgtgggtctctttgagttcatcctgcttggagctttttgggcttcttggatggttatattcatgtcattcatcatattttagaagttttcagccattatttcttcaaatagtctctctgctccctttgctctctcttcttctggggctcctacaatgtttatgttggtttgcttgatggtatcccacagaccccttaggctctgatcacctttattcaatctttttatttctgctcctcagactcaataatttccattkttgtatcttcaagttccctgattctttattctgcctgctgaaatctgcctttgcatttctctagtgaattttaaatttcagttattgtacttttcagctccagaatttccctttggtttctttttaaaatttctagctttttattgatattttcatttgttcctacattttctttcactttctccacattttcccttagttatttgagtatctttaagatagttctttcaaagcctttgtctagtagatctaccaccaagtctttttcagtgacagtttctgttgtttttttttcctttgaaataggaaagtttctttgtatgccttgtgaaatcaaaatctctttcttccccagagtttgctggtttttcttgtttttataattttgattgttgctgtctctgtgctaaggatcagcataaagtataaacttaaggtcttcttaggtcttttctaagcccgtgacttcccctgagcatgtgcaatgacttttttattttctccacatatatggttgcttttgaatgtgctagtcttcaatgtctacstctcaaaagaggaaaaagagaaaaatgaagggagaaaagggtgccagccctttaaatctcctggaagtcacttcaaccagacggagaagggcttgcaatgacggggttagttgcaacaacaaagtctgtgtcaatagattttgaaagatctacatcatacaagatatcttttcagaccacaaaggagtaaagttaaaaatcagcaacaaggacatttaaaaaatcacgaaattaaacaacaccctgttaaataaccaaggatcagagaagaaatcacaagggaaattataaaatacttagagatgagtgaaaatgaaaacacaaatttaaaaacttgttcgacagtgaaagcagtgctaagggggaaactgatggctatacatgcttatattaaaaaagacaggtctcaaatagsagcttaaccttacaatgtaaggaactagaaaaagaacaagctagcagaaagaaggaaaaaataaagatcagagcaaagataaacaaaatggagaacagacagataatagagaaaatcaatgacaacaaaagttggttctttgaaaagataacagaattgaccagccttaagctagattctagactaagaaaaaaagaagaaactcaaattactaaaattataagtgaaagtggcaacattgctactaattctacagaaataaaaaagattataagagtgtactataagcaactatatgtcaacaatttgaataacacagatggaatggaaaaatttccagacagacaaaacctatcaagacaaaatcaaatcatgaagaaatagaaaatctgaatagacataactagtaaggagattgaatcaatactcaaaaatctcctgacaaacaacctctggacctgatggctgcactggtgaattctaccaaacacataaagaactaacaccaaaccctcccaaaattttcaaaaaacttgaagagaagggaacactatttaactcattcttacgaggccagcattactctgataccaataccagacaaagatattgcaagaraagaaaactacaatccagtcttccttatgaacattgatgcaaaaatcctaaacaaaatactattaatagtaaactaaatttggtataatttgatgcaattaaatggaatttaatgaattgaccaagtaggatttatttctggagtgcaaggatagttcaacatacaaaaaaaaaaaaaatcaatcaatgtaatacacattaacagaatgaaggaggaaaaaaaactcacacatgatcattgcagttgatgcagagaaaccatatgacaaaattcaataccctttcatgataaaaacactcaacaaattaggaatagaaggaaacaaccttaacataataaaagccatattatacgaaaaagccacagtgaacatcatactcagtggtgaaagactgaaagcttttcctctaaggtcagaaataaaggaaggatgcctgctttcactacttctatttaacactgtactggaagttctggccagagcaattgggcaagaaaaagaaattaaaggcattcaaattggaaagaaataagtaaattatctctgatcactgatgatatgatcttgtatgtagaaaaccctaaaaattccacaaaaactgttacaactaataaacaaattcagcaaaatagcagaatacatagtaaacacataaaaatcasttgtatttctattcactaacaatgaacaatccaaaggaaattaagaaaacaattctatttactatagtatcaaaaataataaaatacttaaaaattgacttaggaggtgaaagacctgtacaatgagaactacaaaacatttctgaaagaaattgaagaggacatttaaaaaaagacattcatgttcatagattggaagacttactatattaagatgtcaataccacccaaattgatctcgaggtttaatgtaatccctataaaaatcccagtgattgttttttttttcagaaatagtgaataaatcctaaaatttagatggaatctcaagggacctcgaatagccaaaaaaaaaaaaaaaaaatcgtgaaagataagaacaaagctgggggactcacatgtcctaatttcaaaacttactacaaagctgcagtcatcaacagtgtggcactggcataaagacagacatacagaccaacagaataaaacagagagtccagaaagaaacccttgcatatatgactttcaatcaagccgtcaagaccattcgataaagacagtcttttcaacaaacggtgcagagacaactagatatccacatgcaaaagaatgaagttagacccttacctaataccatatacaaaaattaactcaaaatggatctttacgttttaagacctaaaactttaaaacccttagaagaaaacataaggtaacaccttcgtgacatgggactgagcaatgatttcttgggtatgacaataagaaaaaatagataaatcagattacaccaaaatttaaaaacattttttgcatctatctagtgaaaggacatcattaacagagtaaaaagaacccagagaatgagagaaaatatctgtaaactgtgtatctaataagggattaatatccagaatatacagagaactcctaaaattcaacaacaaaaaacaatcaacttgattcaaaaataggtcaaggacttaaacagatatttctcccaagagatatataaatggccaacaagcacatgaaaagatgctcaacgtcactaatcatgagggaaatgcaagtcaaaaccacagtgagataccacctcacacccattaggatggttaacatttaaaaaaaaccaagcgaacccggaaaatgacacctgttggtgcagatgtggagaaactggacccttgtgcactgttggcaggaaagcaaaatggtgcagccaccgtgggaaacagtgaggcaattaattctcaaaaaaatgaaaaaatcaaatgatccacatttccacttctgggaacatactcaaaagaagtgaaagtgggatctccaagaggtatctgtgtggtgtgttcatggccacatcattcacagtagctcaaacgtggaagcaacacaagtgtccagcaacagacgaatgggtaaacaaaatgcagggcatgcatgcagtggaatactgctcagccttacaaaggaagggaatgctgacatacgttacagtgtggatcaatctggaggacatttaagccacgtgaaataagccagtcacaaaaggagacatttcatacgatttcactcatatgagtcacctaaatggccaaattcctggaaacataaagtaggatggtggctgccaggggagggaaggggtgatgcgagttggtgctccatgggcttcagtttgacaagaggaaaagagttctggagatggaccttggtgatggctacacaacactatgaatgtacttactgtcgctgaactagctgcacacttaaaaatggttaagacagtacattttatattgtataccacaataaaaaattcgggaaaataaagctttttcaaatcaataaaaaaagaaaaaaacccccaaacaccccaaacaaacaaacaaacaaacacatccatggcctgggcaacatagtgagaccccgtctcttaaaagaaaattagctgggcacagtggtgcatgcctgtagtccccgctactcggaggctgaggtggaggctcgcttgagccagggatgtgcagattgcagtgagcagtgatagcaccaccacactccagcctgggtgacagagcaagaccctgtctcaaaaaacaaacaaacaaacaaaaaaccaaaaaaacccaaaaagcgaacatccattaggaacatggggacatcacaaccaggcaatgcacatcactacacacggtcagtgatcaaacagcccaaatagccttgtactgcacaaaaaccaaagacatgcagaacaaaccccccaacaaggcatcattccttatctatgaaatgagaaaaaaaaaaaaaaaaaaaaaaagacagtgctgctatccattgtggagacaggttccccgccacttctgggatgggcatctgacgtttctgacctctggacccagatgccgcccttctaagagcaggcgccctgtgagctgggattcccaccacccctgcccattacagcctccactgcaggccaggaagggccgctgggcggggctgggtgtttggatcctgggcggacctgggcagccccgtcccagccagtgccccgcgggctgggtagggccccttccatgagcagcgccaggacccctgcttgtggcgggtgagccccgcatcaggcgcccgactttgcataaacgtgaaataggccacaggaggcagcaactcaacgtgcagggccgtgtttaagagaaagcatctcaccgggcctttctttcctttttttttttttttttttttttttttgagacagtctcgctccctcacccaggctggagtgcagtggcgcgatctcagctcactgcagcctccgcctcccaggttcaagtgattttctcctgcctcagcctcccgattagctgggattacaggtgcctgccaccacgcccggctaatttttttttgtatttttagtagagacggggtttcaccctgttggccaggctggtctcgaactcctgacctcaggtgatctgcccgcctcggcctccccaagtgttgggattacaggcgtgagccaccgtgcccggtctggcctttcttgaaataatcaccagagtcgaagtgcaagggggcctccaagccagagctgtgttatcccaagaacaaggagctccgcggatcgcaggcccctcctttctgggttccgaccccaaagggaaggtcccttctccaggggcgtcctaggcgcgggcaccggggttctgctggcacagcccggatgggcgccgctcgcccgcacacctgcggctccacagagggccgatccgttcggttgccagcagtggagacccaggcccagcggttccaccagcgccccggcggagtcccagggcgggtgtgggcggcccggcaggggctgcgggtcgctgtcagcccgggtcccgccgccctggggagccgcctccgtctgcagcttctcctgggcctggcggggccctggtgggctccaggccgggaggggcgcagcgatggggcgtcggggccacccgcgtcccctccccgcccagtcccgccctcgggcaccgaaagcccctcctccccccgccccgccgccccttccgtccggcccggggagaggccctgcgcccccggaggtcccagccagccggggcgtcttccccgcgggccggagccggacccgaaccgctcgcagacgcggggcctggcggggcgtgcggtgccggggtcgtctcgggagcgggggtcccagcaccgagctcgggcgcagacagggacccccccaccccgcccaggccggctccgccccagaggaggccgcggggaggtggccccaagtcgcgcgcccgagggtcggacccagagacgcggagccacaggggcaggcgcggccccagccccgcgaggaggagccccgaacccgccgagccccccgccgtccctggggctggagtcccccttcccggggrcccgagggacggagccgccgccgccgccttcccaggactcggggtcaccccccgcgggccgagcggcttccagggtgcggggtccgggaggcgctcacctggtcccgaggaggctccgctcccgacggcccgaggcgcgggcgccgagtaagcagcagggagggaaccgcggccggcgccgccccctttataccccgccccgccggcctgacccgccccgccgccaggaagcgctgcggccccgcggatgggaggagggggccgggggcacgggagggggatgggagggaagcggggaccctcgagggcgggaggctggaggaggtggagagggtggggacccccctgcagcccgggccgagctcccccgccagcccctgcccgctgctgctcggacttcgcgtcccgggcccggccgcccgtcgcccccgccccatttcccggacgacctggctggggctgtgtccgcctccggggccctgggtgttggggaccgcgccccgcacgcagggccgacgggggccctgggactcgccccttggtagcagctgccctggggggtgcagggttccccccatcagccgccccacccctcccctaccccgtgtcctgtgtccggcttgctcaggcctcccgcgagaggccccgggtcaggagctcctgcagaaactgctgctcctggggcctgagggtggggagccgggagggcagggacagcagagcctgggcgcggaggttggggcagagcctgggcatgcggcgagccacccctgccacccctttcccgctggaaaccacaggtgggcttggtgctgggccctgggaccaccgtgaggtccccacctgagcccagccggggacagagtgacaggggtccctggtagggctctgtctggggtccccactccccaccctggtcacagtcccccagccagggccggggttcctccttgaggtgaggcgcagccgggttggggagaggtccctgggctccgggacagggctcccttcagagctgtcctggaaggtggcggagcggctgggggcgaggtccctcttctgatgagcaggtttgcaaatgtggtgtgtgtgtgtgtctgagactgagtgtgtgtggtgtgtgcatctgagtgtgtggtgtgtgtctgtgtctgagactgagtttgagtctgtggtgtgtgtatctgtgtgtggtgtgtgtctgtgtctgagactgtgtgtgcatctgtgagtgtgtggtgtgtgtctgcgtctgaggttgagtgtgatgtgtgtgtctaagtgtgcctgagtgtgagtgtatgtgcctaagtgtgcctgagtgtggcagccacatggtagccatgagtccagggctcctgcctgctgctcctgagcacagctgacggcgggcaccgtgtgccactcccctgggtccatgccgaactctcacctgggcaatgcctcctgcttccaagccagcagctcccagggggaagccaggcccctcctcacaagaccagaatcctttaggggttaccttggctccagaagttctccctcggcctggccagcactgtctaggggcacgtgctggccaaggctccccgtatctccttcacaggggtctcacctgtggtctgaggcttccgtcctctttggccacccccccagcatccttcacagacattgcactgataaatctccagtcacgtcagagcttccatggcacctgcctcttggaagaccccaattaacacaagtggtgcaggaggggcctgagactcagctggtgcggtggccgtttcccggccaacaccgaggacaccattctggttgatgtggggatatgggtagtctttggcacaaagttagggccccaattgttaaatgttttcaccaagagtgatctgggacgttttcctggtggaaggggaggccttgtgggtgtggcagtttccccctttcagtgcatggggggagtggggttgatgctccacagagggatgaatggagattgcgacgttacccacggttgcccatcaggcttggtgtgagaacaaagggcctctctggttgctgaaaaggagtcccatgtttggcagaggtagaaccagtatggctgaggagccgacagtgactgtggggaccacctagctctaggcatgttttgatgcctggccacggctggcctatgtgaaggtctggaccccggttgggaaaatctgggaccctgaaacatgggctgagacatccaggtggaagccctgagggcatggccctgcagacccctgtcccctcagagcttgcagaggggcccctcctgcccttggaagccagcacttcctctgtgctggaagatgctccaggggcctcccctaccagagcagcaggtgccctcactgggggctgctccaccttgtctcttggctgccagcagtgactagggagaaagtccagggtaacctggatggggacctgctaggcctgaccagggagtagagaggttgcatgtccaggaactgcacgaggcagccagcatgtgcctgcaggagccagggaacacccccggtattagatttccagggtgctttatccagggggacagaagaactattgaggcggaggcacttgcttggcacataggattagttacctggcaagttctgcaggtcgtgggtcaaagatgattctgggatggctcccagaagcctggagaaagcgatgggtcatgttgagccaagccgccctggcggacggcagaggaaggaagaaagaggccaagggcggggactccagtaaaatatcgtggttccctactccattcctggacttgagctaatttcctgtctggaaccattgattgcagaggtggccaggtcaccagaaggaaggaccaggcaataccttgacaaggatgttctgtagaatcccgctgtcactcactcagctggctgcacgctgggaaaatccagagattttgaggacaaatggacgcgggatgtgagtggaccttgatactggaggccaaaagtgtcgctgtggcctccctgttagagaaggggctgacggggccaggtaataaaaaggaatcctggctaaagtgttgggcacagtgagacccctgggccagaagaccatccagtggccgcttccctgccccctgagtatgtaattataatttatgtacttggtggctggagtagccatatattggatcccaggcctgtgtggtgacagacatcatagtggggaagtcccctttccatggccaagagagtaaatcacaaatcacgttgcatcctgggaggatggcaccaccattaaaggcctcacggaggcgagggtggtggactgtcgtgtctaattctctggcctggtcattgcaaagactgatggatcctagaaagtgacgccagaccacttagcctgaacccggtagtagctccagttgcatctgctgtgtcagacgtatcatcgtagcagattaatgaggccagtgattggccattgcattcttttctattccaattagaaaagaggatcggaaacagtttgcatttacatgggaggaacaacaatactcattcccagtttagtgcagggccacgctaactctgtcctctgtcctaatattgcctgaaaagatctgggcacctgagcagtgcaccggacaccacactgatccattacagtgacgacataatgggcaggaggaggaacaggagggtcatgagctagaggccttatgagacacatttgcatctgtgggtgggaggtgaactccgaggattcagggacctaacttcatggaagtttttagggcaccagtgatcaggttcataccaggacatcctctaaagtaaaagagaaattgctacatcttgcatcccctacttcaaaggaggaagcacagggcctgacaggcctttttgggttctgaaggcaacatatttaattcctgggggcactgctctgacccacggctcggctgacatggaggctgccagcttcgaggcggccaggagcagaaaatgactgtctgagcagccctgccatctgggccacgtgacccagcagcccctgtggtgttggaggtgtcagtgtgggagcaggcaagtgtggggctgcggcaagccgcagtgggagagccagagcctctgggtttgggtggaggccgtgtcacctgcagaggaagctgctcacctttagagaaatgcttcctgtggcccaagcaggtggggcagcccagccgtgcatctctgtgcacaccaggacctggcttcaggttggactgatcaggggaggctgggcacttgctttgaggccttgctgggacctgcaatttccaccctatccctcccatgaaggggccccagtgatggctgccgtgttgggtttctgtttgtctctgcagatggcaatgacagcagtagtcccctggcagccacacacccctctccaagaaccccagcgtgccacctgccagagcctgcagctcccacacccctctcatgcctccagcacagccctgccaccacttgcagaggaagctgagaccagagcactgaagtaacctgcccaagactgcacagcttgctggcagaggagcagagcctgcggcacggcctctgtgttacactgtgggccctgaggatgaggactggcctggagtccctttgggtctgcagagcaatgcctggcacagagcaggccctgactggggctgcagagtcactaagtccctgcatgggggaccaactgatgcaggctctgaggtcccaggattctgtggagattcacaggggacctaggaccctcggagctgccctctgaattcaagcagtggtgcctcctgtgcttgtcaggcaggatgatctgtggggcctgtgggctctgacctcactctgcagcagcaaagcccagaggcctcactttttcatgaaccagcacaggctctcctgagagccctggagggaaggctccggctatactgcctcctggtgtgaggaggcttctctcttgtctgtcccactagggcggggctgacgttctacccttgccggtgggctctggtctgcttcccctcatcatgcccttctcaacattctcattttcagactgaagttgggtgattgctccttttctcagagtgcttgggtgcagcaggctgcggaggggcactgaggcagcccagcctcaaccagggttcccaggacctgaggccccaggctggaccccagcaggctgcaggctgccctgcggacaccacacctcaacaccacaaagggccctgctgaggttggcagtcagtgctcagagcacctccaggcacggttcctaacgagcaagctgatgccaaggtcacatgaccatgagtttttggctgcgttgggtcctgtttatggagagatggtgggaggggagcagcatgggtgggtggtggttcacgcttaggggactaactgggagctacagtaagacacatgcgtaccattaagaagagactttctctgtcggaactgtgggtgcttgtaggcccggcctggaggaggaggaagccgtgctgtccttttctgcccaagtgttctcaggctgaggcaggccttaagtggctccgtgtggaaaagctctctgtggctttctcacactctggacaccacgtggaccactcagggcagcaggggcgttactctcgggcttgcagcctttcatggacatttgagaagatgcctctgtagtcagactttcctctgcttactcatggagccgacagacagaactaatgttctccccagccgcagctgatctcgactcagaaaaaaacgaaaaatggcaagacctgccactaatgggcaattgcacatgagtcagtttgtgtcacgggtgtgtgttcagagctggtggtagatcctccggcttttattttttaagccagagccaccgcattattctcaataatctcacccaggctctcgggctgccaagcacgtgtatttttgtcttttactttcacaatagcacaggagtactggagaatgtggcgtggaccatagtttacattttcagtggaaaccaggaccagaggctgtgtgctcggggcccagatggggtgaggacaccaggtggtaggaagtcgggggacaaaggctgtgggcaagagcctcatcgatcctgcaccaggaggagccagggga

SEQ ID NO: 98148 - DNA, 35336 bp, Homo sapiens
gagctcgcctgagtatggggtggtgtcatggagccgcatacccctgggttgtgagctcgcctgcatatgcagggtctgtcatggaacatcccaagtctgtgcagcagggagccccatgcccctgggacatgaacccacctgcgtggaatgctgtttgtgaggtgtctacagggtttatagtagtcttgtggacacagaaatgcacaggggacacttacggacacagaaatgcacaggggaggccgagcataaccaggggtgaggggcaggcagcagttgtagttactgccgcggggcactgctatgtgcagggacagccagcacccagcccatcaccactccctgggctggctggcaggtatggcaccctgggagcccggcatatacccagggcacccctacggctgccgccagtctcatgcccaggtgggtgctctgggctggagcgagggccaggttttgggccgaggcttccccaggcaatcctgtgagctcccttctagcctctgacccagtctggtctggcttgcatggatgtagggcttggggtgggaagttcaggtcctggctttgcctttgcctgatgtggatgagcagctcacatgctcagggccacctgagactgtcactgctctcccctggctactgggaggagtcactgagagcttcgttacccctgctgccttgcccagggcacaccctatacctcctcatctgctcttcccctccctgccgccttctgggcaggtagcagtccctggcctctccccctggctgatcactctccctcaggcagtggagatctgcgtctggacaccctcagatcctgtcattgcctgcccagagtccttcaggggcacccctctgccttggtgtgcggtccagggctctcacccaggtgccgcaccctctggggtcttctgtccagctcccttgccccatgtgctgtcactgactctccttgggactcgcctgcctgctcagagccctgcagggcttggtcagctgcctgttcagtgtcaacacttccctgcacatcttaaaactgggctttattttcgctgaaggaactgtgttgggacccttgacatctgtcaggtttgcacatgctgtttttttttctcagcccacgtgttctcccccacgtggggtagcagcaggacagacagtgaatcacagagtctgccctgagcagaggctgctgtccctgggactcctagccatggtcagactgtacaaaacggttttccagaaatgaaatgtaaatccatttttatactgaaaatgttactgaaagtcacttttatgagcatctgccttaataaacagacattgattcccttatcagaagcctgtcacactgtgtttcgtttcatcctggggagaactgcagatttggggtttctggctgtcatacgtcacctgcctgtggggcgagtgggaggcccagcctggtttagggaacaagagtgacgtgaggagtagcagggtgcgtctccagttacctgagggaaaacagatattttaagagataatagcatagcctattttaatatgttttaaaggccataagcatatccaggaagataaataaacgtgatacaatgtccacataggaggaactttctttcactgcattgttttccttcacagtggccttcaagtcacaggacgcagcgattccctgccctcttcggtgttattacacaggcaggacttcagtgtcagtatccctgccttcagtcttctttagaaatcacatctgtgttcaatccattgtttagagggagtgtatttttcctgttccatgaagaggactttttgttcacaattggatcacaatgcagaggagtctgttcctcccccgtcggcttctcggtgctgggagggtgacctgtcccagatgactcatcaccctgacatgctcttgacaaaggacaccaccaagaggagatggcagctgtaccggtgcagcctctgtctgagggggatatttgcctcagtgtgattaaaaatcagtcatgaaagatttttgaattcagattatttttatcaggaacagattttgaacatcctgaaatcttttccctggcatcatattaggttttctttgttcactatgatgtaaagtttcagactcttgatatttttaatatcaacatagacggtaggacaaggaacggtaccagaaatgagtaaagagacaataatgataagatcgatttatcaagacataacaaccccaaatgtatatgcactaaataacagcttcaaaatacatgaagcaaaatggcagaattgaagagaatgagataaaaacagaattttaacgggtgctttccgtactttgtaactgacagacatgagatctgtaaggacagagatttgaacatcagccaacacaagcgagcggtctttagaggatgcttcacctaacactgctgaagcacacggctttgcaagagctcgtggcccatgtgctaaggtagaccacagctggctcaccaggtgagtctcagtatgttagcaaggacggaagtcacacacagcatcctcccccaccacagtggagttaaactgaattgaaaatcagtggcaaaggagcaaaggcagttcaatggagaaaggacagccttcaacaaatgctgaaacaaactccatttgtaaaaaaaaaatgaaccttgacatacccttcacatctagacatactcaagatcaatcagagacctaaatgtaaaacaaaactataaaacccctagaacatcacataggaggaaatctaggtgaccttgggtttggcagtaactctttagatatgacaccaaaggcatgatcctcgaaagaaaacattaataggttgggcttcattaaaataatacatttctggctcatgcctgtagtcccagcactttgaggggccaaggtgggagggtcacttgggctcaggagttggagaccagcctggataacagtgaaaccccatctgtacaaaacagtcagaagattaggcaggtgtggtggtgcgtgcccgttgtcccagctactcggaacactgaggtgggaggattgcttgagcctgggaggccgaggctacagtgaactgtggttgcgcggctgtgctcttaacttgcgtgacaaagtgagaccctgtctcaataaaataattaatgaaactgaaactttctgctctgcaaagaatgtcaagaaaatgaaaagacaagtcagagactgggagaatatatttgaaaaagacaaaggatcagtatccaaaagagctcttcaaacccaacaataaaacaacctggttaaaaaatgggctgaaggggccgggtgcggtggctcacgcctgtaatcccagcactttgggaggccgaggtgggcggatcacaaggtcaggagataaagaccatcctggctaacacggtgaaaccccgtctctactaaaaataaaaaaaattagccgggcacggtggcaggcgcctgtagtcccagctactcgggaggctgaggcaggagaatggcgtgaacccgggaggcagagcttgcagtgagccgagattgtgccactgcactccagcctgggagacagagtgagacttcgtctcaaaaaagacaaaaaagaaatcaaacaaacaaaagtggctgtgccaatttgcattcccaccaacaatgagttcctgttactccacgtcctcagcagcatttggtggtggcagtgttctggattttggccactctaaaaggtatattggtagttttaatctgcattcccctgatgacatatgatgtggaacatcttttcatatgcttatttaacaactgtgtatcttctttggtgcggtgtctgttaaggtcttcagccttttcttttttttttgatacggagtctcgctctttcgcccaggccggagtgcagtggcgcgatcttggctcactgcaagctctgcctcccgggttcacgccattctcctgcctcagcctcctgagtagctgggactataggcgtagcgaaactgctctggcctgacactgtgatggtggatacaggtcattatacatttgtccaaagccagagaatgtgcagcatcaagagtgagccccattgtaaactgtgggctttgggtggtgacgatgtgtccatgtagattcatcagctgtaacaaatggaccactctgggactgagtgtgggtgtgcgcgcctgtaatcccagctgcttgggaggctgaggcaggaggatctcttgagcccaggcatttgaggctgcagtgagccgtgatcatgccacttgcccttcagcctgggcaatagagcaagaccttgtctcaaaaaagtaccactttgctgcaggacgtttcaaaaatattctcccagtctctgacttgtcttttcattttcttgacattctttgcagagcagaaagtttcagtttcattaattaaagtattttattgagacagggtctcactttgtcacgcaagttagagcacagccgcgcaaccacagttcactgtagcctcgacctcccaggctcaagcaatcctcccacctcagtgttccgagtagctgggacaacagacacgcaccaccacatctgcctaatcttctgactgttttctacagatggggtgtccttctcttttgataactttggtagggtttgtccatttcctgtggttgtggagcacgggcatcaagctttaactacaccccacaaattctaatgtcatgtttttattctcattcaacttgaaatattctctggtttccttcgtgcttttgtctttttcaagacttttttaagaggagttttaggttcttagcaaaattgagaggaagatagagagatttccccactcgctgccccaacaaatgcacagcctcccctattatcaacaaactacctgacagccacaattgtcagcaaaacgcacatgagggaaaaatataaaatataagtagcgttgtatctatttaagaaattgatttagaaatttaaaacttttccagaagaaatctagttctagatagcttcacagatgaattctatccgacgtttaagaaggaacacccagaaaatggcgcagaatctctgcggctcattttaaaaggccagtgttccaaagccagaccgagacatcacaagaaaaggagattcagatcgacttcccctgtgagcataaaaatacttaaaatattaataaattgaatccagcgctatattaaaaggataatgtgtcaagaccagaaaactgtcagaatgttgataggtccgtggctggagagtacctgacgtcaagagaaggtttccttggagcgggaggaagacggcatttaaaatatgatgggaggagccagggcaggaaaagccattcagggccccgtcgggctcagagcggggggcgcatccgtgactcatccctcgcttctctctctgccctgcatcctggacgccctgcatgccctcgtcagtgggctgtggctgggcccccgttgtcttgatctgaggtgtgagccctgtggtgcaacaccaggctggttgggttgtgtcaggaacgcttggggtgtagaaacctcctttctccacaaagcctgactcaagactttctctcctagaagcaaccttcccctaatctggccgcccgggctgaatgaaggtggtgttctcccaggggcatctgcacctgagtgcccttggtggtcctgagtgcccgtcacagggctggaggtgtggccggcccactgggatggtggtggtggtgggtgcccatcacagggctggaggtgtggccggcccactgggttggtggtggtgggtgcccgtcacagggctggaggtgtggccggcccactgggttggtggtggtgggtgcccgtcacagggctggaggtgtggccggcccactgggttggtggtggtgggtgcccgtcacagggctggaggtgtggccggcccactgggttggtggtggtgggtgcccgtcacagggctggaggtgtggccggcccactgggttgtgctttctgccgtacgtcccttcccatgaggatgagatgacccatctgttgcatcccggctgctgwtaaaacaagaccctcggagccaagaaacaacactgaggtgatttactttcccaagtaattgaagcagggagtcagggtgggtttcaagtcggtcgcactgactgaggacagacgcctgctctagcagggccccatgagccgcagccctgtgtgacggcccgaggggccgtggccatgggttgggggcgtcctcagttacgtgcaggcaggagcagtgcagtcaggaacaattggtgtcttagacacgggcgctcgtggtctgaggggtggacatgcactgctggacccttctcatcagggagtgaggtcagtaggtggcctccagcccagccctcagggccacccagtgctccaaagcatgtgggggccatcgtggggctgcctcaggctggtctccccaccctaggctggtctcccccgcaagactggtctcctcccccaggctggtctcccccacaaggctggtctcctcccccaggctggtctcctcaccaggctggtctcctcccccaggctgatctccccgcccaggctggtctcccccgcaggctggtctcccccgcaagctggtctcctcccccaggctggtctcctcaccaggctggtctcctcccccaggctgatctccccgcccaggctggtctcccccgcaggctggtctcccccgcaagctggtctcctcccccaggctggtctcctcaccaggctggtctcctcccccaggctgatctccccgcccaggctggtctcccccgcaggctggtctcccccacaaggctggtctcctcccccaggctrgtctcctcaccaggctggtctcctcccccaggctgatctccccgcccaggctggtctcccccgcaggctggtctcccccgcaagctggtctcccctgcaggctggtctcctccccaggctggtctcccccgcagactggtctcccccacaagctggtctccccaccaggctggtctcccccacatgctggtctcctcccactgcccttgccagtccctccctcctcaagtgtgggtgccaaggacggaccctgatgaacacctgcacatcagttgctgccctgggtgccagggtccacaggaagctgcactgggaaccctgtgtcctgggcaggtcctatgggaagtgcagcccacatgttactcgggtgaaggcagcgtccccacccagcttgaggacaccacacagggtggacacccgaccctggctgggccgctcaatggggagtggcttggacgcccctcttggagtacagtcgctacatcccgtagctgcctaatgtccttggcattctcgggccctggtcataatgtgggagtggctgcctgtgcacgccacgggcctccagcttcactgcctcaacggggccatgagccatcgcrggggcaggcagggtgctgggcacctcatcactagggcagtgacatcacaaggcgtggaaggcggtggtggctacggaactccgtgcctgggctgtttctgtggtgcctgcgggctctgggctcccacctccatggggctgcaggagccgtgagggacaaggagggacgcacccgccatggctgaaggcggcgagctgatgagccggctcctgagcgagaacgcggacctgaagaagcaggtgcgcctcctgaaggagaatcagatgctgcggcggctgctcagccagagctgccaggagggcggcggccacgacctgctcccacccagggcgcatgcctaccctgaggccggctcccccgggagcggaggtgaggcgccgcccagctcagatggcctggtagatgagggggtcgcgggacgcctgctccccgggagtcgagggtggcggccagctccctgatgcgggaggtcacgggcacctttcacaccctcaggtctgagtaaagcaagaccaggtggtgggttctgctgttgccctcaggtgaggcccctcccctccccttcggtcgctggcgaagtgggagtggtcaaccgctggcaggtggactggtcagctgcagtcatggaagtgtccccataggggtagagcaggtggcrcgcaggcttgtgggcctccagggccccaggcagctcttccaggctggtcctggctggcagtttgctctgctgcatgtgtctcttctcctgggtcaggggcgaggggggtgtcagaccagccacacgagtcccatgagtgctgtgtcccatccactcatgtccccggccagagccaggccagccccatggtgggaaggtcccaccctggggaggcctcagagccaccggccaggggagcaggtagggacaagtgggcgcctgtccctgcggggctgggagtgtggagccatgatccactcaccacatagcattgactccgaccttctgtggctttttactgaaaaaagtatatatatagggtttggtcactttctgcaaagtagtaggctttattctaaaaggtttgggaaaaacattacccgttcctgcatgtgatttggggtggggctgacagatgtacccttgactttttgttgggatggtgggcasaggacagagtccctgacccagcactgcctgggattcccacggccaacctcagcttcccaccgggccgggcccggaaaggacgtggtcagcctgcctggtcctggacgatggagcaggcagcctcgccagtgcccgtgaacactgctgtctgcgagcacgagccatgcccgggaggccagctctgccactcaccaaggggccgctccagcacctgtgctgggggtgggggaggttgcttcctgagtccttctcaaacgctggccaccaccctcagatgtgcactctgagcaggcgcagtgtgcaggaggcactctccgcagccaggccccaggccctgctcggagctccatggacaagcctgagagcgagcgtgtctggaagcaaagaggggaatccatggcatcgtccccacacctttggtctctggtgacaggcaggggctcctcgcagggagctgggaggagagcacctcgccaggatgtgcggggacagtgtggctggggaacctggcgcctgggggccatgctgtgcgaggccccaggttctgcgtctccatcagcggccactgagccccacgctcaccacagggcgtttgctgggcagacctgcgcttacggtgctgggccacgtgcagggtcccgttcacagcacttgtgaggcccgggcactgtggctgcaaaagggcccttaatctgtttggcgtgtgtggaccgccgcaggctgcgtgccccgggctgcgttgctgtcctcctcctcaagaaggaatcaccctgggccggacctcagggctggacagagtgctggtgcctcccctggcaggagaggggcagaccctcracccttgcccaggctgtgcagtccccagagggacccttgtcaggggctgagtccgggcggggtctccatgaccacggctgctgcccctgcccttgggtcatcttggcaaacccaggtcttgctggacacgggtcttgggaggagcctcaacctgaggccagcaggccttccacagagggccttggagcccccgccacagggtgtggggcaggctcagtgtggcccgggctggcagcggggaggggcctggacaagaccaccctctaaactctgccacttgagtggcagcgtgtggtgcacccttaatgctctgggcctcagcatgtgcttgggaatgtacctggggctgtgggacgctgcattcaggaccagccctcagcagaactggggttgggaagaccagcactgagcttctgcaaaaaaggagaagtttataaacaaaggaaccaccaccagcaatgtctgcatgttgccaagacttcattagcatctgtgttcaaaacaggatgagtaaaaacctgcttttcttacggattcaacaacacgtgctcatggtaaacttataaacgccatggagggtgcaacgtttaagcctcaggccacgcctccggccccctccgcaaaggcagccacaatcaacgttctcttgggttttctctggaactttagtggagatctgtgtgtctgtctgtgtatctttttggtccacctacacgggattgtgctgttccgcaacttgacttttcccccttaacgatccatttcgcggcattccccaccagtccttatctgcagatctccccggcacacttgaacactgggctccttctgtgggggccccaggcaggcagcactgttcccagttctctgcgaccgtggacgccgccgccgtgggtggcctgcgcaggcgccctgtggctttgtgtaggggatcccacacctgggtcctcgggtcaaaggctgtgtgcatttgaaatgttgaaacagacactgtcaaacgctctctgaacggtccctacaccccactgatggaggaggagggcactgcgccggcatcgttcccacgtcacaggagggctcatctgtccccgtcagctggggagcgaggtctccaggtcttctcacccaggtttacaagtgagtgacgcgaagggccagtgggagcagcagtcctctgcctcccctcccagctgccccatctcgtctccctcgggattgtcctggtccctccagcacggccacgatgccactcgccgtgtctccactggagaggtgtcccctggaggacagccaggcccccccagattgcccactcgctccctagttgttggtggtggattgtcagatgatttccaacagtggtgagaattctctatgtgcaactcctggtcactccttccgtctgacatgacagaagattgtccctgtgttgttaggtgtactttaaaatggccctgcaatattgccgattcggatgaaccacaatgtaatgaattctccctcagtttgaaattaaagtttttcttccccttgaggtaaatagcaccacaaaaaaggttttaagaatttttatatttaaggttatttccattggatttctttttttggtgtgtgtgtgattttttttacttttatggagatgggatcttctatgttgctggtcttgaactcctgggcttaagggatccttctgtctcgacctcctaaaatgctgggattacaggtgtgagccaccgtgcctggcccattatgtttttttctttttcagacagggtctatgttccccaggctggagtgcagtggcaatgatcatgactcactgcagcctcgacctctggggctcaagcaatcctcctacctcagcctcctgagtagcttggactacagtgcttgccaccatgagcggctagttaaaaattttttttttttttttgtagagacagggtctccctatgttgcccaggccagtcccaaactcctgggctcaagcaattctcccaccttggcctcccaaaccattgggattacaggcttgagccactgtccagctggatttatttttaaaaaatagaatcattgattcagaaggcaggagtaaatggttttttgtttgtttgtttttgagacacagtctggctctgttgcccaggctggagtgcagtggtgtcatcttggttcactgcaacctctgcctcctgggttcaagcgattctcctgccttgccctccccagtagctggaattaaaggcacacaccaccatgcctggctactttttgtatttttagtagagatggggttttgccatgttggctaggctgatcttggactcctgatctcaggtgatccacccacctcggcctcccaaagtgctgggattacaggcatgaaccactgcacctggccatgtatttcttttttaaaaaacttttaagttcaggggtacaagtgcaggcttattacataggtgaacttgtgtcatgggagtttgttgtacagattattttgtcactcaagtattaagcctagtacattcgttattattcctgatcctctcccttctctcacccttcaccatctggtaggtctcagtgtctgttgttcccctctatgtgtccacgtgttctcgttgtttagctcccacttataagtaagagcatgtggcatttggttttctgttcctgcattagtttgctgaggacaatagcctccagctccatccatgttcatgcaaaggatatgatctcattctggttttttttttttttttttttttttgagatggagtttcactcttgttgcccaggctggagtgcaatggcacgatctcggctcgctgcaacctccgcttcccgatttcaagcaattctcctgcctcagcctcccaagtagctgggattacaggcatgcaccaccatgcccagctaattttgtatttttagtagagatggttttcaccatgttggtcaggctggtctcgaactcctgacctcaggtaatccacctgccttggcctcccaaagtactgggattacaggcatgagccactgctcccggctgatctctttcttttttatggctgcataatattccatggtgtctatgtacaacattttctttatccaatctaccactgatgggcatttaagttgattccgtgtctttgctattgtgaatagtctgcagtgaacatatgcgtgcatgtgtctctataataaaatgatttatattcctttgggtaccattaatggaacccaaccagtaatggaattgctgggttgaatggtatttctgtttttaggtcttcgaggaatcgccacactgtcttccacaatggctgaactaatttatgctcccactaacagtgtataggcgttctttttctctgcaacgttgccagcatctgttgttttttgacttgttaattatagccattctgactggtgtgagatggtgtctcattgtggtttttatttacatttctttaataagcagtgatgttgagccttttttcatatgctcgttggctgtatgtatgtctttagaaaagtgttcatgtcctttgcccactttttaatggggttgtttgtttttttcttgtagatttctttaagttccttatagatgctgaatattagacctttgtcagatgcattagtttgtaaaaattttctcccattctgtaggtttgctgtttactctgttgatagtttattttgctgtgcagaagctctttgattagatgccattagtcaatttttgcttttgttgcaattgcttttagcatctttgttgtgaaatctttgcccatccctatgttctgaatggtattgcctaggttgtcttccagggtttttatagttttgagttttacatctaagtctataatccatattgagttgatttttgtatatggtgtaaggaaagggtccaatttcagtcttctgcatatggctagccagttatcccagcaccatttatttaatagggagtcctttcctcattgcttgtttttgtcagatttgttgaagatcaggtggttataggtgtgcaaacttatttctgggttctctgttccgttctattgatctatgtaccgtgctgttttggttattgtagctctgtagtatagtttgaagttgggtagtgtgatgcctccagctttgttatttttgcttaggattgccttggctattcgggctcttttttggttccatatgaatttttaaacagtttttttctagttctgtgattaatctcaatggtattttaataagaacagcattgactctataaaattactttggtcagtatgaccatttttatgatattgattcttcctatgcatgaacatggaatgttttcccatttgtgtaatctctgatttctttgagcagtgttttgtagttctccttgtagacatcctccacctccctagttagctgtattcctaggcattttattctttttgtggcagttgtaaatgggagttcattccatttgatttggctcttgkcttgattgttgttggtatataggaatgttagtgttttttgcacattcattttgtatcctgagactttgctgaagttgtttatcagcttaagaatctaggttgagactatgggattttctagatataagatcatgtcatctgcaaacagggatagtttgatttcctctctttctatttggatgggctttatttctttctttggcctgattgctctgatcaagacttccaatactatgttgaataggagtggtgagagagggcattcttgtcttgtgccaagttttgaggggttgagttttgatgttggttgtgagtttgtcatacatagctcttactattttgaggtatgttccttcaatacctagtttattgagcgtttttaacatgaaggggtgttgaattttgttgaaagctttttttgcatctattaagataatcatatggtttttgtctttagttctgtttatgtaatgaatcgcatttattgatttatgttgaacctaccttgcatcccagggataaaacctatttgattgtggtggataagctttttgatgtgctgctggatttggtttgccagaattttgttgaggatttttgcgtcaatgttcatcaaatatattggcctgaagttatctttttttgttgcatctctgccgggttttgttatcaggatgatgctggcctcatagaatgagttagggaggagactctcctcctcaactttttggaatagtttcaccaggaatggtaccagctcttctttgtacatctggtacaattcagctgtgaatccatctggtcctggctttttttggttggtaggctatttattactgactcaattttagagcttgttattggtgtgttcagggattccatttattcctagttcagtcttgggagggtgtatgtgtccaggaacttatccattttttctagattttctagtttatgtgtatagaggttttcataatattttctgatggttggttgtatttttgcggggtcagtagtaatatatcccttatttctgattgtgtttatttgaatcttttctcttttcttctttattagtctagctagtggtatatctattttattaattttttcaaaaaaccagctcctggattcattgatgttttgaatagtattttgtgtctcaatctccttcagttcagctttgattttggttatttcttgttttctgctagctttgggatttgtttgctcttaattctctagttcttttagctgtgatgttaggttgtttgactgagatctttccaactttttgatgtgaacatttaatgctataaatttccctcttaacactgccctagctgtgtcccagagattctggtatgttgtatttttgttctcatcagcttcaaggaatttcttgatttctgccttaatttcactgtttacccaaaagtcattcaggggcgggttattcaatttccatgtaattgtgtggttctgagtgaattttttaggcttgatttctaactgggtccgttgtcgtctgagagattgtttgttataattccagttgttttgcatttgctgaggagtattttacttccaattatgtgattgaatttagagtgtgtgccatgtggcaatgagaagaatgtatattctattgttttggrgtggagagttctgtagatatctgtcaggtacatttgatccggtgctgagttcatgtcctgaatatcttttttaattttctgtctcaattatctgtaatactgtcagtatggtgttgaagtctctcactattattatgtgggagtctaagcctctttgaaggtctctgagaacttgctttataaatcttggtgctcttgtgttgggtgcatatatatttagtgtagttaggtctgcttgttaaattgagcccttcaccattgtgtaatgctcttctttgtcttttttgatcttcattggtttaaaatctgttttgtcagaaactatgattgcaaccctgcaatcatagttttccatttgcttggtagatttttctccatgcctttattttgagcctatttgtgttattgcatgtgagatgggtctcttgaagacagcataccaatgggtcttggttctttatctagcttgccattctgttttttttttttttttgttttkttttttgagacagagtcttgctctgtctcccaggcaggctggagtgcagtagcacaatctcggctcactgcaacctctgcctcctaggttcaagtgattctcctgcctcagcctcccaagtagctggaattataggcacccaacaccatgcctggctaatttttctattttttagtagagatgggttttcatcatgttggccaggctggtcttgaactcctggcctcaagtgattcacctgcttcagcctctcaaagtgctgggattacagacatgagccaccatgcctggtctgtttgatgaccttgaggttttgattgtggtataaggtggattcagccaactggcttcatttatggaatatttaaggggccagtgcccagctgccaactcctggactctgcatgctctagctctgggggacttgttttgggccctgactttgttctctggctccttgaggtttggaatccactgcactggggggctgaggtactgcagctacagcagagtggctggcagatgcagagtgcctgccttcctgtgggggttcaccacagtggtggaggcaaagcagctggggtggggatggggggctcctgttggagactgtgtgcagttactctggaggtactataggcatgggtggggtgctggttggcacaggtctaggtgccttttctgtgccctgcaagcaggagtgatcgctcagggtgggggaggatccactgttctctgctcagtgttaggtcaaaggcagggttctggygggtatggggcttgctggctctgtgtctgccaaggcttcayctgcaatggaagtctgtagggaaaggggaggcccactggactcctgcatgctggtgggggaaggaaatcaaaacccacctgtgcagacatcagcagagtgatgtggggagttgcctgggcccaggggaagctacaatatgaggagggagcaggcaggctggtgtgtggccgtcggggctgtctcactggagctctccactggccaggcacagtctgccggcacagaagctatggtgaagacccccagggcacccaagactgccctgcaagcaggcatggccaggctggggccccaggagaggccagcagacgaaggggtgctcaggttggactggtcccatctgatgggtaagaccaccctgcagagaacaggtctgacagttcccctaggtccaaagtctcctgtgggagcaaatcaagcctgggggacggccgtccctggctgtgttcctgcaccagaccctctgggttctgcttcagctggctgctgcccccaccacttctctaagcagctctccctgccaactagagtgtccatggtgggcaaggggtctcccccagctggggttccagaggcccatggcaacagtgggttgctccttgcccgtttaactcccccatttccccagagctgttgtgggtccaaaaatgagcaccagtgctcagtagtcccaggcaggttcccagctttctcaccttcagcccagcttctgtgtgctccctccatctgccctcagcaccttccctctgaagatgtgttagaagctcaccagtcatctcaggccctccgtgggagctgtatcatctggctgcatctggccggccatcccgcccttccaatccacatgaacttcttatttctgtctttgtccttattactcagaactcgggccttggccttgactttcatggggcctcstccagggaaggtgagagagggttttggccgcatcctggtcctcctgaccagctgtgggaaggaccaacggtcccatctgcccagaggagggaggtttgcacaggctggatgctgtggaagagtccttcctgttcttatttttggaaaacagaaaatttgagaaatggctcatcttgttcggtgtttgtgagcctatctctgtaccagtggaggtawctcagcttcttgccagggaccgtatctggtatcttgctacgctgcacagccactgggttcygcacaccctgcctcttgctctccaccccaccgcctcgtgctctgcacacacccctgcctcatgctctccacccccatcttgtgctctgcacacctccccgctttgtgctctgcacaacccccgcctcacgctctgtgcatcctccgcctcacgctctgtgcatcccccgyctcacgctctktgcatcccccrcctcrygctttgcataccccsgcctcatgctctgtgcatcyccygcctcatgctctgtgcatcccccgcctcatgctctgcacycctgcctcatgctctgtgcacactcctgcctcgtgctgtgtgttcttgatcatgtttggatgagactttgtgcaattatttttggcctggccatggtttttttttttttttttttttttctgggggttatctttgtaggaatttgacatcagagttgtgacaaattttgaaacctaattgagcatcttttracctgttctacrgttccagcctcatttgtatgatgtcgggattatgacttgtttgggaacttggcacactcacccacagaccatccaggcctgcagccctctggggaataatcatttcataacttttagattttccttctttgtgtattggttcatttaggttttctacttcttattgagtcacttgaaagtaattttccaggctatctccttttattgaaattttaattaatacataattgtacataatattcttttataatttgaaaagtgtctggggtggggggtctgtgaagcctgaggactccaggcctcccaygtggcaggaggccgggcacacgctgatgactttgcttctttcgaactttttttccttggaaaacatttcagagggaagattagttggttcctttgtaggcacattttttttttttttttgagatggattcttgctctgtcgcccaggctggattgcagtggcacgatcttggctcactgcaagctccagtaggcacattttaaggtataattttttgatatggctccgaacactttctctaatatgtatttgctttattgctaggagaatacacatgacatggaggtagaatagaatttcataagycataaaggcatagataagctaaatttgrccagggattggggaaatgccacatgacctcatcagcctggttggggaatattcagtcctcatgagggtgtggggccaggaggtgttggtgggcatggaccctcccccttggtgtggaaagcaaagaaagtgaacacacctgagcccagcgtcrgaccacagaggatgttcacagagcaggaggctcctccccatccacaaaggatgttcacagagcaggaggctcctccccatccacagaggatgtttacagagcagggaagctcctccccatccacagaggatgttcacagagcaggaggctcctccccatccacagaggatgttcacagagcagggaggctcctccccatccacagaggatgctcacagagcagggaggctcctccccatccacagaggatgttcagagagcagagggctcctccccatccacagaggatgttcacagagcaggaggctcctcctggaccacagaggatgctcacagagcaggaggctcctccccatccacagaggatgttcacagagcagggaggctcctccccatccacagaggatgttcacagagcagggaagctcctccccatccacagaggatgttcacagagcaggaggctcctcctggaccacagaggatgctcacagagcaggaggctcctccacatccacagaggatgttcacagagcaggaggctcctcctggaccacagaggatgctcacagagcaggaggctcctccccatccacagaggatgctcacagagcagggaggctcctccccatccacagaggatgttcacagagcaggaggctcctcctggaccacagaggatgctcacagagcaggaggctcctccccatccacagaggatgctcacagagcagggaggctcctccccatccacagaggatgctcacagagcaggaggctcctccccatccacagaggatgctcacagagcagggggctcctccccatccacagaggatgttcacagagcagggggctcctccccatccacagaggatgctcacagagcaggaggctcctccccatccacagaggatgctcacagagcaggggctcctccccatccacagaggatgctcacaaagcaggaggctcctccccatccacagaggatgctcacagagcagaggctcctccccatccacagaggatgctcacagagcaggggctcctccccatccacagaggatgctcacagagcagggggctcctccccatccacagaggatgttcacagagcagggggctcctccccatccacagaggatgctcacagagcaggggctcctccccatccacagaggatgctcacagagcagggggctcctccccatccacagaggatgctcacagagcaggggctcctccccatccacagaggatgctcacagagcagggggctcctccccatccacagaggatgttcacagagcagggggctcctccccatccacagaggatgctcacagagcaggaggctcctccccatccacagaggatgctcacagagcagggaggctcctccccatccacagaggatgttcacagagcagggggctcctccccatccacgaggatgctcacagagcaggaggctcctccccatccacagaggatgttcacagaatagggggctcctccccatccacagaggatgttcacagagcagggggctcctccccatccacagaggatgctcacagagcaggaggctcctccccatccacagaggatgctcacagagcaggggctcctccccatccacagaggatgctcacagagcaggaggctcctccccatccacagaggatgctcacagagcagggggctcctccccatccacagaggatgctcacagagcaggaggctcctccccatccacagaggatgttcacagagcagggggctcctcctcatccacagaggatgctcacagagcagaaggctcctcccgggaggccgattacagctgtgtgtttgcacggaaacatggaaacargccctgtccatcaatagggcaagggttaaaaattcagtgtgtgtgtctgtatgtgtgctcatgtgtacagagttgccaggaaacagttaaatgaaccaggtagctaccagatggctcagggtggataaatctcaaagagataatgcagcagcaaaaagttcagttgcagaataaaatgtgtagggtgctaccatttatgtacaacttaagcatataaaagtcattctccagtgtgtgtgggcacacaggcaggcaggaggcacacggaggcctgcccgcttgctgtgcccatagacgcagtgctcccacgggcaggatgggcacctgtggccacttcaccacatccagctcctccttttacacttgaggcctgaggggaaggaggatgctctgaagccagggaaaccccggcaggtgttgaagcttggggtggggtgcataggggttgttaayatgttctttatacttcccaggaatgttttaggagcatcagcctgatttctcatccctttcctccccgcctcagttccagatttcggaaggttcacgagtgttgccgacacgccctcccaactgcagacatcctccctggaggacctgctgtgctcacatgcccccctgtccagcgaggacgacacctccccgggctgtgcagccccctcccaggcacycttcaaggccttcctcagtcccccagagccacatagccaccgaggcaccgacaggaagctgtccccgctcctgagccccttgcaagactcactggtggacaagaccctgctggagcccagggagatggtccggcctaagaaggtgtgtttctcggagagcagcctgcccaccggggacaggaccaggaggagctactacctcaatggtatggccgggtgcgggggcacctgggggggcccccagtgcaggctggcagctgtggggagggcatgactgggtggtcaggcagggccrtttctccatccagtcacacagagtggagggaggagagccaggctgggaggctggggtccaaggctgtgtctgtcctagtcttttgtccatctttaaagataaaatgggttgcttatcttcttcttgggaagttgtgagagttctttatgtgtctggatatgagtccttttttgggtgtatgttttgcagatacggtctcccactccatggtttttcattttcataataatgttttttgatgagcaaaactgtttaatttgatgatgtccaatttattgatttttcttttgtattttatgctttttatgttcagtttaagaaatctttgccaagcccaaggtcacacagattctctcctgtgtgttgttctagaagttttatagtttaggttttacatgtaggtctctgatcaattccaagttaattttcatatatggtgtgaggtttgcatgtagatatccacctgaggctcaggccagcctcccacctcagcctcccaggtatctgggactacaggtgtatgccaccaggcctggctaattttttggtttttgtgtttttgttattgtagagatgggattttgctacgatgcccaggctggtcttgacctcccgggctgaagcaattcgcctgcctcggcctcccaaaatgctgggattacaggcatgagccaccatgcctggcctgtcaattttatttatcttttcaaataaccgattttttgttacattgatctgttgtattgttttcttcatttaaatttcatttatttcttctctgatcttaattatttttcttctaattttggatttggtttgctcttgcatttctagctctgtaagatgaatcattagcttatttgaagtttttctacttttttgatataggcactcataactataaactcttagcacttacagctatagctcttagtatggcttttgctgaatctagtacatagtaggttttggtgtgttgtgtttccattatcatttgtttcaagacatttttaaaatttccttcttaatttcttcactgatgcactggccatccagragcgtattgtttaatttctatgtgttggtataatttccaaaattccttttgttattgatttcattttattccattatggtcggagaagatacttgatataatttcaatttttttgatttttaaagacttgttttgcagcctagcatatggtctatccttgagaatgatccatgtgctaatgagaagcaggtgtattctgcacctgttggatgaaatgttctgtaaatatctatcatgttcatttggtctatagtatagattaagtctgatatttctttgattttctgtcttaaagatctgtccaagggtgaaaatgcgtattgaagtctccagttactattgtactggggtctgtctctcgatttagctctagtaatatttgctttacatatctgggtgctccagtgttgggtgcatatatatttataactgttatatcctcttgctgaattgacccctttatcattatataatgaccttctttgtctcttgttatagtttttgtcttgaaatccactttgatataactatggctgctactgctcttttttgttctcatttgcatggaatatccttttctatccctttattttcagtctgtgtgagtctttataggcgacgtgtgtttcttgtaggcagcagatggttgggtcttgttttttttttatccattcagccactccgtcttttgattggagagtttagtctatttacattcaaagtttcttggttgtttttgaccaaactcacatactatcattcatcgatttgactgtgctgtaatttttttttttggagacagggtctcactttgatgcccaggctggagtgcagtggtgcaatcttggctcactgcaacctccgcctcctgggttcaagtgattctcatgcctcagccacccgagtagctgggattataggtgcgtgccaccacgcccagctaatctttgtatttttagtagagatggggttttgccacattgaccaggctggtctcaaactcctgacctcaagtgatccgcccacctcagcctcccaaagtactgggattacaggcatgagctactgcacctgcctatttacattcaaagttattattgataaagatttactcctgccattttgttatttgttttctcattgttttgtggtcttccctcctctttatctagaagagtttgtgttgaattggtgttatttattccttaagtggtagaattcaccgctgaaactacccgagccttgaatggtctctgtgggaacattttccccctacaaattccattttattgataatgtcaactgaaattaaggctgttgagacaaataattcgataaaggtttattggaagccaaatgtgaggatcaacccagaggaacacaccaacaaagttgagagtgttctggaatctaagtcagaaggtttctataggagaggctaggaggagggaaaggactcctcatactcatgtctaagtcagaaggcttctataggagaggctaggaggagggaaaggactcctcatactcatgttgtccttttctagtcagaaggtttctataggagaggctaagaggagggaaaggactcatactcatatctaagtcagaaggcttctacaggagaggctaggaggagagaaaggactcctcatactcatgttgtccttttctttggagggtacaacacagaggttacaagcattggctacagatgacaacatacaggtcaacacatctctgtgcaagacagtcagtaaacctttatgattcaggaataaatcagcatcttttcagtccattaatcagcacatcagcaatctgaggaaatcatgataagattctttactcagggaccattaatcataagaccttcccaagcaggccagtttggaagtctgtttacttttaaactgtcaaatgtgacctgtaaggttatcagatataaggctattcagagtatctatttcttcttgagtgaactttggtagtttgtgtcttttaaggaattggtcaatttcatctaggttgtcaaatttattggcataaagtcattcctaatacttccttattatcctttttatgtctgtagaatctgtggtagtggcatctctaatttctgctagtggtaatttttgtcttctttcttttttcccctaagtctggctagaggtttatcaatgtatggcctttttcctttgaagaacaggtttttggctggatcttacagagcccaggttggactagaaatcatttctagaacctatactagaatcatttctcttctataggatgtttcttctacctcatttttgccttggtggggggatgggagaaagagcttgattctttttttttttttttttcttgagatggagtctcgctctgtcgcccaggctggagtgcagtggtgcgatctcggctcactgcaacatccacctcccgggttcaagccattctcctgcctcagcctcctcagtagctgggattacaggcacccgccaccatgcctggctaatttttgtatttttagtagagatggggtttcaccatgtttgccaagctggtctcgaactcctgaccttgtgatccacccacctcggcttcccaaagtgctgggattacaggcatgagccaccgcacctggccaagagcttgattcttgatgagagaaatacattgatacagaaggaggagattacacctgctcttccacacccctcattggccctaacacacttctgtgcagtgtgttgacatacctcttctgcagtcttgaaaagtgattgggaaagaaatacactgaaaactacaaacatcactgaaaggaatgaaagaagacataaatgaccaggcacagtggctcacacctgtaatcccaacattttggaaggctgagatgggcagatctcttgagcccaggagttcaagaccagcctcagcaacagggcgaaaccccatctctaccaaccccccaccacccaagttagctggtcgtggtggtgcatgcctgtagttccagctattcaggaggctgaggtgggaggatcactcaagcccagaaggtagaggttgcagtgagctgagatcgtgccactgcactccagcttgggtgacagagcgagaccctttcttcaaaaaaacaaacaaacaaacaataaataaataaacagaaaaacaccttgtgttcacagattagaagactttatattgttcaaaaatcaataattttgatatggattacattggatctgcagattcatgcaatcccaatcagaatcctagtggcttctttacagaaattgacaagcagaaactgaaattcatatagaagtgtaaggaaccagaataagtaaaacgatcttgaaaaaggagaacattgagggactcatacttcccagtttcaaaattgactataaaacttacagttaacaagactgtggtactgccataacgatggacatacagatcaatgcaatggaatgggaaggtcagaaataaaactgtacatagatggttttcaacaagagtgccaagacaattcaggagggactgaatactgtctaacgcgtggtgctggaacaaagaggtatccacatgccaaggaatgaggctgggccttactccacaccacatacacaaattaactcaaaatggatcaaagacctaagaggtctcaaagagctgaggccagaaaacttgtagaaaagacataggggtaaatcttcgtgaccttggatttggcaatggattcttagagatcacatcaaaagcatgagcaaaagagagaaacagacaaattggacttcatcaaaagtaaaacaaaacaaaaaaacaaacytttgtgcttcaaaggacagtatcaaaaaaatgaaaagccaacccggagaatgggagaaaacatttgtaaattgtgcgtttgaaatgggactagtatgcagaatatttaagaactctgacaattcaacagtaagaagacaaacaatccaatgaaaaatcactacaggacctgaatagatatttctccaaagaagatacagtatataaatggccaataagcacgtgaaaagatgctcgaatcactagtcgttagtgaaatgcaaatgagatactgtttcccgtcctccaggaaaaagatggacaaggtcatgtgctgttacggactcggatgccatcagaggctgtcctggggaggggggttcggaagcaggttttgtgggagcattgcagtctcctaagtaatgttgaggaagtaattaaagtagaatgtcctgggccaggtgcggtggctcacgcctgtaatcccagcactatgggaggctgaggtgggcggatcacctgaggtcagcagttcgagaccagcctggccaacagggtgaaaccccagctctactaaaaatacaaaaacttggctgggtgtggtggcacgcggctgtagtcccactactctggaggctgaggcaggagaatcgcttgagccggggaggcggaggttgcggtgagtggagatggcgccactgcactccagcctggatgacagagtgagactctgtctaagaaaaaaaaaaaagtcctgccaacccagcggtccttttctcagaggtaggaaagaatgaagcagttttattgaataaacattaaagcagcctttgatgcccagaggttgccaagacagaagaactctcccccttcctcccagccaagccgaccggccctgttccacgggcgtcctcactggaggggacccgtcccaactcagacctccagggccgggttcctctgtcctcgcaggggccgacgctggggcagactcccgcgtgacaggggaccagtccccacccccgagattaaaaggtttacctcatcgcaaagggacagaagggagccgaggacagggggaagggaaggctggcttgccctttggcactttaagaagctccttttctttcagattctatttgccagacagtggrgggtggcggcaggtgggaggaggggggtggaggagccgccccccacgtggccgagggcaccctcgagggcagtggatcctcgcgctcccctgaccttgtccccggccttccctcccccagagatccagagcttcgcgggcgccgagaaggacgcgcgcgtggtgggcgagatcgccttccagctggaccgccgcatcctggcctacgtgttcccgggcgtgacgcggctctacggcttcacggtggccaacatccccgagaagatcgagcaggtgcgccccgtggggagggcgcggccaggagggtgcggggcgctcggtccgtycctgtgcggcccccagatcttggctcctggccgggcactgtcygcaggaggggaccccggggacccaggcgggcggggcagggatcggccctgggcctggaagtccccgtccgagggccccgagccccccacccccatccatgcgctgcgcccgcagacctccaccaagtctctggacggctccgtggacgagaggaagctgcgcgagctgacgcagcgctacctggccctgagcgcgcgcctggagaagctgggctacagccgcgacgtgcacccggcgttcagcgagttcctcatcaacacctacggaatcctgaagcagcggcccgacctgcgcgccaaccccctgcacarcagcccggccgcgctgcgcaagctggtcatcgacgtggtgccccccaagttcctgggcgactcgctgctgctgctcaactgcctgtgcgagctctccaaggaggacggcaagcccctcttcgcctggtgagccgccccgcgcccgccgccttgcctgcagtaaacgcgtttgttccaacccggggccgcggtgcctcctgcgcrtccccccggaggggaaagggccgcgtcccccgcgcgcgaggccagagaaggccccgctcccaccggtgctgggccccgaccgcagcccgccgctgcccgcacctgcggagtgcttctcacccctcattaaaatcatccgtttgcatgtctgcctttacctctggctctttgagggcgtggagggcgcctcggccgctgctccgcctgcaggaagcgccgctcggtgctcaaggagggaagccaggaaggagccgcagccggcaggggccccctcttccccctccccccttcccctcccccgggcctccacgcccacccgctttcccgcccgggacggcgagtcctgtcccagtttgggtttccccgaatgccgagctggggcaaggacttggttctggcggatggttgcgcacccctgccggcaaaatggaaacgcagccccttgttcaaaagcgaagaattcgaaagggcaacagccgcgttacagtgaacccggaccttagggctgagcagtggcaacgcaggcgggagagcgccggggagccccgagaccgtgggggtgctgggggtgggcgagcacaggggagccccggagaccatgggggtgccgggggtgggcgagcgccggggagccccagagaccgtgggagtgttgggggtgggcgaggacaggggagccccgagaccgtgggggtgccgggggtgggcgagcgccggggagccccggagaccatgggggtgctgggggtggacgagcacaggggagccccggagaccatgtcaggtgcaccttgcaccatcccggagcggggagctggggagctgacccatcaattcccctccccctgggtcatctccctgccggaggccggaacagcgagaagacgggccctcagtgaattggcgggaccttggggctgaggagatacccagttccaaagtgccctggaacgaggggcatttaccgtgtctcaggggagtcttggctcatgctgcacaagccagcacgctcagcctggtcctcacactgtctcagcaatagtggcgaggatggcagggctgtcacacattaacagttcagagctcgatggagactgctggggaccccactctggctggtagctacaacattcagctcccaggtgcagatgggctggatcctggggtgcgggcccaacctcatgcccggcagacgaggggcccactggcctgagaagctctggctgggtgctgatttctggccttacctttgagggtggcctgtggccacaccggcagtgggctggctctgtggctgggtgctgatttctggccttacctttgagggtcgcctgtggccacgccggcactgggctggctctgtggctgggccaggagctttgggccccaggcctagggctgcagccacacagtctcggccaggtggtccatgcccccttcccctcggtgccagcgagtggatactttcagcaagcctgggataggaagggctgtgatgaaacgcaccaggatttatttcagttgggtgtggtgggatacagacacaggacccctgactttaaaggagagtgtgtcacaaagtactgcagacccagctacttaaaccacaggagggcacgtaccgtgccacacagggccgcccggggcggggcgccgtggcaacaggacgcagaaggcgagaggggagagcatggccagaggctctgtgggggtttccctgggaagagaggccagggagggtaggcacgaaggagcaagtttaggattggacaggttaatttccctgggctccgggctatggggtggtgtctagttgaccaccgtcctgccccagggtgattgagggcagaggaacatgggtttggtgagtgagtcagataaggggtggttgggtttacaggctccaggtgggttggcttgtgccttaaaggggagctctgtttgcaggcaccttttgctgtctctaggaattagccagtcctgggagggcagtctccacctagccagtaaggcccccgagaggtcaaagcattgtaaaccagaaaacaaaaaccatatgagttatacaggaacagtctggtgggcaggtggcattcagcccctgtgctctgggtctctagaagaatggggttctcagcctctggccatgggtcccccaaacagccttagtgtcttccaggctcttgggcttggcttggagtggcccctgggggctttggctggggcggtgcccatggctcaccctctgtccatatagtggggcccaagttgtccactgtgctgggctagcctgggggggccctgtggtcagaagctagacccccaccctggcagtgccaccccctaggcccctaagctgcaggtgcacgtggaactttctggagggctcccgtgcagagagggtgaagcccattcctgcactttttcttactgtactattaaaatgaggagaaatgggaacagggtgaggagggtggccctgaagtggctggcgtggccatgtctcctggggcagcacccgggccctgggcaccagctcttccatctgtagacgggagggcagtgagcttctaggggatgatttccacctcctgggacggaggtgggcaccggcccaagtgaactcggattctcctgcacacagcttccgtattcagtcatttacttatgggcccactatgtttgtctcatactctgggttagaaaagtgtatggcctgcctggccctggaatcagtagccctgggcctgtcactggggagagatggtggaaaccctggtgtgggcatagctgagattctttctcctgtaagtggggtcccttagggtccccgattcaggagctatttacagcacctgccagcatttctaatgtctcagtgctgcccctgagaaccagcgccggcgtcacaaccagccccattccccctcgtgttctcagctgtagccaagccctggtccagcagtagctgggtaggaaatgcatgcagctcctgccggggcctcccgccccaaccctctctcctgacaggcgatttgctgggctggaggacagggccaggtcttggccttggcaccgtcctgggtcacgagtgtatggttctggtcactctgctgtggtgcgaggatgaaggtgccagcccagtgtgggcaaccctcacagccagaatgttccagtgccccgcacctcgggaccctggatgtgtgcggctgccgtcacaaagtaccgcagacccagcagcttaaaccacagaaatttattctatcacagtcctgaaggcccagagtacaagatcaaagtgtctgcagattctgtttgtctgaggtctctctgcttggcttgcaggcggccgcctccctgctttgtcctcctggccttttctctgagtgcatccctggtgtctctccctcttctcaccgccctgtccatctccacatccaatccagtcggcggtgctgggggtaatccagtctgccatgctggaggtcaggccttcagcagatggtttctcgagggaatgcagtgcggccctcaacagaccccatcctcccctcctggcctccagacatggatccctgactccatcctccccttgaggctccacagagctctgaccccatcctcccctcctggtctccctccagacacagatccctgaccccatcccccactcccagcctccagacgtggagccctggctggggaactctgtgtgctcccagcctctgaaggtttctgggcttacctggctcctgtctcatcccagtccccctgagtagccacggaggtggggtccctaaggcccacatggttggggttccattaagaacttcaagtgggtggctcacgcctgtaatcccagcactttgggagaccgaggtgggtggatcatgaggtcaagagatcgagaccatcctggccaacatggtgaaaccccatctctactaaaaatacaaaaaattagctgggtgtggtagcgggtgcctgtagtcccagctactctggaggctgaggcaggagaatggcgtgaacccgggaggcagagcttgcagtgagccaagatcgcaccactgcactccagcctgggcgacagagcgagactctgtctcaaaaaaaaaaaaaaaaaaaaaaaaaaagaacttcaagtggggctgggctcagtggctcacacttgtaattccagcactttgggaggccgaggcaggaggatcgcttgagcccaggagtttgagaccagcctgggcaacgtggtgagacctcatgtgtatttgtctgataaagacatacgcaagactgggtaatttttaaagaaaaagcagtttaatggactcaacagttccacaatcatggtggaaggtgaaagaggagcaaagtcacgtcttacaagagggtgtgtgcaggggaactgccctttataaaaccatcggatctcgtgagaccattcactatcacaaaaacagcaccggaaaaagccgcccccgtgattcagtgacctcccaccgggtccctcccatgacgtgggaactatgggctctacaattcaagatgagatttaggtggggacacagccaaaccatatcaccatgtctaccaaaaatggaaaagttagccagtgtagtggtgtgtgcctgtggcccagatgctcaggaggctaaggtgaaaggacctcttgagcctggggaccaaggctgcaggaagccatgattgtgccgctgcactccagcctggctgacagagtgagactttgtctcaaaaaaaaaaaaaagagaaaatgataaaagcactgcaagtgggcagcggctgaacgtggagacaggagttctcccttctgagcacggccctggtgccgctgacttcgtggggagcctgtagtcaggggagcagcagctggggagagctggggtctcagctgccttcccccatatcgcacatgcccgtctcgtgtgtatctgcactctcacacgcgtgttcccctgccctgcgctcacatgtatctgcactcactctcacatgcttgcttcccctgccccatgctcacgtgtacctgcactctcacacgtgtgctcccctaccccacactcacatgtatcctcgctcactctcacacgtgttcccctgtcctgtgctcacatgtatccacgctctcacacatgtgctcccctgccttgtgctcacgtgtatctgcactctcacgtgttcccctgccctgccctcacgtgtatcctcactcactctcacacgcgtgctcccctgcactctcctgtctgagctgagctgacctcagttgggtgctgcgagccagggcctcatgctggcctctcgccctccacagccccaggggtccaggctcctccaggaacaaacgcaggccccacgggctgcctggaaggcctcccagaaggcagcacagggtcacgagggtcacccgcagtggcacagggaggcctcgtcacgacaggattccagccaggctggcctgatgctcctgggggtcctcggcacatgccccttcaccctggcatgtgcttcttttccgggaacccacactctggctgagtggagccatcccctctgggtcaacagcacccggggtggctctgcagcaccccactccgcggctgcacagggaccttggccccactgctccttgtgccttgctggttaatgagaagccggtggggaggtgctgccggtgagcgtataaaggccctggcggcggctgcggagcactggccctgtccttccatctgcccagagaggagcatctggatcaaggtgctggccatgtcccagctggtggaatgcgtccccaacttttcggaggggaagaaccaggaggtgaggcccgaagagctggtcaagcatctagggctgatggggcagcttgagtggctaaggcccaggccatggaggaggtggtgggcttggtgtcccgggtcgtcttcccaggatgggcagagccgctgcccgtgggccccaaggacatcccgtggctcagggccctggggagtgcctgacccaggggtgggtggaacacgactggtgcttgtgggggctgaggcttggctgtggcttcaggggcctttcgggtgctttcggtggggggttgggcagatctctgggcctcaaagggccttggtgctcccccctgaaaatggggcr

SEQ ID NO: 98149 - DNA, 93784 bp, Homo sapiens
cactgaggagtacacagggctcccttgctgattaagtttatcttatttttaagacccctagcaagagacttaaggttcgaacactcatgacccaatgctgcaataattatgtatctatctgtggtttgtttttgtttttgagacagggcctcactctgttgccaaggctagagtgcagtggcacaatctcagctcactgcaacctccgcctcccaggctccagtgatccttccacctcagactcctgagtagctgagactataggcatgcgccaccattcccagctaatttcaaaatttttttgtagagacaaggtctcactatattgccctggctggtctcaaagtcctggactcaagcgatccttggcctcccaaagtgctggaattacaggtatgagccaccatgcctgctcaattatgtgtctatcttaaaagtaaataaataaaaaatgtgatcaaagcttgcaattttcctatccttcagaaaataaatgttccttagcacctaatacatgggtatagagtgaatatagtaaataataaaatgctgaaagcatccagtaatgatttaacatgggtatctcataacatcacactgtatttcttaaatatacataataaaatttattaaaaattaaaattaagaaattgaattggatgtatatagacttattataacacaagtactgacacactacattgaggacttcagaaataaacgtctgtgcaattcttgcccttttctagcactgtttggaccactaattcctgcctagaatataaggtaaaaatctgcgacctcacagatttgtttcagggttagtttacatcaaaatgtacaaaagtcccctccttctatccaagaggcttcccaatacacccaacactgagccgctggggtggctgaataagacagaaatcctttaaaatgaccccaaatgtgatctgaacctaaaaattataggcactaaaaagttacaaatcagtggggccatttgaggagacaaactagaaatcttgctggtcaagtgttgcaggttgggttcacctagaaacagaccctgaacaagtgatttttttttttttttgagacagagtcgctctgttgcccaggctggagtgcagtggcgtgatctcggctcactgcaacctctgcctcccgggttcaagccattctcctgcctcagcctcccgagtagctgggattacaggtgcccgccaccatgcccggctaattttttgtattttagtagagacagggtttcaccgtgttgcccaggctggtctcaaactcctgagctcaggcaatctgcccacctcggcctcccaaagtgctgggattacaggtgtgagccaccgcgcctggcctgatttttttaagtgctctcctgggagaaagtagtaaagagggcagggaagtagacatgaaagggcaggcagctaaggaaggatgcctttgcaggtgaagtcccagacttggcctaatccaacagggactctgggggcatcaatcgcactgcagactttgtcctgcttcttgcactagctactggctgtctggccggatgtgaatttcaggcacttctggctctccatactgggcaggtagttccagcgcacagaggtgatagcttgagtagcaaatcaggcggaagctgggagatgagtgcccagagctagcaaaaaggtctgggcaggcactgacagcaccactgcagagtcgctagatttttcagttaattctgaaagtacctcaactctgtactgtgcatgcagaccatagtggctgaggttccctatctgtcagccatggagaggtcactctctggagtagggaggaactactctctgggtgatagaaatattcccacacagaacccagctcacaggctggatgtgccctctttctcctctctgctgcctaactcaggaaataactccaaagacctgggtcagttcagatggggactgaagaaagcacatgtgaggatacgcctataaggtaatatcttcaggaaccctctcctgagcccagggcctcctcagcatttcttggaggctgccaggaagcaactatcctccatgcatctaaatgccgggggagcaaatctcagctacagaaatgacttattcaagggcagtatggcagcgtgggatgatctgctcatccgagaaaactgcctcgatgggaattaacacagggaggaggaaacttccaaagccttccgctgggaaatctttgcctttaatgggaggcaggatgggggtgggggaagaacgaggcggcatgtggtaaccagacgtcacagcgtttcacttttcaccatcaacttccaggacgcacgcaggtgtgtctggcgtggccttcgtccctgccggggatcctggggagctgtggctcagacctctggtttctgcgcctcctcactctccaaacccaacctcgaggttcccccgccgctgcgcaccctgggaagccctttctcaccaggagctctcaccccaatatcattctctccctcctcctccaactcctccgagcccaggtccgacatggtctcgccccagcctggatcacagccgcagcgcctctagcaggtgggtagcaaccgcctccaccgccgcgtcccgcgtcgccatggagacgcggccggtcccgcctccctcccagcccggaagatggggagcggggacaggcgacgcggacgaagcgggaggagccactggcagcctttgcgtactgtcatagcaacgggaagggcacctcgaccaatcaccgcccgggaatacggaggggcggggcggaagggacgaggtggagccagtggcagcactctggtgccgtcatagcaacgaggggccgcttcggccaatcactgctcgggaagcgagggggcggggactgggcagggcctgagcgggttctgtgcctggctgcccaccggctctctgacctggacctcgccgtcgctggcccctgaaatccatcacttttgtcggctgttctgtgacgccacaacgaggagccacctgggtactgggccctcaagaggaaggacgcgggaaacgcgtccgggccaactctcgagagggtttcacccctgcccagtgcgggcactgcccgctcccttccgcccccaggcctcgcaggcccctccggggatgctgcccacccccacttacctttctaggctctgctgacccttcgggattcgcggctagctgtgatgtgtccgccaagatctcttctcttgtctgtaaacaacttcactctcaaggaggcagctctggcctctcagcaggtgcggcctacagtgatgtccgtccgggttttacatccttccccgacctcgacatgagtcccagccccctcgggcctctgactctcaggtgtcccctacgatcgccgtcctctcctctcgctcctggctcccctacactgtcacacacccacacaatcacagacgcacacgcatgtacacgtgcaggcttggaaatctgctttacctgacgcactccgcctgccgaaggcccctcacatctcccatttcctctgccatcatcccagactgcaaagctgtgttatttgttgttgctgcaggagctggggaggagtgactgaataactataggatttggtcttgatgggagaatcccagaagccaaatccacgcggtgaataagctgctgatcttccagagcacacatcccctagagattcttcccaatgctaatatgaaaggttacaaccataacccatcatcaggcccaaatatattacttactgaataaatacacaagttacaacaacacacgagattccaaaattatgtcgttttttagatgcaaagataaaaatgttgtaaacaccaaaatttaacagcttttcttatggggaaaagtggggagttagggataacagatgattattattttcttctctacatattggcagttacccagttactacaattaagcatgtcctatttttataataaaatgccagaagcattttaaatgttagaaatctagaatggtaacataagtatatgcaaataaatactcgttttttacatttaaaatgtcagaaatttagctttcaaatttgtcctaacaatgacagtaaccagtgtttactaagttctgacactgtgtgtgggcactgttttaagaattttatgagttatcttattaaatcctcactatcattcctccattgaacatctaaggaaagggagttatagggggttataaactaaaaataacctcctaagccccaccacagccaactgaatggacccctcttggccaagagggccccagaaaccttaaaaactgcgttctcagccatgatgggaagggaggtcgaacatgcctcactaatacccttgtgcagtttagacacaacaactaacaagcattaatgttaaaatagagatcataagactgacagaatggacgctgtggcagtaagataccaacttacaaacaggacctaaggccatgccaggcatgagttaagtcatgcatccctacacttaaaagaataaactatattttaactacctggagaaggtcttatgactcgtgttttacatcctgtacttgagcaaacaatcttactgtgaatctctcaaatcgtatcatgagttcctcagactgttgatgtactaattaatacgtaaactactgacactgaaaaggatactgatttgtttctgaatcatgacgtttcactgattgtcttgtgcatatgcagaaaacattttagcctgtatgttgtcatctgtagccaatgactgtaacctctatattgtccctccaatgaaaaaagacaactgcaatatgaggagtccccttcccattcctcaactttcttataaaagcactgcaacttgtaacagactttggaacacacccaactttgttggtgtgtcttccccattcaatcttcaaatttggctttcaataagcctttatcaatttccgcctcaacagccttaactttggtcgacagcagttaagatccttacccaagatcatacagctagtgggattcaaatcaagccagctgacccaagagcaactgttgcccatcactatactgcctcccagatctgtgatataaagaaataactatagttttctggcagtgactaaaccatctaccaagcagaggaccactagttcaaatgccttggattgcaaacaccagagagtggcttaagcaaaccacatggttaagcaaaccctgttctggatcacatcattagcagctagacgtctagctatagctattaaatcctaaggtttacaatttgatttctatcccatacgaattagccagggtcttccctcccaaatctttcagtcaatctatagtaatttcaccacactgtgggtttggcaattatccaaataattgacaccaaaggcaagaaggggtgaacaacaggatgggcctcccggcatctcctgcagcagcacctggactggattctaaattcctccttccagaaagaagctgcatcccagcccagatccagctgagagccacagctgccaagaggcagtcggagctctgggcacctctctgtgcacccaggaagccccaggaggacttcatcaagccaagtcgatgcctcactcagagccccaggatccctgactcctaaccccacagtgacctggaaatgcctggtgatgccagaagcagcgctttccaattctgaaggccctcaaaatgcttgttcagcccaccttcctcctttcctggggcgtgggagtggtggggagatgagaggcagaaagatgaggacatcatcaggaggtttttccttactggaaaatgagaggaaatcctctttcactacttaaaaatcaaaaggggctgtccatattcctctggcaggggtctcccatcatcccccgcgaggcattcccattatcccctgcggagctttcccatcatccacagaggcccttcccataacccccaagtgggaagttcgcgcaagtgcggctctgcagggaggagggagggccgaggggaaggccctcgagagagtggagggcaacagtggccacggttcctctgtacttcgtttcttccgtaagaaatgatcttcttgtccttcttaagtataaatggagcgatccatttccttttacccattaaccccttcaaaaagaagaaaaacagtcccaggctggccatggttgatctctgcaggggcgctggtcagggtgccttctgcttcctggtgggatggcctaggccggggaaactgttgaaaccaccctggggctgccttctgtattttccacaaccttccaggcccacctcccagctggaggccctgcagcttggcagttgycatggcgactgagtccctaagtgtgtctcttctgagctctcctggacagtgtggagaaaaggccttaagaactgaggggcttcagtaaaatgcaaacagattttttttttgtaggcactgttcagataaaaagcagggactttcaacaaaatgagttcaggtccatcttaactatagaactatgaggttgtttattagaataattgtactctggtaaatttaccaatttcatatatatgcatatttataaacaaacatattagagtatatagatagaaaaagttctatctacatgtagaatcgaaaactttttaaaatagtgttggtagtatcacacattgccatttagtggatagagacagacccgagattgsagccctagctccgtatacttctttctgaagtcagtctactcatctgtaaaatgggctgttgtgaggtcaaaattagatattcataatgagagtagcatagtgcctagcacaaagtaaagcacttagtaaatgggagctattactattaattgtactgctgttaatcttacaataggttaagcaccttttgtctatcagtatgtttgggggggaattttaactcaagtttatcttaatcgttttcagtcgtgtttttttcttgaaaagaatcaaactgccaaagatgattctgtcagttgtttgtgacaatcagaagttagtctgtgacgaacagattagttttaatgctcatattcattagcactaatatacataagggtggggagagactgaagcttctggaaatatatagacaggtagattcttaagcgtaagtaggtatttgaactgtttgtggattatgtctcataaaattggcacccagcaaggaggaaaatgccagatacacacacgcccatacctgaggtatgtaggtcaatggaaggctattgaaacacagttgtcaagagagaaatgtaaagtatttttcacccaggaagtgagattattcagtgatgcatcaaaaccagtagggaaaacagtttagtggacaccagtgtggagacgagatgtcagaaaattggatagactcgaatttcacgttgggtagcaactcaaggacatagctcagtgcttggcacatagtaagtgctcaaccaacacaggtttatcaaattaaatgttagatattattttgcaacagagctgtgctttatgcagcagtaggaaaagagaaaaattgacgtgaaattttttctttttcttgtttttttattcttaaatcacactccattttccgagggctctctcaggatatcagttgcttaactacgtctgagtgtcttctaggtcgagtactaggggattacaaggaaatgagaaagaaattacagacccattggggggcaaattctacattaatctacactgttaaaaaaatttaccagggccgggagcggtggctcacgcctgtaatcccagcactttgggaggccaaggtgggtggattgcctgagctcaggagttcaagaccagcttggccaacatggtgaaaccctgtctctactaaaaatacaaaaaattagctgggcatggtggcgggcgcctgtaatcccagccactcaggaggttgaggcaggagaatcgcttgaacccgggaggcagaggttgcagtgagccgagattgcaccattgcactctggcctgggcgacaagagacaagagtgaaactctatctcaaaaaacaaaaacaaaaacaaaactattatgccttctggctacatgttaatccttcattccaaagtggaggtcactctttcctactggtggatatgtaaggctggttctagttttgatgctgcagatagcctcactctaaccagcagttgtggtgggagatcctgtgctacatggggctgtacttttcaaggtctaagggtggatcagattttctagaaaagggacagggaaaaaggtggcatgctgaaccacgtgtccatgattttcccagaataaggctccccctacccaacttacaggaaggtcatgatcaaataagataacgaggatgaaatgatttggaagtgctatagaaatgtaacgtgtatatttagctcaggttttaaaatcttttaattatgtaacatttgatgcatgcaaaagaacacatattcacgtatgccagcaaagtaatacagtgaacacctgtgaacccctgcccaaagtaaatagatgaatgagtaaatgaaataaatattaacatctgaatgcatagatctttgtccacatctcaaattcagctctttggattgcagctttatagaattgagagattgctgagcctaaatacatgttgctgcattgcctccgagaatggccggacctatccccactctcaccaaaacagagtgtgggactcactgctccctcgcctactgtaagtcctatttttcttctttgctaatctgatggacaggcagtgtctcatagtgactttagtttgtattcatattttctcgattatttgagaagataagcatttttccccaaatgtttattcttcacctatgataacccttgttaattatttagattagttttttgcaggccactttcatatatctgtatatgttgttttctctttctgaaatgtgatgcccatgtttctctacctggtgaacaatttgtcaactttaatatcttaccagatgtaaccttcctagggatgctgtttctaactgctgccggccccttcttaccatctctctggttgtgcttctgacgcattccctacacaactggaacgtgtttccaggtcagcctccctaagcacctcccaaggcctccaccccacagtgtcgcacagaacttgacacataccagatgctccaattattaaatattacygagtacttttagaaaattgggaacatacaataaagtataatgaagaaaataaagaaaaccaataatctcacttcccaaagataataactactgccattttggtgtgaatcctttcatgcttttaaaatgcatatatatgtctatttaattgaaatcattctatttgtcacttacattatcacatgtcattatatggtgcacatgtcaaaaaaaatttccaaagtgttttaaagacaatagtatttcaccttaaggatataccaaaattattatgtcacaaatgttggataagagaatgaatgaaaatctttaatatgaagttgaacaaggtaaggggtattacttaaggaaattatactcctttttttttttttttttttgagacaaggtctggctctgtcatccaggctggagtgcagtggcatgatcacagctcactgcagcctagacctcccaggttcacgtgatcctcctgcctcagcctcccgagtacctgggaatacaggtgcctaccaccacacctggctgattttttgtattttttttgtagagacagggttttgccatgtcgcccaggctcaacaacatgtgratcaagagatccactcacctcagcctcccaaagtgctggaattacaggtgtgagccaccacacccagcctccattttgtttttaagaaaacaatgtgtcgggtgtcttttctcagtatgtcattcactcatgtttcttgggtgactaccagaagttcctcagctctgggtactgttgctgtcctcctctcgtggcgctggcatacctgcttgtttgaattgcctttctcctctcctcaagcccatttttaattatctagttactaggacaagcatctaaatagttgtggagcaaatacagttatcggaagagctaaatgaaccatttccctctccctctacaaacaggaaagccagaaaggttttaaactggactggtaattttaggttccccagagctggctttgtgctatctgaccactgaggccctgcactgggaggaaccagacggggcccctggcaaccacatccgggtggtactagaacatctcagtgctgttatctatgaccccagaacagagtctcagttcaggggccctaaaagagtttccccactgaacaagcatggaaatgtgaaaatacgtatttattaaacaagataagtgaagattgtttcatttagaatgtgattcactaatgcatttctttgattacttagttatcttggtatgttcaaaatattgtggctttctttttagcagttctttatattaatacatttaaagagggtcccagaagggcaccaggctttaggatggctagaaatggggacatggcctggtcattttgggtcatcttggccctggtctcagttccaaggatgtgttggagagagtataggggtgatagcttaggaaaactctccggagtgaagaggcagcttggctttattaggttgttttcttcaccttaatcctgaaaaccttttcaagctaactggcagcaagttggacatcgaggtatgtgtttagttctagaaacttctctatgtgtgtcatgatattttcttttgttactatcttaagtcatgcacatatatgatatgtattacaatgtagtagaaaaagtaaaatttatacagtaaagggagaaaaaggacccagaaagcaagaactcattagcctgcctgtgcccagcatgaccctgcaagacaggcgtcttactcccaagttcactaccagaataaatgaattaattgactctaaaagggttttgagaacagtttcaagttattattgcttatgcttcctcccctacattccagatcccacaaagaagccacttcttgggctgacctttttatcatccacctcaaactcaacaagggcaaaactgaacttcttctctccgctttatttccttatcttaatgaagggcccacttgctaccggtttactaagccagaatctgaacatcatcaatgtcagggaccagttctttccttcccccttccccaaccaatctccaaatcctggagagtcttccttccaaattattccaaatccatctacttttttccattcccactgcttcttccttagtcaggacaccatcattttctgccaagaagacgccaacagcccaggtggtctccctgcccttagtctcactgtcttctaatctatttgccacactgaccagaataatcttttaaaaccacacatctaatcacgttgttcttcagtttaaaatctttcagtagtgaagtccagactccctcattcgattattaggctctgaatgatgtggccactaagtccctccccagcctcttctcttgccttatgttcacacaccacactctctgctgtggccataatgactttcagttccccaaacccaactttctgtaggattgctgggcctttgcctatgctgtttgttctctgcttggaacaccttccactcttcttttgggtaactcgatgccttctccaggtctcagctcagctgtcacttacacaaccccataggcaggctttatccccaacccttgtccacagtatcctccaggtgactgtgtctcccaggtgggtagcccctgaagtaaccctctacactccatcactgtcagagagttggaaggctggagaggcatgacccctcagagtcaacctagatccttgtggcttcagcccccagcaggtagggagcccaccaagcttcaactctacagcagagacacagccaaggctactggtatgtgcaaaacattggcttgtgaaaattacagtatccaaaacatgattttttttctaaaagagctttttaaattttgttttctaaaagttaaaaccagaaaatttctgatttctgacaggttaaggatttaggggaatttttaagttatgtgatgtgaggttctctgtagttttgtaccaactagattgttcatttcctaagaatgaggacctctcctattcatctttgtaatagggacagtgtcttacagatgaaaacattcaatgaccctacattagaggagaagaaactggagcacaaattggttgaatgttcccccatgtgacacatttaataaggctaatgttgttgaagtggaggctgggcaggcagtaagaggattcccttgtatacttgcacggtgaacatgagtactggcatcgcaggcctcgttcaatgttgatactcttgaatttaaagtggcatttccatgtactcttacagatgttccttcatttgccatcagaaggatagctgtgaagtgatatataggaactttgtaggcatatttgatttttaaacctctattaactttgtgtcaaataatcaaagcttaacaggatttatattaaggatggtgagagggaatcaaacttcatttttagagaaaaatagcaaatcaaaataagctgatgaaagggactttgtggttctctccttccttcagctcctgatatgaatcctagactttttacatattcatactaattagctgtgctttccaataattagagtagccataagcatttgtacactaattcacagttcctaaagcattcttaggaatattagcataaatgtttattgaatgtctcctgtgtgccaggcatgattctatacatgataaggattcactgatgaataaaaccggttaaaaaatctctgctttcatggtgcctacattctaacaccttactttccccattcatccatacatcaaccccacagaatcacactaggaaaactggagttcaggagagtaaagtgactttcacagggtcccaaaaatagtaagtttggggtcacaatttgaacttgtcactccagattccaagtcccatgcctttttttttgctaggtcagtattcactgtggaatcataactgatactcaaaaacatgatcttgagtaatattcaggaaagaatatcatattcaataagttgctttttttttctttttgagacagactctcactctgtcaccaaggctggagtgcagtggtgcgatctcagctcactgccacctctgcctcctgggttcaaacaattctcctgtctcagcctcccaagtagctgggattacaggcacatgccaccacacccagctaattttttgtatttcagtagagacgggatttcatcgtgttgcccaggctggtcttgaactcgtgagctcaggcaatccacttgccttggcctccgaaagtgctgggattacagtcatgagccaccacacccagcccaataagttgcttttattattgagttacataagtcttttttagaaaagatttaagatacaagagttaaatactaatggtcttaaccataagagttaaaactataaattaactggaaaggagcagctgcctagaggaacccagggcatgcgccttctgatggccacagtgagtgctgaggtcttcagtgtaggctgtgagggggactggctgcctaaactgtcagcctstggtaagtagggtagattaagctgatggagcagaaagcctcaccatccaaagccatcctttcccagactccatgtctggtgggaatagataggcaacccgggaaagagtactaaagtgtgtgtcttagtccttttgggttgctataaaggaatcctcgaggctgggtaatttataaagaaaagaggtttatttagttcatggttctgcatgctgaacaagaagcatggcaccagcacgtacttcttacgaaggcctcaggaagcttccattcctgatgaaaggtgaagtggagcaggcctcacatagtgagaggggaaggaagagagagagcatggagggaggtgccaggctccttctaatcagtgctcacagggactgatacagtgagaactcacttactactgagaggatagcaccaaaccattcctgagagatctcccccgatgacccagacacctcccactaggtcccacctccaacagtgggggtcaagtttcaacatgagatttggaggggacaaatacccaaacaatatcagtttgataaagaggatatgagtaatttcattctcccatcagacagtgtttgtttagaagaaaagtaccatgtccataaatcatcaaatgctggcccagagggaactttaaagaacagccccttgatttaagccacacagtttaccaaactataactggactgaagagtacgctcttttttttttttttttttttttttgaggcggagtctcgctctgttgcccaggctggagtgcaatggcgcaatctcagctcactgcaaactctgcctcccgggttcaagcaattcttctgccgcagcctcccccgtagctatgattacaggtgcccgccaccatgcctggctaatttttgtatttttagtagagacagggtttcaccatgttggccaagctggtctcgaattcctgacctcaggtgatccacctgcctcagcctcccagagtgctgggattacaggcatgagccaccgtgcctggcctaagagtatgtctttttgcagaccccataaaaattttccaacttgcttatctcatgtatttgcactagctcaactgcaagaatgactccttagttgatgggtcagtttcctatttccacatacctgacctcattctacctataggcataaactcaagaggaatttacaacagatgggctcaggcaacaagttagccccagagtggagctcagctacagaggaatgcttcactgaaagaaatgtgagtccctgaatctgattcaagcctttatcaagtcctacttcagttagaatccagtttactccccaaatacccgtgagcactctctcagttactatttcccttgctacacatatagaagaaaagcaagaaagttactctgctgggaaacactgccaaggggtcttagaagcaagaaaatttgcctattttatacaggtagtttaaagagaaccacccttataaatgggtgtttgtccccttattatttcaggacacttgaaagctcctctcctccaatatgtctctaattcaagtatcacagtgtctaaaattctaccactaaaatgccattacctaaattaagcacagccttctgtctttatgttgatatttctttaaatatcatgccaatagttttaaaatcaaatgatactaaaggtatataacaacaaacagtcgggcctggctttatcccttcaactcctctgtctcattcccctaccattttctactcttttacccatttcttctggtagttccctatatttctaaataatatgagtaaactatgatttttatgtccaattttaaagcttttctatggacctctggttttagagacaacatctagttctcttacatcccttgccacttcccctgatgctgtaggacagacaggtctgtcccacccacggtgactcagtcattgttgttcatggccgctgcccgttcttcacgatcaaggaggagaawtctttggaggaaacagagctttcatacgtgaatcgactgggaagcgagtcaaaagtactgcaactggaagtgtggcatggggagggggccgtggccagtctcctcactgggctcctgtaggactgggaacgcctactccttcacacctaattatgtttgctggattgggttatagttcttcagtgtgtggactcttgtcagttttatatccgtaggccgagcacaatgcctggaatacagagcatgcttaataatcagaggcttttcattgtatttcttatcaacaacactagtaactgaatataaatcacccttcctcgccagtcagtgcaccatamcattagaattcttgctttttgatcagtggagataaaatgagtttcttttctccatgttaagtaatcaggttctgattttcccttttctttctctctaatagtgtttaatgctctaatgctttctaagcatgaggtattttcttgagctctgaagcccagtatcytcaaagcccccttcagggaaacctcagttccctgtcagtcaaggcctgtcactggctttgccttggccttctctgggagaatgtctgctccttaagttgatggcatacaagttgaggtggggaaaaattaaagtgtaggatttctgtaggcagctaatgttttattactggagtgcagtgatgcgatctcagctcactgcaacctctgcctcctgggttcaagcaattcccctgcctcagcctcctgagtagctgggactacaggcacacactaccacgcccagctaattttttgtattttagtagagatggggtttcaccatgttggccaggatagtctcgatctcctgactgcatgatctgcccgtctcagcctcccaaagtgctgggattacaggcgagagccatagcgcctggcctaaaatgtattatataagcatcatagtgaccacaaaacaaaaacctgcagcagatatacaaaatgtaaagagaaaggaatcaaagcataccattacaaaaatcatcacattagaaaggaagatagtaagggagtaacaaagcaacaaaggaactacaaaccgccagaaagcaattttttaaatggcagtagtaagtccttathaataattaatgtaaatggattaaattctgcaatcaaaagatagaagtggctgaatggatattaaaaaaaaaaaatctaggtgctgcctgcaggagactcagctttaaggatacacataggctgaaagtaaaggcatgggaaaagatattccatgcaaatggttaccaaatagagagcaaaaaagatacttatatcagacaaaacagactttaagtcaaaaacttcataagagacaaagtcactatatcatgataaagagataaattcatcaagaggatataacaattataaatgtatatgcacccaacatcagagtacctaaatatatattaacggaactcaagagagaaatagcaatacagtaatagcagggtacttcagtaccccattttcaacaatgaatagatgatccagacagaagatgaataaggaaacagtgaacctgaataacattctagagcaaatggacctaacagacatacagaacactccttcccccagcagctgaatgcacatttaaatgtacacagaacattctctaggatagatcatatgttaggccacaaaacaagttttaacaaatttaagaagattaaaatcatatcaagtatcttttctgaccacaataacatgaactagaaatcagtaacaggaggaaaattggaaaattcacaaatatgcagaaattaaatacacacctgaacaaccagtggggtcaaagaagatatcaaaagggaaatcagaaaattccttaagacaaattaaaatggaaacaacataccaaaacgtatgggatgcagcaaaagcagtactagagggaagtttataaagaaaatgtggtgtatagctgtatctacacaatggaatactatttagccttaaaaaagaaggatttcctgtcatttgcaacaacatggatgaacccggagtacattacactaggtgaaataagccaggtacagaaaaacaaatataggccaggcatggtagctcacttctctaatcccagcactttgggaggctaaggcaggaagactgcttgaacctgggagttcaagaccagctttggcaacatatcaagaccctgtgtctacaaaatttaaaaaattagctgggcatggtggcatgggcctgtattctcagatactcaggaggctgagggggaggatcacttgggcctgggaaatcaaggctgcagtgagccttgaccattgcactcacgccactgccctccaacttgggcaacagaacaagaccctgtctcaaaacaaaccaacaaacaaacaaaaaagaaaaatatgcatgacctcacttatttttggaatctgaaaaacttgaactcagagaagcagagcatataataatggtggttaccaggggcagtaggtgggagaaatggggagtcgctggccaaagagtacaaagtttcacttaggaaagatgagtaagttctggagggctaatgtacagctctaatgtatagttagtaataatacattgtatacttgaaatttgcaagaagaatagatcttaaatattctcaccaccaaaaaaaaaaaaataatgtgaggtgattggatatactagcttgactgtggcaataattttacaatgtattcatatatcaaaacatcacatcctatactacaaattatgtaatttttatttgtcagttatacgtcagtacaactgggtgggggggagggggggtgggaagaagctgtctccatatgaggccgaggtgtcctatatatcctgagcttgtattatcgcctttcaagtgtaaaacctgtaggtgatgggatgcccgaaaggtttgaaaatcaggaatgacaagatcagattttgctttaggagggcaacttgaggcagcttaaagagtggattgcaggaggtagaacttggaagtgagaacgctgttgcacaagtgcagtgagagaggggtagcctcgagccgaaccaatggcaagggccagggctggggagaccattggagagaggggtgggagccacactgggctatcaccgggaatggagagctagaaaagagaggagaaagcactggcacagggggcctgcggagagaaagaaggtctgaagaaaacctggccaaaaggagaagactggagccctgggccatcccgcttgcggaatgaggggccggcgggcttcctggggctgaaccctgcgtggcaaagaagtgggcaggttttctttctgcctgcagaaggcttctcaaatgcctaacaaagtgatggatttcacgcagcccagctcagcaaagagagacacagacatcagagtgttctagaaacaaagcagggccccagggggaaactgcgaggcctagcagggcaggggagccaaacacagggaagaatgccttctccattctccagagggaagctcaacgtgcctggggaagggtgcgaggggcactggcctgttgggacatttacagccaggcctcgggttggttttatccttaaacattgttttatccgggggcaggctttttccccggaaaatttccgctctgcctcactttgctcttccccgaggagtgggctgggagccccctctgctctgaagccatcctgggggtccactgtgggtgttcggcagtagcttctaggggactggccaggcccctccctggggctgcctaaggagaagagttgtttctggggtgacgtgggagcctgtgtgccagggcactggcccgcaagggtaagaacccggcgggctcccgcagcctaacagggagctgcctctgtcacgtgcctgcgaggtgggacacaagttggcttacaagttggttcgacatagccaaatccgcgtgccgcatttccacgctatggagtgctagtcttcatgattgtgccccttgacatgacacaataggaatagaagccgggaggccaagcaaaggccctctttgggggtgggggcgcggcggcatgtgaccctcgccgcctgtggggaagacctgccttgaggacagagcgccaggggtgcagaggccgcctgggactgcccggaggccggtggggagcgcgccagcgaaagcccgtgcgccctcggagccggggaaggcgcgggccatgacccgggttcgcccgcaaaggccgggcagtgccgcaaggcgtgggggcgcccccgcccggtggccccggggctggtgcgaccctgggcacgccggggccggggccggagccgggggtcgcggcggccggggagggggaggagccgcgcggctccgccggcgccccgcgggccagggaaagtgaaagggcggcggggcctcccgcgcgccgctccaggaagtcgcgagcaggaagcgcccgcggcggccgggccgggctgggctgcggagcgcgggcctcggcggcgcaggtgaggcgcggggccggggccggaccgggaggcggggaccccccgcccccccgcccgcacctgcggggcagccggcgctcaggcgccgcagccgctcagcacctgcggcgccctcagggagccgggcgcggggccctgcgcactcggagctcggctcctctccttccttttcttttttttcggggggaggtgggggctggtttggatgttttccgagagccggggacggtctcaagctattttcgcggagggaagtctttgaaatacgacatctagaagagtggccctcggcgacaatgccgggcgttcccggaccggggcaacgctgggattccggggaagtggaggcagagggagcgggcacggggccggcagccgctccacggagtccccggcaggggcgagcttagctgtccagccgggtcccctgcccaccccggcccgggccgcggtgacagctgagggtccagagagccggcaggaggggaccctgcgcattgtctgccgcgatggggacgtgggcgtgcccgcggaattcacctcctccggggaccagccgcccagggaggagccggcacagaacgctggctcggagcgccggcaccctgggcctttgcgttgtttgtcggctgagcagctggttcccggagcccgtgggcctcctggccaatgcgagtgacagcgaccttctgggtttataataaagggcttgacgcgccggaaagtcccctcgccgctggccaccagccttccagcccttacggcccacgccgtaatcctggtgaccgagaaggtacgtwcagtctaaggatttgcatttgaacgaaggatactggccaagccccttaccacccccactccccgctaacaccccagcccgcggccccaggtttgaatttccaaaggaggaattgctaaagcctgccctttccgggtctcccttagctctttgcctggaaggtgcctgcctgcctgcctgccggcccttgaacttaaatcgtctgaagttgtgtaagtggataaatattttagacttcccccgttgtttttttattaatcccctttgagagcaagcttgaaaacacctggccccagacctgtgattcaccaagtcattttggamctgcatttacacgttctgtttcatgcagcccacctgtgatgttctctttgttgggggttggaggcaggtaagggaggtggtgcaaatggaattcaggttccttgtacttcagccaaggggaaagagatagtgaccattttcattcatctttaatatggaaagcgcctttaaaagcaaaaagccatagaaagagcacactctggacaggaagttgtattctatctcgtaatttaaaaaaaagaaaagaaaaaatgcatgaaaacttttggaggagaattgcatttctcacccatctttgcctgtaaagtgagacccagttaaaaaaaaatgtcataaagtagattatttaaaatatctgtggggccgctttgattatgtgtaatgccacctcagccctaaaaagactgaggaaccttactcctgctattgctcacttcctatccccattatttgagtctctgcagattacttggaaccttctaggcagcgcagatcacatgtgggtgggtctgggagtggagcttgtgaatgtttctttcctcagcttattctgttttacagttgcctagggtgggttttttgaagaaataggtataaaaccatgtgtctttcagagtctgtttgtttttttaacttttagtttcaggggtacatgtgcaggttttacaggttgtaataaagatgctctaatgggctgtttcctaagttactatctttttatatttttttaagacagggtctcgctctgtcrcccaggctggagtgtagtggtgcaatctcagctcactgcaacctccgcttcccaggttcaagtgattttcatgcctcagccacccgagtagctggaattacaggtgtgcaccaccacgcccagctcttttgtgtatttttggtagagatgggattttgccatattggccatgctggtctcgaactcctggcctcaagtgatctgcctgcctctgcctcccaaagtgctgggattgcaggcatgagccaccatgcctggcctaagttgctgtgtttgacagtgcaatgaaactggacattctgccgcttttcctccctggaatggtaagttccaggggggcctgtagagagtgactttttaaaaaagtatctcttctttttatgtacttgggcagtgtgccaaaaactgggtttaaaccaagtgatttgctcccattctgctgccctttctctgcaggggatgggcaggaagaagagtggctggagggaggaggtggctcagagaaacaggacaaactggaatctgccccacttatccagctgacccaggcgagccgcctagcctcatttttctcccttgtgaaaagarcgccctgcctcttcagggtggtcacggggctcaaatgagagcatgtcagtcatggttcgtgcttccagaggtcttgacccactcaaaatgaagtggtctttagtggtgctgcacaggctagggaggaagggcctcattagttgagctcttaacatcccaaatgtaaaatcactgtctttgcacatcttaactgcactcactatgagaatttatagcacttttctttcacccattttacagggaaaagaatccatcattgttttaaaaagaaatcaaagaggttttttttcccttcttgatttgtcagtgccttctgggcctttgatgttgttgtcacaggttttatcagagttggaggtttttgatttatttagtagatggcaatggaatgtttccagacacgctggacatggagaagcagcacttgagaggaagacgtttgcttctgaccatccgtttccagacactgttgaaccaaattctttactctgaagttgtcatcacaaagtcatttcccagagtagatccagacccattctggagcccacccattttgagcaaaatattgcttaaatctagaggtttgagcagacgtggttttgaagtatttgtggctgttcattcaacgtgagtttcttgagcacgtggtctgtgctaggttctggacaaggagatggaagtaggaccttgccctgcagtcccgggccttcctcttttgaatttacaatgaggataatatcagctagtgtttgttgcgcatttactacgtaccaggccacttatcaagtgcttcccataggttatctcattgcatgtttataacaacatggatgctatcatccccattgtttagccttgaaggagagggagcagaaaggttaagtgacttgcctcggcttacacagcccagggtcagccttggaaggaggaggtattggagtggggtgaatcccacctattcaggccctgtaggacctaggagaaaggtgtagttctggctggagcagatagaagagatgaggggcggctcctgggacgaaagctcagcagggattttgaatctttttgtaaaaggtggtataagggaaaaatccttggagaatgtgcatttttggaagctcactttcgagggaggcaaaagtgaatgtggggaactgattggctttggaggacgcagtgactcaggaatgtcatgagtttgacattgggatgggagaccaggcctgcctgctgtgctgggccccttctcagttctcyggcctccctccccattccttcctatattgctctgccttcagccctgacttcataatcaggtcattttctgtgacctctgaggtgaccacaggagatgaaaaatgaagaggcagacgaggcaaattcattcctcctttggattcaaatggcaaagtcacaattaaatgattggtttgatctgccctcttgtctaggcccacatttctctgtcactacggttcaaaggtggcctggtccataggggtggaactgaggcagtccagtgccctggcatgccttgatatctgggcacatagcgtggctgctggacacatacttggttttgtgaatgggttgatctctagatgcctcccagatagagatgagttccttggttcctttttatccaccatcagaacattatttgaaattcatttccaggttctcagaacaaaccgcctcaagggtagatactccacctcaytccccctcttcctagtaacactsctggygggggcccctgcttgtatcagacgtgcagctttgatcaggactgggtactgctactgtacgtgtgtggttacttctgccagtaacgctgaaggtgtgaatgtcacgacactggactctgaatgcctctcctcctccttgtagagagcagagccactgccagaaggaaggggacaagacccagcaggacaccttctttccacgctttccagcctgtgggagyggcaggggcaacagagagaggatctggagccaggattaatgactcatttatgaagcatcttattctgcgaccgaggctcagtggtcagtggcgacgtaaatggctcgactccccgctggcattcgcttcatcatctcattctccagggatcagtggtgagtcctggtggggcaggcccttggcatggagctgtgtataggtgagggcyactgtgcaggtagttgtgttgccccagtttcattataaaacacataaaacttgaatcactgacctcacccataaccgttgaattgctttttggtggtggaagccgtgacccagaacagtgctgaggtgtcctttgtccttggtactggcattgtcagatagtgtttgggctcccgcgtggtctccagtggtttctctaagaaccatggtccctacagaaaaatgaccactgactaccagcagggttagcaaatggctgtggtgaaataagcacataacttatatataagttacacaactctgagatcagatgagtggccttgccggggcagaactttcagagagaaaatgaaatgttctggtgcagcccagaatgctgctttccgttcagagagtgcctcgccttgcatattctgagaatccttctcttaggtggcctcattaattccattctccttgaaggaaacagttgacaagcccagagtctgaagctgggctccctggcctctaacttgtcctgctgacctcttctgggagaggaaaaactttgcttctaccctcgtaggttctgttttgggggacctgggaattaaactgacaaaagacagactagcaagagaaaagacagatttcaccacttatgtacgagaggtcatagaaaagtgtccctcaaaggggcatttagaattctgggcttatgcaccgtccgtccttcacaggggaaggggagtgagagaaaggtacctgtgggcaaacgaatggctttttggaaagacaagtgggccctcaagagaacagagaacagatgggcgatgtggtagttttgtgatcattcctgtttcagtgcagtgtggaggcttctcatctccagtggtaagagtcctgtttccctggcccctcctaagggacaggatttatagcagatggattcttttgacttcttttggggaactctgcttttcagtagctaagagaattcaggaacgcaaatgccttctgctcaaaatgattttgatgccacagcggcrgattctgggcccattcatctcctccacgccaaccccctggcagcccccagccctgtgcagcttctcagccctgctggttggtggagcatccacagggtgtctcaggtttgatttgagggcatctgtgttcttcaaccagattgcttctcttcttgacttatttcatgtctgctgtgagtctagccacaagtgcctgaacacttaggttttatttagtgaatgtctagcttcttcattttgtaagtttattttgatataatttcaaactcacgtaacttactaacatctgtaagaatgttcctgtagaaccgctgtatgtcaaagattaacatttagcctcatctgcttctctccctgcccctccacagtgtgtktgtgtgtgtgtgtgtgtgtgcatgtgtgtagatgtatgtttgtacacacacacttttctgaaccacttgagagtaagttgcagacatcataccctcttatttgtaaatacttccgtgtgtatttcctatgaataagacattctcttataaaaccacagcaaaaagatcaaaatcaggaaatttaacaccgataagatactgttatctaacccacagtccatgttaaaaacratatcaaatgtcaaatatctgtgatagcatttcttcttctgttcaggatctagttcgggttcatacattgcgtttaattatcctatgggtctcgtctcttcatctagcactgttcctcggccttttttcatcttttctgaccttggctttttttccttcttcttctgagacaatggccttgttgtgtttgaagagttcaagccacttattttatagaatgtgccacattttaactttgttatttcctcatcctcatgattagattcagattatgcatttttgacagaaatcccatagaaatgaggcagctttctctttaatggagaaggagctataggcatgggaagagggaggggaactggaaggaactgagtgaggttggattggaatgaaagttctcgggataaactggtgatggtcgatatagaaatagagaagggtgtgtgtgtgcgtgtgtgtgggtgtgtgtgtgtaaaatgcaccccgctaggaggtcctgggaacagtaagagcactaaagtgagcacactttggtccgggatcttggtttctgcatggcatctcccactaaaaggagccaggagtccttggagacctggccaatgccaggactggggcagggcaaggaatagatgagcccagaacatcttgtgccagaaaataaggaagtacttacaaacaaagggactctgacttgtcaaatctaggacaatctgagatttacaataaatgagactcatgaatgatagcccattgaatagcgtaagattcggcgagtcctactgatataactaaagaagtaggagaaatgcacgctcgccgtacagtggaagctggccgctaggtggagcggggatgtggagccgctgcagggtacccagcgcaggcacagaacgccatggatgcaccccgtggggcggcagcttgaggaacaggatatctacattatctcaaagcaggttcccagaaattccatattcattacttagagggaaacgtagtggtttcactgaggaactatgaggcagacagcactttaaccaatgaccaacgtcagtgtcactgccctcctgcaccttctgacgggatactctgaacaggacatggcatcgcttctctgtctcagaaaacatagacagaattacaaaatraaaaaggattttgggagggctgtttggcttctgggggtttgagcccatccatgctgcagagtgaagcagaggatgtctttggactaatttctgcaccaaatcatatcactcagtaattctcaaaagtgtttctttattccttatttgcatgtgattgaggtaataacagtcaaacaaggagacagatattttgcatggagcctctcaccctaagcaggctgccattcacctgagaacacgtggtcttccagaacatctctgaggaggcccagaggggcacccccatctggtgctgtcattgctgagacctgcttttttgctagaaatgtgggatttttcatattggtggaagccaagcatgctataagtagtcataactgcaaaaagtaagcagaacactgaggagcagatagattagatcatttatttttttattgtatttgttttatattcataagtctaaacataacacaaaacaaaaatgaaaggattatattagcctcctggggctgctgtaacatggtaccacaagctgggtgtcttgaaacaacaggaatttaccctctcacatccctggaggtcagaagtccaaagtcaaagtgtcagcagggccacacttcctctgcaggctccggggacagacccttccttgcctcttccagctcctgctgctgccgcygttcttggctggtggctgcatcacaccagtctctgcctgtgtggccacgtggcctcccttcctgtctctgagtctttgcgtggccttctggtgaggacgccagtcattggaatkagggctcactctatctaatatgacctcacctgagctaatcatgtctacatgaccctatttccaaataaggtcacgttctgaggttttgggyggacatgaaattatgggggaygatattcaacccagtacaaaatgaacaaaaggaaacatatcatccaaaacatctgctttataaatgataaagaaaacgtagatagaattacgaaataagaaaggacttcgggagggctgtttggcttctgggggtttgagcccatccatgctgcagagtgaagcgtctgcctacccagaggccaggcgtatcggggtgacaaccagcaaggcagcggcccgagtgtggctgccgcggtttagcaatagtcacgggagctgaagtcagacctttcaaagaggaaagtctagcctccagccactgcgtcccccatccccaagccccaagtcctaagtacagaagatgaagaaatgagagaggaaagacgaatttggaaatagaagtagagttggcctgacaccagctaaataaatacagcgttttcctcttcagtctttaggracattccagtttgctgtgtaaatggacccttcacccaattctacaggayggcttctgtcagcctggctacaccgtggcagtgactcttcccaaagggtctcattcattaaggtgtctccctccacacaaggctgaactaaaggttccagaggcatgtgctgccccttgtgtgctcctcagtgttctcagggcatctctaggcgtgtgctgtgagcaccagccgggagtcaccccgcagaggaaggcaggagcccagaacgcatcaccagggcctgatcacccaagcagccctgaccattgggaacgcggtgtgtgtcggggcctcagcactcttcagacctcagcccgacaaagggagacagccttccttctgggctgtctgggtggagagtggagatgtgaacccacagcccataggacagagctkctcttctcaaaatccttcctagctgggtgataacacctgtagaactggcactgtggwtggagaatcctcctgcatggagcaggagagatggtccatggacttgtctgagactggggaggtgctggaggcaacttggcctgagaactttgttcacctgttttgaggagattggagaaggaaaccctgtactccagtgagggccgatcagggtcacccatcagccttacttgccctagtcagctccagcaggtggggtggaagtgaccagtttgtcaagctgtgggctggacaagtgagcattgagggccggtgaagcccagtggcctggaatcttcctgcaccagcagtcgaaggcgtgagaagcagtggtggcctaacagagagcttcatccaaagcgctgagactttctttccttgccagaaaggatrgttttcagaaacacgaggacagaggccggggcttctggagcaaatccactgtacccacatagcctttgttctttgggctttgggataaatgataggctcgccttttagggtttcgcttttttcccatttggcccttgccatgggcttggagaggaagaattggagaaaggccattggaagatagttccctgatgaagaagagagcactggggaatttctgtcttcagtcagcaggtattctgcgagttggtttggtttggttccttccccaaaggcacaggcattccaaaggttgtagttttgtgtcacacggagccaccaacctttctttcccacctgaaatatggccttttttttttttaagaaaaatctggaaatatttatttgacccctactttagctggtgaccagagaagaaggcagctctgggatcctaggattttagttacttgtggaaagcttccctcggagtaaatcacaacattaaaaatgtagatgcgcagctgggagaagcaaccccttatcccagggactctcggaaacgctgcctttctttgtcctgtgtaggacgccrccttaggtaattattgattcaggttgttggtggcgccatttgaagtctcttcccaggccacaagcaggacaggttctccagggtagggagatgtgcctaggacacagaagagctgcccctcgccttccactcctgtcaaatacttctttctcccaacccattttgttgccccaaaaagtatttttctatgcggyggttgagactcttagactggagttgccctttgtcttctttctaaggcaccttcttttcttctttcttcctcacactcatgctgactctttcggctgcttttctcccagccaaactgagcgaggggctttgtaccagtgtttctgtcaytggcctattgagagcctgccagcgtcactgcctttttctctttgagggccgtgaaatatttatatgtctgccttgcttgtgtgcttctgaaaagttgcatagaaaccaaagagccaaaaataaatatgatcttaattgcccaggatagcaggctacgccagaaacttgtggttagttttgttgtaaactaaacatttcatcgtgcttgttctgctttgtaaactcaagtgtgcatctcgagtcccaggtttccctttggttacggtttctttaaatagatgaatgcttttgatattgtgacgtaataataagaaacatgcttttggtctctggccctggttctgggcacacagctcctacaacctttagtgctgagtgtctttttgtttgctaatgaggtgactgtggcgggccccaggacaacctcctgggggactggttgccagggcaaccgaccacgtgattagaggttgggactccacccgtggacctctggggaggggagggagcccgcagaggtggagtggatcaccagtggccggtgttctgctcgatcgtgcctgtgtaatgaggcctccacagactccctcaacgacagcgtttgggggcttgcaggctgctgagcacggggaggttcccggagggtggagccctggcgagggcacagcagctccgagctccctgccccatacctcgccctgtgcatctcttcatctgtatgtattctttgtaacatcgtttataataaagcagtaaatgtgtttccctgagttctacgagctgctctggcaaattaatcgaacctgagaaggggttcttgggaaccaccctgagagccagttggtcagaggagcaggtcacaacctggggcttgttgccattggcatgtgaagcggggcagcctcggccggagccccgccctgtgggggctgatgctgactcctggaagacagtgtgagaattgaattcacttagaggacatccagtgtcagctggagaattgcttggtatatggggaaaacccctacacacgtagtgttagaagtatggtatgttgtgtgttgtgcatgagggtaggaaaagcagtctggtttttcctgtctcttacagtgttcagtttccatttggayaaagcaaacgtggcaatattttttaatgttccaatattatagtgacataagtaatattgataatggctgtagaactgaatgaataatacacagcataagaacgtttcagaacacagtgatatgtattcctaacataacttctgttatttcatatcatcctctcccactgttttgtgtttcaggtacagagccttcatttttattttgacatttctgctgtatgcaagttttcacttatctcgaaagcctatcagcatagttaaggtaagaatcatggaaagcactgcctgtcgtctctgtgaggagttcgtcacttgaaaagcttgtggggcagaggatggggatggtagcaggtacatggggaaacagattatgtagaaacaagttattctgctgctttggcttttcggtttccctttgctaaaattaaagtcttttaaatgttttttggatttatactttcagaggtagtagacttttagttttattagttgacatttccagaatttgaaagcttagctaaatatttattttatcttgtgtgactgttccttccaaatgtatccagtcttaagtggttccccaaattccagctcttcgtgcgatccaaccctaggtctggctgcggaggtggctctccattgttcttggaacgctgcatttttgtctgagtgatgggtgggcaggaagttgttaagcaggtgttctactagactttgagaaaagaagattaaagcagacaagcctacataatcaccagttataacctggagaaaagcaggaataattttcttaccctcattgggattacgtcacccggcctgtagaccatcaggggcctgagaggcattagagtctctatcgtagaagaacgaggaaatcatccactgccagagacagtgcattcacagcccagtggcccctcgctcactctccgggagttggcagggacccagctccaggactgcaattctgtgacctttggagctgtgcttcctccactcctgccrgtggctgagccctgggtggctgccctctgcagccctggtcggcagaggcaatgcagaggctggctgttttgtgacggtcctaggttccccactctccagcagctttcaggggatgttaaacattcatttacccaaaagattctaaaattcccccttggcccctgataagcaagaaacttccatgcctctcaagttgttgactgtggaaaacgtttgcagacctttgaaaatgtggtttttaagagagaagaatatgaaaagaggtggtgggccttaaacactcatccgcttgacaagaaactctcaaatcagtaccagtaaccagtcattataaatctgaatactactacttcttgtctttctggttagagaaatatacaaacagctcaagaaaatggtaaattataaagatggaagtgactattgaagagacttggtgagcgtgttggagttgaaggatctggtgtagttggggagcttgtgtggggtttcaggattgacctagaaaggttgggtgtggattgtaggggaagaaaaacagctttacaggtgggagaactgccttgagtgctacgtgcagggatgggcatctccatgaaggcaccacctgttgggctggggggctgttggggcagatgtwgcgtgtaaggtgggctggcctttgggggaatctttgtcaggccacagctgttggggtccacctgatgactatgagggcccctgtgagccaggagcaagtgggagccctgtcccggtccctctcccggctttcctggtggtccatctcaaagcccccgcccctgactctcgtgtgtagtggtgtccaggccactcaagacttagggcttctgaggaggcggcgtcagggtcagctcttagttcagtgtcataagtaacaatataaataactgccrcttacagagccctggggtatgacaaastgccacatacattacccctgtgatcctcacagcaaccctgcgagtgcccctgtgaggaaattgaggctcgggtcttcgttccccaggcagggctgccacacactcgagaattccctgtgggtcaggctgcctccagggcccctactcatcctctctgtgcctcagggtttgtccgggtttaattacctgagtacagtcccagcatcaccctcagagcctcctaaacgcacagatttcctgacctagcagctgcgatgtgcctgggcatggattggcttgacgctgaatcctgtgggtttctttacctttcaagatagatcagaacatcacaccacatcaaaactaaactttatagtgccttctgaagcgcccgtgtgcttgagctcatgatataaatggcatcaacgaaactgaaagtagtagtgattctgttgacccacaaaacagttgagtgattatttatagcctgcatttcccagaatattgtaagcaaaaccaaagcaaaatgtatttgcttacttgaaattgaaccagaggctgtgaattagaaagtgagtcttattctgttatgtcatttatagaatgacacggcacaccaggtcacatttaagttagttraatggaatgtttagacttacctttgatcactgctgattaattgtatttttctcgatgatgatgataaaaccagggctgggaggatagtggtgttataagtgcaaccctgtcccttctatctgctgctccagctgtggcctagcctcaggactcaaggcaagcgtctgcccaagctggtagacaggtgagtctgactcccagcagagatcttagtgcgagctcttttcacctggactgggccagaaaagaaacctgaaagcagaggcttcccggagaagcttaaactgcaggggtccctggagccagggggatggcagcattgatttgaatgtgagtgtgcccacccctctctggacacacaggacttaaaaggagaaaactggctaggcgcagtggctcacgcctgtaatcccagcactttgggaggccgaggtgggcggatcacctgaggtcaggagttcaagaccaaactggccaacatagtgaaaccctatctatactaaaaatacaaaaaaaattaaccaggcatggtgacaggcgcctgtaatcccagctactggggaggctgaggcaggagaatagcttgaatccgggaggcgaagtttgcagtgagccgagagcgcaccattgccctccagcctgggcgacaaagtgaaactccatctaaaaaaaaatgaaataaaataatcctcagtggcagacagaaaacaaagtctgaaaagctggaagtatgtactatgggtgggaaacttgttatttggaaagttccaattctcccagtgttaatatttaaataaaatgcaactccagtgaaaatcttagcagggttttttttaattgaataaaataatcttaaagtttgtatgaaagaatgtccaggaattatcaagaaaagtgtaaagataacattttatgatatgaaaatatgcaaaagattaacatattttaataccataatcaaattatgatattacatgagaatagacaaaaaagtcagtagaatagattagaaaatatggaatatttgacagagcttatttaataaatttaataaatggtgtcggcacaactggttattcgtcaggaagaaataaatgttgaatccctattttataaaaacaaatggcccgggcactgtggctcacacctgtaatcccagcactttgggaggccgaggcaggtggattacctgaggtcagcagttcgagaccagcctgaccatctctactaaatgtacaaaagtgagctgggcatggtggcgggcacctgtaatcccagctacttgggagactgacgcatgagaatcgcttgaacctgggaggcgaatgttgcagtgagccgagaccacaccaccgcactccagcctgggtgacatgagtgagactccatctcaaaaaagtaaaataaaataaatggattaaagacatgaatgtaaaatacaaaaagtacaaatccaagaagaaaattatgtttatcgtaggagtgagtgtgaagttaggaaacccaaagaaacaacgggcaagggggatgaacaagcagtttacagacacggaattcagatcgccaggaaatatgtgaatggtgttcgagtctgccggtattccatatgcaaattamggcaacactgtgctcagtggctggcacagcattgcccagggcagtaagcgctattcactggtcgtgaggggagaggarttttcatgcgttcttgatgggatgtcaagcgttagcgccttttggtgacacccagtgaaataaaaaacactacagccttcagacatacttctgggaatttcaccctaaaaataaaagcaccttacttaggaatatcttcataagcatctttatggcagctttgtagtgaccaaaaaaagcaaaaaggaaaaaaaaacaatgctggatatcaagggaacctaataagtaggtaaaagtttgaataaattatcacaagtccgtattatgaaatgtgcaggtccctaaaagaattcatcacaggcaaaccagttgactcagaaacatttccaggaggtaytttgagtaagaagttaacatgtgcataaggatgtatagaatgattccatttttgagaagtaaacaatgaccaagaagctcctccatctatttctgtatccttcatgagtggagcatttgcgtgtctgtccctgrgtgtgtataatgcatttcacgtggcacctgtgactcatcgcaggaggctggccgtgggcaggtgctgttgtctgtgggggagagcctggctggtcgctcctacttttggtaccaaaactgtaattgctcttccaggacttagataatgctttggagaattcttgtagccttataaaaggaatgtgaaggactggttagaatcagtgcacccacacagcctaatgagccacgtaaagttgactagacagatcgtcaaatgcagatgatacacacacacacacacacacacacacacacacacacacacacacacacacacaccccctctgtgttggctgaaggtggagtgaaactggcctaaccccactgtcctccagggggattcagtgaggcctgaatcccctgctcctgtcctgtcctctcactgttgcctttcagtggctcctgcaccctccagactgcctgataatctcctctattggaggccacgtacctgctgcagagaatgtgtcgcgtggctgtagtcttaggcaacttaggtggggctgagaacccagggccacttctgtctgcgaagtggctcaaattcagcatggaaagaacggagccttcatggaatgcaggcgaatacagtgaatgtttgtgcctaaatgactgcgtggggctctgcaggtgtaggatgagggaggagtccagtcttttctagtgtcatgaaattcccaccgcagctgcctgctgctccccggacgggatttcctctcgctgccagtgggaggggtggggagggctggatgtggcgagggagtctgtagacagaagacattgccagctcccagccccaccgccttccccgcacactcgtcgcgctgtgactcccggccccgccgccttcccygcacactcgtcgcgctgtgactcctggcggttttctgtgttcttccagaagattggcacctttcttctcccacccccaccctccacccgcgatggcatctgctgtttatttttgttgctgttctgtgtgttgcatggacgctttagcagccgtgacgcccgcgtcttcacagggcccactcagcctcccgcctcacataagtgtggagttcagttgctgcagaggcttttgcctgatcagtttttaatatctacctgatgtcacaggttgattttgtatgtaacttgttgaaaggcacttgtgtaaaaaggtgtaaagaaagctgcttttatgaaagcagacgtttcccaaaggacttgaccccctccccaagtatttccgcagggatggtgtrgctatgcagaggtgagggtgcttccctgaagtgctttggtgagaatttgctcacctggcgaggggtttgcttaccagttcatcttaacctaattaagtttgcattgtctctggaacgccacgtttgggggataaaactcatagaaatactgaaatatagcaatgttgttgaaaacctgtggttatgtaaatatcctcagaactstttgtgctggagtaatatgaaatctcgatggctttggcagcagccttccaayaggtctgcggggtgcgggtgaaggtgacctttccaacatcaaggagaagggccagagaggcgcccggactcacagtggccctttcctggacccttcccaggggcggagggccagagaggcacactccgattatggtccatctttatagtaaygctgggacacaggcattgtcatgccaactccataactgatggccagggagtgtaagtgatgtcaccaaggccagaagccacagagaggcaccaagatcccagcttaggcctgtctgctgccgaagcctatatccctaaccaggatgtgagacccccactcattacataacaaaactaggaaaacttttctgcttatttatgaaaaaaagggaacatttctaatcggatatgttttccacaggtggttcctccccagaaatattaaatcacaaaggatataaaattctgttttaagyggcggcctgcagaatctctttttcctttcttctgcaccaggttaatgttagaaacttcagcttctccctgcacatgattctccctcagccggggaatgtcctgtattcctgccctagctgtggctttcttyagtcagaggtgaattgtagtggcgatgcttaggccctttgggcgtggccagattgacttccatgggaggcagcagggaaaggtgggcagaaacacctggcttctgaaggtgccaaggagaagtgttcaacaaggcggcgggtgaacagagaaaggccacagataccagcttgatacagagaggaagggctgcaggcacccgccctgggtctcacgatcacactcccagcccctcacgtccaccttgggtggagaacttaaaacacaagcaggagcagccagggggacccaagcagttggggagcaaatgaaagcactctcttcctgagatgccaggaggtcagcatggcgcctccagggaggaccagctctgccaagggagctgctgggcagatgatgactttgcattgtaaagtagagcccttggctagtttttggggacagtgtttaattatagcagaacagcccagtgatgacggcagagtcacgtgaccgtggagcagctgcatcmcgtgtgacatgccgggactcagtgacgtggcccacgtgctgccagctgtaaatcagggtgtctagctccgattcaaaagccctggccttttgaaagtggccagccttgttggccactccctcctgaagagggggggcaggacttccggctgctgcctgcctgggcactggggtggctccctgcccagcgttctgtgccctgacctggagccagctttgtgcactgccctccagacccctggcctctctcaggttccagctcacgaggacacccctctggtatcacgggcactgaatgggcactcgatccccctaagggacacccctctgaccacaaggacttcacttgccgccatcactcacgcttgatggggcaactcctttgaatcttgaatagtgcagaatgatcactacagagacccctgagaagagaagcatgggagcgacagaggccaccagggagggacacacagtcacagagcacattctgtcttcctcagtttcccccgcaacaagacgagcccctgccacatgtggcgctgtcctggaagtgttgttcctcttcccaaggaatgcsctgaggaagagcccacttaggcccctctgcctcccaacgagaagcacccactcaggcccctctgcctcccaacragaagcacccactcaggcccctctgcctcccgacacatgagctttcctctctgcccagggtttgtttcacaagggccgtgtcatcctaagctctgtgcaaaaagcctggtgttcagcgtcacrggtcccagtgacttctgtaactgggcagcagccttgtctgcagagggggagaccgaggcaggggcagcaagtaacatgctcacacagccagtcaccaaactccagggcgatggctttcccctcctcccacctcccagacaagtgtctccaaccctggccctgcttgctggttctgtggacagtttggtgggtgggtggtcccctgccccagggatatttttaaattgaggtatgatttacacttactaagtatacaaatcttcagtgtacagtttggcagatctgtacatgcccataggggtagtcatcctctaggttaagggatggaccctttctggctcccagacagctccccatcccctgtcccacattgtccccctttaggtaaccgtgactctcacctctagccgcrtggattcgttgcccatgcttggacttcctatgagtggaatgctgcagtctgtactctttcatgtctgcctccttctgcttcatgttatgtttgtgaggttcatcctcattgttgcctggacctgtaacttgttctttttcacgggtgtgtagcattcagttgtgtgaatctaggaaaatgtaccccttcttccttgtggacaggtggtcaaggatgacaggcagtcggctttcagcttggagctcttagaactaaaactgctcccgaggctcgtcttcyggtggcatatgaagatggcttatgttcgtcacgtgctcaggagtggggttgctggagagtcctgctgaaacgtcaccagcaggcattcttgtgggtcctgcagacacaccgccagcagcgccttgtgtccctcttagaatgcagggtgcaggtgccctgggcaggctgctgggagaggaggggtgactgttcctctctgtgccccatgctgagcctcactgagggcacttcctctccctgcttctgccctcccatcacgtcccagggtgagctccacaagtactgcactgcttgggatgaagctgacgtcaggttcagcagccagaacaggaagtctgggtccgctgccccccaccagctccctgacaatgagaccgactgtggctgggcaccgtttggtaagtcgattatcggtccgtccaggagccgaagcggctgtccttccagccttgctattaatcactttagcagcagtaatgctgttcccagatgtaactgcatttccatgacagccctctcctaccaaaaagcacatgacttcaccgccacggtgtccacagtgcctgtgcgcagagctgttcctcctgaaagaaggttctctttatggggaaatgtgctgaagatcatttgcattttgtattttggacttgcagggcatagttctgtgggtgagaagaagagagagacacgaggcgctggtgtgggtgctggcctaggcaggtgtgctgcagaaaagccagtggacacgtaaaagaaaaggcatcaatcaaatgtgcagccaccatgcacaatggggattttatctcatctgaatgacgcctgtattatatttagtgattatttgaaactgcggtgacttcattttcctttgcaagaaactgaacrgaaaatgcaccgccttgttttctatgtggaaaaccacgcgtttcactaagtacaccccgatttcgggaacagatgctttgtgttttatagccgtgctctagaacataaactaaacaatactgagcttgtcctgctggttttcaaattcatatagataagaacaactatcagcagctgcttggggccctggactactccttcctgtgcgcctatgccgtggggatgtacctcaggtaggtctccttcagttttccagacccttcctggttacctggcccctccgtgcagagaagacatccgctatgctgaagtgcacaggcgcgcgggattgaggcccccgcttgccactggcttccctgctgttcccttcccaaagacgaggccaagcttaggagagagcaagtgcgtgtgctgtgcccacaacacaggacctcgaggcagaggatttccgtgtcccgggcactgtgccaattgacacaggctgccctcagctttcctggccctgaagtttaggacctaccatgaatcctgccaatcctgggacgtggtcattcaggaacagaggactagtttcctgttcagcagagcccaacctctcctgtggttcagaggttgccatctgtttayatgccccaaataacgaatttcacctgatgatcgaaacagttgacacaggatgtgctgaacagctctacctggatgcccagcttggccccagaactctgagcacagcagaggcagccatgcatggcgggtggggaactccagagagagaccggctcggatctgagtcccagctctgagtacagcagaggcagctctgcgtggtgggcagggaactccagagagacaccagctgggatctgaaccccagctctaccacctgctaggatgtggccttgagcaagttactatacctctttgggcctcagtttcccctttgcaacatggaggaaataatagttcttatgtcataggattggggcaaagattgagttaatgtatgtagaagctcacaacggtgcctggcctgtgctgccagcccagcccattcttgatcccactttgaactgaccaaggcaggtggtgaatattatatgggtcataggacgtgtgattggctgattaaaaactgctattgtgtcagtccagccaggtttttttttaaaggcagtatagggatgttctagcccattttctgttgctattagcacaatatctgagcttgagtaatttataatgaaaaaaggtgtatttagcttttatctaactgggaagttcaagattgggcagctgcatctggcaagagcctcgtgccacattgtaatgtggtggagggcgtcacctagcagaggcccctgtgagatgggttagcagtgagcagggcatacaaaacagacacagcacaggggtgacgttgctttatagcaaccagctctcacctctcacaatagctcatcagtcctgagagmgcggccactcactcctgcggattcattccttcgtcaaggcggatccctcatgacccaaatgcccttcaaagctccctgtacctctcaacacagttatactggggaccaagcctcaacacaagttttgatggagaccaaccatagtcacaccacagccagagactgaggcatgtggtcccaagaggcttttgttcasagacagaggtctttaccgcctggagaaacccagggatccccataaatgtttagctgcttccctgagacctgcccagagtgtaggatcatcaagacctgggcccccctaccccgctcagagccctggtgggtggttggtgcccaggcaggcagtgtctgctrttggaggagagtgcatagctctccctttattgaacgtgtgtatttgcctcctgctgcagaacttgtctragtgaacaaatgaataataaagatttggaatcccagagtgtgtggtgtgcagcagaccaggagcctagctggagagtgtggtgtgtacctggggcttccttagcgcttgggtctcagccaggctgccagaccttctccactttgaggtcaaatgtttatattccccacactgcagtcttactgaacacaaataatctgtggtataaaaagacccaaagtgggartgtgtttttctcagttactggaaaactgcatttaaatctggttctcagctgggggcagttttgtctcctaggggacatttagtaatgtctagagacatttgtgggtgtcacagccagggaagggatgttgctggcatctagtggctagaaaccagggtgctgctaaacatcctacaacacacaggacagcccctaacaccacagaattaccggagccaaagtatcaatagtgctgrggttcagaaagcctgctttaagtaaataaactggtttcttgttgcttatttacggtaaagataattcttatgcaacttgtcagtaaggttattaaaacaaaatttggtctaatgtgacatctacacagtaaactcatgactgaaaacaagggcacatgctgctgcattgaaggggcctttttgtgtgacagtccctacctgaggtctcagtgatgggtgctgttttgttcgctatgtcagatgaaatcagatctgatagggtacagccattcagcccaggtactgcctggtgggttcaagcaggtgcagcgtggacttgaatccctgtatgagtcccatgtaatgtgaaatggtgtttgttcaattagaccttttctttaaaatttttcagtagagatcaaagtaggcccaaatcatatagcaagattagagaatacttctaagcctagccagcagcacccagctctcaggagcccatctggttgtgccagctgtgctgtgacctgggcaggtcagccagcctctcagggacctatctcctggtctctgaagtgggcaggttgaagtcagtaactctctagctctacaatgctcttgagtctgtgtgtggtgaggttttagctgaaattttcacctggatgttgtctataattttaagttactttcttctgctttagtgtttaaaaggtcatttgcatgatccaaggtagatcttttttacttggtgaattcggaaggaaaatctctctggcgtaggtttttgagatgaaagctgagaacattggagctgactcccggagtggggttcatggcaggcaggtgtcactgtgtgttaggtttcctgtttatctgactcctagaatgaccctacagaagaaagtgagacccatagagtctctaatgcttgtgaagggctcacgtccatccgtgatactctacagcttttctgtttacttaataagtcacaatgttaagttggtccatagtgacatttcccataaaacagtaagggatgttttggatggcattaggtattgtgctgtgatggcggctaaagactgttaagtctgttccctgctgtgaagctggagactttttaccacccccctcgaggctgttttagtgaggcrctaagcatcccttatgccaccaggtccccagacagctctagaagataagacaccaaagagggtagctgtttagtgaatcgcattgctgttcagaaggatcagagagatgccaccccagcatttcagaccttaccatagagcaaatcttctgcctttaaatcaggtcaaagtggtgtggcaggaggcggtagtggcaaagcagctgaaagccacttccccactgagcccagccagccaggtgtattaacacaggtgacttaattacagctcgtggggccgaatgacttgctcagggtcataagtgatctcatgacatttggtgtagtttgacaactggaattttaagacactatatacatttactggatatggtttatgtgaaagcaggattaactagcaagacgagttcctgtttcctttcattggcagctatcatagataagtcctagtgtttgaattttattatttgacagataggacttctactagaaataaaatcttctaagatgttgccagtctctggtttctggtgagtaagcgctccatagggaaataagtgtatgaaatcttcctggaaattgtaaggcttgagagttccccaagctcagagaacagcatgaaagcatccggcaagaaacagccacgaggttgctaacattcgggcgtgtttgttattcctatttgtctttccttctctccacctcagtggcatcattggggagcgcctgccgattaggtattacctaactttcgggatgctcgccagcggagccttcaccgccctgttcggcttagggtatttctacaacatccacagtttcggattctacgtggtaactcaggtaagggtttggrtccgtggctcaccatgtacggggtttccttggtgaatagggtggagtgtttatgtcacgtcacctctgtcaaggtgttgggaaggggcagaagtgcgtcctgtcggaagtcagggtcagctgacgtaacaaagtccttccctttctcttctgcttagaaattccagcaaccaggaggttttccttaatttcaggagttgcctcgtaaaraatgctgtctgtcagtgccccggcagggaractgacatgcagagcccttgggagtcactctgtcttcatgtggataagtttgaratgttttatcttgmgaaagatttgaccacttaggggttggagggtgtgtcctccagctgaagccccagctgcagtcaccctaacagcggtggcagggagttcccaccagggagcgccccaaaccatcccaagatggggctggttgggattccaamgaacaaagcactaaatgctgrgtgatcaatttaaagcatgtattaggggaacttacatactgagggctgcagtgtatggtcgcaacacacagcgggacagggcgttccacctaggtctgtccacagtgaggggttggcatatggagtttatttgagggtttaaggaatttggctcagggccagggttagtttctttccatgttttgggtcaacaactgaaacacctttatcagtgcctaggagtgttcagggaccaacttgggtccaagcctacaaaggaaaacctgcagctggttgggtcrcagtgagaggaaaaagggggagacctgaggagtctacagagggatgcaagggcggaaggaagggccgactttggagttgggcagcaggagggggtgtgaggcagtcagtggagagaacaggagagatcatgaaggtgctagaaggggagaaggcctgaggacagcgcgcgctggctttgcccttggagctggagcccttccrgaatctcctggcttctgcccttcccagcagtcctgtggatcaatattcagcagccgagggaagctgctgaaataatgatgctcatctcgggctttgtgatgcttctggggctccccagataggtcaggggaatgctataaaaccatcaagcagattgtatttaattttgcttttcaagattttgccataacacttgaaaaagtttggctattttaattacaaaagcaattcacacttgtgtagtaatatagaaaattagaagggaggagaaaacaattttccagagtcccagcatgtttctggagtgaaggcccagcccggtcagcccagaggcagcaacagttagaccagcggctcccaggcgtcttctagagcagcagtttccaacctttttggcaccagggaccagttttgtggaagacagtctttccactggggaccagggttggggagaggaggatggtttggggatgaaactgttccccctcaggtcatcaggcattcgattctcataaggagcgcacaacctggatccctcacatgtgcagttcacagtagggttcgcgctcctatgagaatctaacgccccgctgatctgacaggaggtggagctcaggcggcaatgcttgctctcccactactcacctcctgctgtgtggcccggttcctaataggccacggatcaggactagtctgtgcctggggttggggaccctgctctagagagctggcttactgcagtgaggtggtcagagctgccaggctggcccagggttggggaccctgctctagagagctggcttactgcagtgaggtagtcggagctgccaggctggccctggtttcgtgcagtcttgtagagccacccccgagtctcaagaygctagagcgtcctcagcaatacattccccaagtcccttcatgaaactcaagtcagggattcttcaaaagtgcagagatactttgtccaggcgcgaagtcaagttcgtgttcattccagagaatgattaacaacagtaccttctccatggcatggtaagggaaacatgcaattcacaagccatgtttatcatacaattctataaacagttcataaagagaagaaaggttttctctctttaaaaagtttgtatttgtttattttttgagatggggtcttactgtgttgcccaggctggagtgcagtgatgcaatcacagctcactacagccttgacctcccaggctcaagcaatcctcccatctcagcttcttgagtagcttggaccacaggtgtgcaccaccacacctggctaatttttaattttttgtagacaagggggtctctctatattgcccaggctggtctcaaattcctgaactcaagagaccctcctgcattggtctcccaaagtgctagaattacaggcatgagccgctgcacctagcctctttctatgaagtttttggattcaaaagagaccgggaagcttggccccacactgttatgaggtgtgatctgctggtggtggggttctggctgggttttttttcctygcttttctctgcttattctaaaatttccacaataggcatgcattgcttttattttgaaaaatatatagatacctgtatacatggttttaaaatatatatgtagtttaaactgtatataaatataaaattgacagtccatctctggctgtcgtgccccctgctttgtgtaagtggagcaagctctgtgcacctccctgcagcgctgtcccgggcctgcttcccacaggtcagtctctcctttggcctctcctgcaggtcatcaacgggctggtgcagaccaccggctggcccagcgtcgtcacctgcctcggcaactggtttggaaaaggaaggtgagaaaaagcagccctgtttccaatagcagatgaaaactagaccattttacttttagtttttctgtagactgattacagcaaaaacactttagtatcctctttaaaataagatggctgaaacctctggggcttgaattgctgaaattcagatggcctgtgtcccacgagacaggggagctccgccctcccactgtgggcctggtgaagtccgtgtcactcggcggctcctctgacagctgcatctggcctcccaggtgttgtgggagatgcagagtccaggaccctgccccaggccttttgaagccaaagctacatgttaacatgggagtttgggaagtcccgacctgggtcacccagcgcacagcaccaaagtagcagagctgggacccagcctggcgagtccagatttatttgtaaatggcttttattttatacagataaaatttatttatttgtaaaattcagctcagccaggccaaaggcttatttatggtggacgatcgcaaacaagatgcggaagctaaaacgggaacaccagcgtcatcaggtcttaagtcttagatactgtgcctcattcacctggtgtgtgcatccatgagttttgttcaaatgacagttcatcaagtgactgtatgtattaattgattgtagaggcacaaattttaatttcaggccttccaagactttcagggaaaggcctctttcttcttcttgagtacagaatgcgctcagagcaagaggtagaatgggtgatggcacagcctgaggccacataaacacatcagctctcgtgagcatcgcgagtccygcatggcacagaagcagggtctgcatggccccccgttgattctgcgccgactccctactttgcaggcactgctgcgccctgcactgctggactcgtttcagcttctcagctccatcttctgtcttctgttttgttgtgctgcaggagaggtttgattatgggggtctggaactcccacacctccgtgggcaacatcttggggtcattgatcgctggctactgggtgtccacatgctggggcctgtccttcgtcgtgcctggagccatcgtggcagccatggggatagtgtgctttctcttcctcattgaacgtaagtgcacgtggccttggagaccacccaccaagggaggcctcggrtttccctgcctgggtgggccttgggggcgagtgtgagagctgcgtggcctagcgccctgtttgcccgtggctgcctcagcgctcttcttaccagggagacttccccggggagccggttctctcctggttttgctggatttcctactctcccctgattctggagtgacccatgtccccattccttcctcccgtcctcctgtcctcccttgccccggcatcaggmgttcatgcatgggagtcttccatcttcccacaggctgttccttctcatgcccatcttgccaccacagcctgaattggacccagtcagctctttgccttctgataagatatatcttggacagtgttataaaagactgacttaatatcttaactgggtaaaaagtatctcttggaaaatcaaatctcttattccatttcagattcaatagcaaactctttatttaattgaatttgaaattcatttctgaagtagagatccagcaggctctggtgctgagaagattcaggacagttacagcaagaatagagatgcccgggtggccctggcggtcacacgacaggggctcgaatcccgcaagccattctgataagctgtactcaactcttagttctttgactgagtttaaaccatatggcaggagacagctccctcatgctgcctgccaggtagggacactcagagccagctccctccagccacactgggcattgctgatcacttcagctctgcatgcaaaagttcatccatattccatttagtcgctcactttttttgtcttgcaaaagctaaccttttaatttttaaggtaaccatcatctggccacactgtgagtttggagactctcaccccatgcttctgtgttggtgaaaatggaaataaacattcagatgaggaatgtccagacacacccattggtgtgagcaaaaagtgggggccccgggctgcactccgctcccctttccccgcttctgcagaggctgagtaagccttcggccacaccccaaacagcctgagcaggggcctcctgggatgggtgggggtctggatccctcccagtgggccagcatgtggctttcagctctggctggtgtgtcactgcagttctgagaaaggccatttccaccacctgttttcttccgctctggttcctagaacctggagttctgtgcccctgcgctccaagtgtttgagacaccagccacccggagaasaatgtgcctctctttgttagcgcacaggggcccctgggtgtctcctgcctgagggtagagtccatggggtcttctgttctcttccttaactggaaaggggctggctctggggagaaaaggacatgtggaagggaaaggagcttgctcaatggccgggacctcagcacccgctccaggcattcacggccctatgttgatgtttgtctctgtaagcagagagagctcagctcttgtgaataagcctccctgatccaatttgggcagatagcaatgagccagatgccccctgtccctgggtcctctggccacaggcccactcacctacaggaaggctgcatgcttcatctctagccaaacaaaaccaaactaccagaacctcctgcccagggaatctttctgacactctttccccttgtgcctgggaggtgcactgtgtctgaatgatgagacccagctgtgacaacagtggctggatgctgagtctgagaacaggagctctttgcagatagggaggaaacatcaagtgccccttggtttgtttctgcccctccttgtcccgaatcactgatcctgggcaggtactaaaggcatcagatgtgccattcttgcggtcaacagaggatgtggctttctctgctgctccttcactcytgtctcctgcccagggtgagccccaaaggacagggcgtcccctgctcctttctcaggcctctctgagtctcctttctgaagctgttctcaaatgtgtcccagccaagggacrtgtgtgcccaagtccctgaaggtgaaagtccaggaagagccatatcaggggaagcccctggcttacccctgggggcatcacactgtgagtggataccgatggggtgagttggctgatgtcctttaaattggtgaccatacatcacaggtggaccattgggactgcccaacatgcmgaccatgtgtccttggtcagtggcctcgccctatgggctgtgcccaggacaggagggcgacgcaccccacagccagccacggacctctgggtgcagacccacctggccctacggcatgttgataataaccttatcaacaaaacccagacaagaggtttgatgctggcctcgaggccagcaggagtgtgctcggcagctgcatgtccctctatgatgtcaccctgtgttgtrtgggaatggacttggctgtggggagcctgcagccctgtagctcagtttgggttgcaaggcagtaaccagtttcatccaaggtgataaagagaccaaggtgcttggtagtcagagggggctgcagaggtggagcgagaagcagtagggctggtttcccgcagcacctagaggcctggggtctgactctgggttcccrcattgctcggggcaggttgctggtgtctgtaaaggacacgctgaagcctcacttctggttctgttccttttcaagtttcctcccttccttgcatttacacaaagatgtttgttccatatcaagatagatgttttatctccactcatttttatttctaatgaatttcataacatgaaatacctcattacagacattcttccagcctcgctcccctgatgtgcttttcctggttttgcttttcttctggggcttgtcctctgaatgagagtcgtgggcttgtccacacagcgtccgcatgctctgcttgtgattattggccacgctgggaagtattttccatatttaaagtagcgttcacgttcacagtgttggcactggctggcggtgatctgccataccccccttgcacacaagtgggctgccaggccgagtgactggggacaggccggggcrtgtgcgggagtcactggtgggacagccaagctgtgcccttgccctcacctggcatgctatggcgatggcttttttctgaaacgaatgccaatttagtaaaggtataagatggcatcttgtgttttattaaattttattgtgtatatttaaggtatgcaacatggtgttacagatacayagagatagtaaaaaggttactagtaaagcgaagcaagttaacatagccatcgcaactcacagctgcccgcttttgtttttgtggcaagagcagctcaaatccactcatttaatgtgaatcctgcatacagtccagtttcacacccggtgctcccrtgttgccctgtcctcgggttacgtagcttacttggcattgccatggtggtggacctgctcagcctcactcatgtttgctctttcagatccgaacgacgtcaggtgctcctccaccctggtgacggtaaggaccctgttttcttgtccttttctagaacagtgtgcggttctgaccacttccccagcctgctcctgcctgtgcggtgtcagacagaaacacacagggtagacagaagtcccaccctcaaaacattggcagttctaggaatagagaatattctgttttgggtttcgctgataataaccttatcagcaaaacccagacaagaggttcaatgctgtccagatgaaggacttcatgctaaggggaaccaaaggctgggccctggccaggcctcctcaggagtggagacctcctggtttccccaggggcctcagtgtgacggggaaaaacgcacgtgtcagctgcctgccatcacttaagttggtggctgcacgtctcaggtggccgagaggtctgcccagcacgccattccttctcttctgtacccctgcccagctcagccagcgtaggccctgcaggcaggattgctgaccacgttggctgccatgaatgagccctgccctagctgcctccacccgcagccagtcaccactggccactttcccacctggctaaggccagccctcccgcggtaccggtcccctccctctcatggcccagggcttgactcccgcagacacaccccccgccccaaataccattcctggcacactcatgtagtattggtggctgtcttggaagaaagtmcctctggccctcatgcctgctcccagccgccccgctccccatgtccactggcatgacacccctcctgtctgcaggccaccgccacctcacgggaacagcccatcagatcccagcaacgtcacccggacrcatagggtggtcagctctctggcctcaccctgctgggcccgtcgcccgcgtctgacccaatgcttccctccctctgggggtcagctctcttccctccctctgggaaaggctcccctacccgggctaacatgttagtcacgtctgtgcckagtgtcagaccccagatgtgggggtgcccccaggctgccctgcggcctcctctctccttgtctgcccgctcactgcaggagagcgcgctcgggcctttcagcggctccaggtgcgttgatgtcgagtcaccatgctgtccccagagtgacccacccctgagctccgcaatctgaggtctcaccaccactcaaccttcccacggagatgtctgagtgtccttcagacttaacacgactggaggagatctcttgattttacccctgcacaagccgatcccccagcatcccccatctcagtcaggaagctgctgtccaccctgtggacaggccagacccgaggagccagcccaacaccccctcccttcagccccgcaccccatccttggscatgttctgtcagttctgctctgttctgtgaggggatgtggaatggaaaccctctcacctcctccgcctctaccaccctggtccccgtcaccaccgtcagctctcctccgagccactgctcatcagcctcctagaacgatccactcttgctccccagaatctcttcttcacaccgcacttgcagagactgtattgatacagacgccagagcacatcagcccttgcacaacacagtccagtggctccatgtcgccccrtgtgaaatcctcaccagtccatctggttggtctctgtcaccctcacagaagggtgcgagcccctcgggcctggatcatcactgggtcccggcacctggggcagcacctggcctcgtgcgggaggggggccagagtcctttttctgtcttttcatacctcgggctcctgggtgtgattcatatggaaagaagggttctgatacttgatgacaaaaacaaagaaacaaaatgaagtttgaaaaccagtgccttcaggaaggtcaaacaccatatgatgttcttaaaactatggttgatattttaaaatgttttaaaaagccrtgttcctgccctgagcatgaatttcagtttccaagcttgtacagtcrtgccgtgaagtagcttaaagctgcccggaccagccgtcttgagactggggagaacttcgcacacaccttccgccctggaacaccttctgtcctctaagaagagcttttctcacccaggggcggccaggcctgaggataggaagcaggcgtgcagggggttttggggaggagcagctcttcctcacacacagcttttaggaatatgagagctcatctaggcgagaggcattgcttctgctcctcstgtgtrtgagtttggggctgaagcctgtgtttcattctccccgttcaaatcctctccragcagttcactgagatctactggtgcccaggtgtccccgacgtgccctgaggcaggtggtccagagaaacagcttctcgtcctctctcctctccatgttggctggtcgcagagggagagatggctgatatctggggatattttatcagcttctgcaaacagccccaaagttctttttcctgcaggaatgttacctgctctgtgcaggacaccaacgagacccttgtcacgggccttcctgagggagctgagggcagtttggccaatgtcccatcagctgctgtccttctgtagtatcttccctttatcacaaatgggagcttttgggcaaagcaaaatgcatttgtaagagatttcagatgtgctgacttgttctgggaagttcccatgtggaagtgttatttttaggataaaattctaattttttccaatattttaaagttcttgttatggagactttaaacatataaaaaggtaaaaataacagcataacgaacccctgtgtacccattacccaagtttccaacagttggccaatctgactctatcaacgccccttctaatactatcccttcccacctcctgctgatgtattttgcaagcaaatagcaatcatcttaatattttgtctctgactacttcagtatgtttccaaaatataaggactcttttatgtgaaacaaaatgtactataccattatcacacttaaaaaccaatggcaaagaatagaaaaacagtagagaaaatcaatgaaaccaaaagttggttctttggaaagatcaacaaaattgatcatcctgcacctagactgaccaagaataaaggaggactcaaattaccaaaatcaggaccaggaaaggtggcatttctgccacatttactgaaataaaatggattatgagggaactatatgccaaccaattagaaaactttgaataaatggaaaaattcatagaaggacagaaactaccaaaactgactcaagagaggaggaaatctgaatagatctaaaacaagtaaagaaattaaattgttaatttaaaaacttcactcaaagaaaatcccaggaccagatggctttactggtaaattctgccaaacatggaaagaagagctaatactaattactcacaaactcttccaaaaaataaaagtggggggaaacttcctaattcattctatgaggtgttatcgtaataacaaaagactaaaacctcttaagaaaactgtacaacagtatcttttatgagtgtagatgcaaaactcaatagcagcaaccagaattcagccacctacaaaaggattatttaccatgatcaagtgggatttatcccaggaatacacagytggcttaacaggtaatgttaatgtaatacaccatttgaatggataaaggacaaaagctgcatgatcatctcagtagaagcaggcaaagcactggacaaaatccagcaccctttcatgtgaaaacactcaacaaactaggaatagaaagcaacttccttgacctgacaaagggcatctaataaaacccacacctcacagtgtgcttaatggtgaaagaccaggtgctttccgcctgagatcaggaacaagactaggaggcctgctcttgccgtttctatttaccattgtaatgcaggcaggccagttaggcaagaaaaggatataaacggcatgcagattagacaagaagtaagactacttctctttgcagatgacatgatcttttatacagaaaatcataaggagtcctcaaaaaaatggttagagtgaattaataagttagcaaggttgcagaaaacaagaccagtatacaaaaatcaattgtatttctatacactagcagtcaacaatccaaagatgaaattaaggccgtttcatttacaatagcatcaaaaaacattacgcgaagcagaagaaaccagtcacaaaaggtcacatattgtatgatttcattcatatgaaatgtccagaataggcaaacctagagatagaaagaagatgagtggttgtcagggactagggtgggaagaaaggggggatgactgctgacaggtatgaggtttctttttggaggtgatgaaaatgttctcaaattgtagtgatggttgcaaaactgaatttaaaaaccactgaattgtgaacattaaatgagtgaatggtacagtatgtgaattctgtctcaacaatgctattacaaatttttaaaatctataatcctttctattatcatacagctactcaatggtcagatctgctgattgtcttataaatgattttgcactgtgtttgagcaaggcctaggcaaggtccactccttctgattggttaatttaatgtgcctcttaaggctcttctaatttataggacctcaatggttttttttgttttgttttgttttgttttgttttgtttttttggtttggtgttattctcctttgaattgcttttgtcaaaataaaaaatggtcattttttctaccaagtttcccacatttgaggctttgctgaccttgtacctggggtgtgtttcacgtgttcctctatcccctgtatctcctgtaaactggaaaccttcatctgatccagatttgatttttctaattagtttttgtttcaaatgaatcacaattaatatgaaagagagtattcaattctttaccatttgccttgagtctgagggtgctaataagaatgtgtctctttatgcttctgccctgtgctattgaagagccatgggaacttgttcttttgatttgtatttgattcctaggttacttaggtttaggatatctattttgtgccctaatctaggacctcattgggtccaaaaccctgtatcagttgtgtcaaaattaatgtttttattaatatcttcagattagttggggttgtgttcagcagcaagcaatagaaaagcccacaggcagttactaaaacaagatgggaaggtatttctctcttctattcaagaaatctggagagagccagcccaggatgatgtggggtgtgcgtgttgagtgtcagggacacagactcctcttgtcttttcgttcttcccctgtgcatggcttcatgccaaaggtgatatattccaaccaattagaacagtgccaggcacagagttgatgcttaataattatttgttgaatgagtgartgaatgattggtcagtggctgctggagctccagccattacatctgtattccagccagcaggaaggagggaaaggacattagggacaggccccttccctttcaggagacttcctagcatttcctaacatcatttctgcttagctgaccacatcaagctgaaaaggaattttaagataggctttgcctgagcacccacgttcctggctgaaaagcaggaagaagagggcccgggtgatgctggcagcctctgctcactgcgggggacggggggccgagtgctggggagcaggaacccatctctgcttctgcctggaatggtcggatgataaactggccagataatcacccctagcctggcaggctttgccctccctctgagcacaaaacaaatgtatttttaaaggtgttttgttacattttcaagtaataagatcaatagtttttcttaaccttcagaaaccttttcaggggaaatgcctcgaaatgtaaagggtgggatccaactgtccatctgaacggagtttaacccatgctctgtcttccccgtgtttcccgccttttggaggccccatagatctctacttgcagatctcacagttagcgtgcaagcctggtggtttttcttctcaaatgcatccagcactagtgccagaaatctaaatcatctgggcctctctaagccttagaaattgttttgttatcatttatactagagtgagtgaataacatctttctaagtacagactgattccttattttaaaggaagtttgtttggactatttcatcaacaaacaacaacattttaccactggagaatttcaacaattatttttataccattaattatcttcaaaaggggttctacatagagccctgtagaaataatgattaggaaatggtacctttattctagtgcccaagaaactgccttcatttcttcacttttcacttggtaacaggagataattttgaaatgattttgagttttggagtgcatcagtgcagtccttccacctccctgccctctagcagcaggtccacattctggggctgttgagcaagccacactctccttccctagagacggttttttttttttccttcagaagcattcggctgacctagggagggcaggtgttcctcacatgttaaagggaaagattggtctgtgccttttcatttcaaaaccattgaaacaatctcacggccattcagaaaagttaagttggcttaatgggtatttttacatttgattacacctctgtcttagctctttcttcaagagaggattttatgytcacattctattatctgagagtctggagtgttgagatcaaccattattctgtttaaatcagttgtcttatgtcctcttggtagcttttttgggacgatagtaagtatccttgctacagtaaagccaggtttaatttctagctgttgaatcagtatcgctctaatgaaacttttttttttaccagcactcaaaaggctatgagaatggtacaaacagattgagactccagaagcaaatcytgaagagcgaaaagaacaagcctctggtaagtcacacacaacttccacttcctagaatgtcggagctgcaggaaaactcctttgagccacgtcggctctctgtccctctgcctatgtgacatgtgtcacaaacatccaggtcttaaaaaaattctgtctcattgtatttcttcagtaaaatttgagtttgcccttattggctttctttggattttacacttaaccagttcattcattcagcagctccgcacctttcaatgtcccaggcactattccaggtgttgggggcggtgctggtgtagacggaacgcaggcagagacatcccccaagcggtgccaagcrgcaggaagacaggctgagcaggctctattttcagctggccttgggaggcttccctaggcaggcagtgttgaaacagagctgtgagggactggagggagagtctgcaggtgcctgagcacagagggtgtcagggtgaggggcgcacggtgggctggccacgtgaggtgcacacagaaaactgacatcatgggaccaagaaaagggagaagcaggtaacagaaggaggcatctccacctcccctatgtcacagatgaggaattccggacacagaaatgctaagttaatctgccttgtcatccgcggtagcagggaggcctcagtgcaggtctggcccacccctagcacctgagcctcctgtgccctacccttcccatcatygatccttgtagaggctcctcacattgctgctgcttagctgaccacaccaagctgcagcgggcattttaaatttgagtttaatcattgaagttataagctgttctctttctagatcaggtttttgtttgtttggttggttggttgkttttttttttttttttttttgagacaagatcttactctgtcgcccagtctggagtgcagtggcatgatctcggctcactgcaacctccgcctcctgggttcaagtgattctcctgcctcagcctccctattagctgggattacaggcacccaccaccacacctggctgaattttgtatttttttagtagagatggggtttcaccatgttggccaggctagtcttgaactcctgacctcaggtgacccacccgccttagcctcccaaagtgctggaattacaggcttcagccaccgcacccggcctctaaataaggtttaaccttctacagcagacacagggcctctcctctgtcagaaagacccctccagcatgtgtaaggggctgctctccctatctttttaaattaaatagcttaaaggattaatgtactaaacatgcatctcacttttttattgactgcagaaatttatttgtagtggctgaaatattagaaaagggaagaatgatgtctcgtgcatctgggttcttggattttagggagacagtaggcagtgactaattcaaccaaaatgctttaaaatctgtacttacttctgaattcacatttaaacaaatcatgtcccagtgtccaaaaggctgtcacccctctctgatgatactgaagcctgccacttcttctgaatcaagaccacaggccctttcttctggtgtagtaactgacccatagaactagccttggcttctaagtatagtttctctctttccttttccggccctctaagaaaggctgtttacagacttgccatcaaggagccagttatgtaagtaaaggcactggcaggccttatttcaggctgagggtgacgaccacaaccgggcgcatgctgacctcgcttacrtggcatcccctttcggcrggcctgccattgctcttgggtcagggtaggcggggagagtccccatgaggttggctggacaccctggatgtcccctttcccagagtgacckctgggctcagtggggtgtcacccagcccctgacctccactccttttcagacagagctgctacactatgtcacgtagcaggcagtttctcagtggcctcttgaagagacatgtaaagaaagctggggggcggggagcaaatgtgggaaagagaatgaggcgctgctgtcacttggccacgtggcgagcccgcaggtccccgcgggcgttttagaggattgtcttggggacggtcgcacttgccatccctgtagtcacttgtcacttttcctccttgacgtctctgaggatccttctgattggctgtggctcaagaactgttgggcccaccaaacgcggcgtgagcacggagtgggtatttggaggttgaatgtgactccaccgtgcactttgcacgccaagtggggactccacaaatctctcttgtgatggcctttcccaaagggaagctgcagacagcatcgggtagcggggtgagcttagcatttttagataaagcgatcgttattacgcagtccccccacatgcgtctgtgtgtatttttgttgtgtgtgggggcattttagtagagggaacccttttctctttgaaagtgtaagccctaagcgtggagtgcactggccacagaagcccccacacccaccgggggctccacagatccyatttggggctcttgggacacagactggaaactgcttgtttagaggcagaggtgcctcttggcctccagccttgtcttggtccacccagtggcttcttgtttgctatgtaaggaggaggcagcagcagccccctgtttgttttggaaaaccagccatggccccacactctttcccatctcctccaggagcaaacaactcaggtatggtggctacaagtcctgtttaagatgagtggctgtgagcacagggcccgttctcagcagaaacagagccttctgtctgtctcgggggctccttgctgcttagataaggagcagagggtctgtgtctgtggctttaaaccagcccagcaagtggaccctgaagcactttacaaatcctgcaagggccgtgggcggcctttgggcatctgggtcctacctgaggccaagtaggtcttctgtgttgacctgcggtcacttctctgcgggtcagagggtgcgcttctcctggctaagcggcctcgttccgcttgacttttctccagctggctgcatttcacccactgctgagcctgtttcctgcggaacggcctgtgaagtcctgtagccctcagcttgctatgagtggaactcgcctggggctgccccagggactgcttccgtggggctgggggaattcgaggcttctcaaagccccccgaggagattccagtgcttagccacagtagagcattactgatgtagttttctaaactggacgattagcagaattcatgagagaaaagtttattcagaaactcaagtcgccattctttgctttcacgtgccgtgatgggattatcatcgggagcatgttaggcatctgcactcagccttgtcatcttcattccagagcacctgactatgtggccacatgtgaatatcttcatcagagacccgctctccatgccagagtcctagctgtgaagccgggcttcctggggcacgtagacgctgggctgcccccaaggccacccactgggtgcccacactgggctgcactcggtgccacctgccacccggtttccaaatgtctgttttccactggaagagaattctaaatattctaaatatcaaggggcaggggaatgtggaatacattaccattttcttttttttttttaattaarctacatttttagtccaacttataacaggttatagtgagataagtaccacaaagcctgtttgattttgtgaaaggtcygagatacctagaagcatttctttgtaagaccttgaacctcatagctcactcatgaaraatatttttattttattttcattcttttttgagacagggtcttgcccgggctgaaggacagccgcacaatcacagctcactgcagcctccacctcctgggctcaggtgatcctcctgcctcagcctccagagcagctaggactacaagcgcataccaccacattccactatttttttttaggtcttactgtgtggcccaggctaagattatttttatgttatccttgctctgacttgaaatcccactctaggttggggaatcactcttctttgctttaatgaatgtacactttgtcctttaggaacgtctagacaatcagaattcrtaaatatcagaataggtgtattttaaaataatgttggtgtattttaaaataatgttatttctggtcatatatggccattgtgaactcctaaaaaatgcaggatcatgtaaagaatttcttattagcatttcgataaaaattacacataattccaccactcgctgacaaccattgttggcttagattttagcttctttctttctagaaatagatcctatagttgcctagttacatacgtagatatttaaacattctttgaggttataatgacatgcagttttgaatgatgtgttatttaatgtgtcataagcattttccgtcattaaaatctcccaaccttttttttacaagatgtcattcgtatggatgtatttgaattttctattttttctcaatgatgatgtgacatccattttactttataagtatctttttacttttcaaattattttttgccaatagattcctagaatttctggatcagaggatctgtgtacctagccgttcatgaaaatgcatgaatgctaatcattctaacacagtggccaggtgggaatgtcacccaggatgtctccaaggcagtggaagagagagccgccaggcaccctcgtcattaggaagcctggccccacttcacccagactgcccggctggtaacacctttcctttttgttcccaatggatttgcctccaggacccagagatgcagtgcctgctgctctcagatgggaagggctccatccacccgaaccacgtcgtcattctccccggggacggtgggagtggcacggccgccatcagcttcacaggggccttgaaaattccagtaagtaaacgtgcccaggaggagtttcagaaagggctgctgtgctggctgtgggaagtctggtcggttgatgattaagcttaaaaagamatctgtggttgtagaacccggggattcgaatccatagccaaagctagacgctgcacagtgctagcttcaggactgaatatggctgcagtgatrtttgttygcctcataccatgtttaaattttttttgaaattcgttttctccatttagaaattcrggttcatagaaaaatggggctccctgccttcactggaaaaacggaaagcctggcaccctgggcctgcccccatgtgacaggttggggaactgaggccctgactactgtgccacctggcccctgtggcccggcccctccccagtgcacttgccctcccacaggccttgagcgtgagcccatgggaggcgctggcactgagtgctgcgccgtggccttcgcgagcccggctggattctctttccctttaaagtgcctttaggctgggcgcagtggctcacgcctataatcccagcactttgggaggccgaggcaggcagatcacctgaggtcaggagttcaaaaccagcctggccaacatggcaaaaaccggtctttactaaaaatacaaaaattagctgggcgtggtggcaggcgcctgtagtcctagctactcaggaggctgaggcgggagaatcgcttgaacccgggaggcagaagttgcagtgagccaagattgtgccactgcactccagcctrggtgacagagcaagactctgtctcaaaaaaaaaaaaaaacmcaaaaagtgccttcagtgccacagcccgtggtctgattgcccgtgtgtgtgagcagaggatgccaagagtgagggggaggatgcagggaccaagggaagaacgagtagcacaggcgggagaagccctcagaagctggacygggctggtcctcggtggtgctgctggccttgcctccagactagaagggcgtgatcagcgggtgatcagtatcgggaacaaggtgacttggagcagatgagcgggaggggcactgtagggagatttcttgctgctttcagtttttattacattgatggactctctcagcagagaatctaaggagctgtgcacagggtgtggagacactgtgttcttccgatgggggcagagggctgagagcaggggcgtgggagggagaccagaccctgctgtgtgggctgggcaggctgtccagggtgggctgtccagggggcgctgtccagggtgggctgtttggcggggctgtccaggccgtgctctccagcactgacagccacagcaccagggagcagacacagctctcgcttgttgacacaacctagagaaaggcagagggccaggggcacaggcccgaggcccctcagcaggtcagggctggaagtataaacaatgcaacccagacctcaaaatcatatcacagaaattaaagactggggagaaccttggcttcagaacagaaagtattccagtgcccaggagaaactgggtctgcagaggtggaccctggagccagtgttcagccagaggagaacgtcccagcccagggtgggcaccagcttatggggaaagggctgtgcatgctggcctgtggaagctgctgggtttaagtaaaaagatttgtttttaattgtgtccttaatgctagtgaccttttctgctgtaccttcctctgtagctacccccaaatacttgtacyaaaagtagggtgcacactagcataaaaatacaggtttttatatagtggaggtatagacagtatgggcttcagaggtcccgctcaagcctccccctgccaccgccaggctgagtgttcaggcaagtgtggcacactctgagcctccatgtcctcatctgtcacacgggttccatccctggggtaataccatatgttgttctgaggatgaagtgaggtcatttaatgacaactaagcacaatgccaggcccatgaaaggcatacggtaaattacacgtacacatcctcatcaactgtgaagacrtcaactcgtttcattttagaatgacttggcaaagtagagcgctgggttcccccggcccccattctgattgatttccagtgcacagacggctgggggattcagtgccacartgttactggatttctcactctgaattttcagatggcatctggaatttttatctcacaagtgccacctctttctaaaagtagacataaaacaaacacaaacaggcattttacagaacccaccactcgatttcctcactcatacctacgtgtctcttttcactgttttccctgatacggactggtctgtagtactcacaaggcgggatgcggtagcctgtacgcctgtgtgctgacacaatggtcggaattgtttcatctgtgtgtttccaggtggcttgataatgtacaatgatttcagttccagrgaagaagaaggagccattcgatactcagtccactgcacccggctatacgagaactcttttaatagctaagttttccaggcgatgtagtrtgaaaatcaaacccgtccatgtttgcattgactcgactctgatgtaaagacactgggttttgatcctgaactccatttcgaaattcagaaacgccgtagataaacagggcttcctgtcttcacttgaaaagtagaaaatctggccacgctgggcctgcaccccatgtgacagtggccgaggagctgcagctggggccycacccttctcagaggycccrcccctccctggtgcccctgctcggggtgagcgctccactgttcccgcgtcctcactacaccacacagcggtgcagcaccctccccagtacgtgtctggaggtgctaaagccagaccagagacaggatgtctttatgggagcgaagtcatatttaactctgttgcatgtttacacacacctgctgactccacatttggaggagacgcctgactgctctctctttcagggcgtgatagagttctcactgtgtctgctgtttgccaagctggtcagctatactttcctcttctggctgcccctgtacatcacgaatgtgggtgagtatccacgctagaacacattaaattccgcacagtgactggggtccgaagtctcttctgtctgctggtttctagagtattgaaaacacaaggtcatgaagggtgatttgagaggtacacctttgaataaagtactatgatgaaacataggctaaaagaattcagatatgcacattgtattgccataatggtaaactttatggggcttcacggttgacacgttctatcccagctagggctaccagttcatgaggtacttcctgttctggggcagcctgcgtttaaacgtgggctacactgaactttggatcatagcagccagtgagcagaagcagagcctttggggacctgagaaaagaaatctctgatactctgacctggaaatggcttctgggagatagcgtctcatttttggcagggccgacagtttgctttatgtttcagaagccccgcagtggctgcagctatagattatcagaaaacgtgccagtgaaatagtaacatgccccccccatgtcatgtgtgaacacaggacagacaagaggagatgaacagtgcttaagggaaggagccgttgagtggggaaattggaaccctggctgagaggmagcggggatggtccaggagcacgtggagggctcttygccccgggagccagagagagcgagaggaaggagaagacacacgctgggccgtcagggaggggcagaatccggcratgtctcaaagaggaggcctttgagaatgggggaggctgaggarcacagaccacctattctggggatgcagatcccaccagaggaggatgctggcagcacgaggctggagactgaataccctgggagggaagttgaggaggcggtctggggactgtcccacagcctagcagggacagggcctgccccaagggccagtgactggggaggcagcaaggagcrcccttggatcctgaggttccttccctgccttgtgacccccgcctcactttggccagtgagctgcacacagctgggccttctttctcccttcttcccctgtggttgcaaaaggggtgacgttctcaggacttgagtcttgaactgctgacatttccagtctgtttgaaaaaagcaaaattttctgtccatgccattgatgattcggaacggctgggtttgacccacagccccagatgccgtgcagtttcctctcccacacccggctggctcagtccaccttaaagcccagaacctgtacaaaacctcatggagggcaccctgagctggtgccgggaggcctctgtgtcctcatctgcagttctaaagccgtgtgacaggatgatcgagcatccaggcgccttscacacctccacttctgtcctgtgttaatctaactttatggcggaggggcccctgggggggtctctgaaccaaaggtgggataattagactgagcagaggaaagccacggtttttggttaagagtgttttcatcctttctgtgttacttgttttttaaatctgagttaactactaattgctcctcggtataaatcaagcttatgaagccagagtcccgtgcacgggtcctgttctgccatggtgtgtcgctgcgatgcgtgaaggagatcctcactgtttcacactccgttgtcatttcaatagatcaccttgatgccaaaaaggcgggggagctctccaccctgtttgacgtgggcggaatctttggtgagttcattaagacttgttctgctgcaacaataatttcgcaaggcgcatgatctctgagttgattcactgctcaggggaacagggttccccaaggtctcatatcccctgagtgggcccagcccaagagggtcaggcygtcacctgggggtggttttattgtctcccgtccctccccagggccctgactctgcacttgaacagcttccctcagaaatagcatgccagctggactcaggggctcatgcctgttatccagcactgtgggatgctgagttgggaggatcgcttgaggtcttcttgttatgaagaccaacccrggcaacataacaagacccctctctacaaaaaaaaaaaaaaaagcwtagctgggtgtggtggctcgagcctgtggttccagccttgggaggctaggatgggagaatggcttgagtctgggaggttgaggctgcagtgagccatgatcatgccattgtgctccagcctgggtgacagagtgagaccccatctcaaaactaaaacaaaaaaagcagcagcatgtctcctgggcaggtgacagactggccaccttagtaccttgataggtaaaggggcttcgaggctggcctaaaacctgaacctgcagatgtctccaagactctcacatctgaccacaaccaatggaggcctgtggggaggtcagggctgtgagaaggctgcctgcccgtgatgcatggagagaggggcttgggaaaggaggaggccgttctccgagctcctgcagttctgcttcctccccgtgggctcatgccctgggacgtcagtgcctgaagcccgcctctccgttgcaggtgggatcctggcaggtgtgatctcagaccgactggagaaaagggcctccacctgcggcctgatgctgctgctcgcggcccccacggtcagccgtgctgccttccctgggccccaaagcctgcagacagtcccccactgtcctcctcgccagccagcatccttccatctggcccgtgctccactttcctgacaagcccrcttcattccctctcatgcctcctgtcccccgacccctcccttggcacctgcaggcctccaccaggctccctctgccacgtgcacagctgctgctggtttagcatgggcygcgcgcaagctgctcctctctttggggtgcccccttgccccagacaagctcctgcccatcctttgggatccgcaacacctccccaacctcttaggcatcgttgacacctcccgtcatgatgcatggtgcatagtgcttttcaggcatttcgtagctcctgaccttgggctgtgacacccccctctatgccccagttccctcatctggaaaatgggacgtcagtatcaccaccttgcagtgggttagaaacaatgcacatggttactgtttttatcatcgtaacattagaggtaacaggcttgtcagtggacgctgtagctctgcgcrtctgcccctccgctagccccagaacaaggcctggctttcagccatcttggggttctggacatggcccaacacagaacatgaaagaatgctgagtgaagaaatgcttgggtgggccccttgctgccactggggggtgggcagcctgaggacttggcagtcagactmgcaaatcaggagctcaagaaggcagccccttggctgggtaggagctcaggaaggctgcccttggctgggggtgtarggtgggagcaccctgcagacttccccaggtcgcctggggtgcttggtccaaagccctcgtggtggggacaaggctcagtacctgagacrggagggggcgtggccgtcacgcttttttaggggtttccactcttgggatggctgcctgagaatcacccgccgggtttttgagaagtagatttccagcaatctcgcactgcttgcagccagccatggctttgaccttgtgtcttgatgtccacagctctacatcttctccaccrtcagcaagatggggcttgaggccaccatcggtgagtatggaggccttcctgcttttcttccacacacgtttttaaagttcacacagctggcaagatgaaatactaaaatcaacaggcgcattgagctggtttaactggagcacatggtgtggctaaaattgtccgtgtcctcctttgggcaagaccatctggagaggccggggtctcctctccccagtgygaggcttgccattctgtgggtttcactgtgagctggaagtgtgcaagcctggtctggggcagtggccctgggcactcagtggagaagccagatgtgaccttgagggcagcccctcctggggccttggtggggctggcggggctgcagcagcctgcgacctgccacctgcaccctgcacccctggtggtgagagcagctcaggctggctcttgggccacgtcaggtagccaggaacctggcggtgtgacctgaacagggtccggccaggagccagggcaggtggccccccagccacctcctcccagctttgtcagctgcccctccaggagcggttgcgtaaccttggaggactattttgaacaccctgcaggcagcgctatcaaactatgcctccagcacttagaagtatgctttctgtcctaatgagccagcagtggggatgtgtggtccccttaaatgttatccagaaggcagcttgcccacaggagaggaagcggaatttcctgtgaccccccctcaggccagaagcttcctcacctgagtgtgagcctagaggagagtttaggaaatgacctggtccggagagagggtgggggtctgccctcagcgagcaccacagcagctgtgggtgaggagaggaaggcctttctgctgcagatgaagcaggggtcagcccaggcccagggtccggcctgtgatcgctccctcatggtggcagctgctgcccttcgagggtggatgagcctgagtcttagggagggtatgatttgctttagctcctcactagacaagtttagaggaagctgtttctgctgcatcccctccctgtgctccccaggcgcccacctcaggctgctcctatgcatgcggggctctctggagggcacatttccattctttgcccctctgcctcccacagccatgctgctgctcagcggagccctggtcagtgggccctacacactcatcaccaccgccgtctccgccgacctggtgagtagaaccgggagagacaccagccctgtgggcaccctgccatgtgccattcatgacaaaagtggcctccattactgttagtaaaactgcatttgcagaagcacgtttttggcagctcacctacacctgtggtctccagccttcccgcacctgycccsctgctcacccttctcctaaaatcatgggcaggttggtgcaaaactcaccgttcagcacaacaaaaggctcttgggcgccatcctcatgactcaggcgccttttcaatccaagggggcaggggagaggtcctgtcctggacgcctctgcagagagagaggggccacgaagaggcgctgggggattcggcccttctcatccaggtaccatgccctgccttggwcacctttgtattggacgtgtcctgaaactgcctgagtgtgcgtgagcatgcagacttgtgtctacatgggcatggaaaattctggaaggatccacatcagaccattagcaatggtcagccttcacggggtagaggcagaggagagactttcacttattttttagacttcaaaatacgtaggttctggatgattttcatattgtgtgttctttattttatatacatattacgtgcatatacaagcatttatttttttgaacgctggttcatttttatagttttaggcttctaggcactgtttcccctgatctttttcccctcctattgtcctcattttggcttttttcccattgtctatgcaacattttcaaaaccagagctcctggcggctgctcaccgaggacctgcgccasscttggtttctcagctctcccctcctcccttcttcccctggcgtttgctattgatcakgttgaattttaggtcctgcagagacatctgacaggggtcccaggaaggccctggctgtcgaggaatccagcagacacgtggatgtgtctgggaaggaaggccggcgcagctcagggcaggggcgcgcgttgcgcaccttcacgcctctcacgctggctgctctggggcctcagggaggagcaggactgtgcggaacaaacgttttttatttgaagagaatcctaagagttcttgtaactagaaccaagcatttctgatgacttttgactcttaaaaacccttgaagttttaactctccaaggcaagcttggggtggagtttaaataatgggaaacaccctcacgatgagttgttttgcagagcagtttgagtaaatggtcatacagaggcttaggtttacttctcatgctgtggcgataactgcacgtctgttttycctctcttctaggggactcataaaagtctgaaaggcaacgcgcacgccctctccaccgtgacggccatcattgacgggacgggctctgtaggtgcgcagagagttttagctctgggaggtttggtgtcttaggggaaatcacattgtcacatgctcgtgaacaggtacccagggttccaactgcatctataacattgggtgggccggcttcttactatacgagcagatgagcaggggacatcggcacacagagatggtcacgcatgcctgggtggcttsagagagacgggcgtgtgactagctgtgcgtgtccaggttttcacccgaggcagtggttggcaaactacagcccgtgggctaactcaggtccactcattatttatcgccttcatctcaagaaaggcagaatcttatttaaattacagaaaaaccaattggtccaaaatcatacagggttctgagtgttaccagcatcgtcgaagctcttgaagagaattcagtggcatattctggaatttaaaaaggtggcagaataagcaagccatccccttagggagcaggcaggtggagctggcagagtgccagtctcctcgcccatgtgcagcctgacggcacggctgtggccttccctgagcccttgtatggggagcacgcacagtggctgcacctgccaggcgaaaatcaggagttgccacacctgccaggtgaagatcaggagggtccttcctacatgggggacgttatggggggctgcctggtgtggctgtcacagctaataaggaggacctggggtgccaacctgtgtgtcasttgctgcgtgggggtctccagtaaagccgagtgtttggtagatgaaggtggctcggtagacccaggtcagccagaacctggtgctggagccttcccactggctcgtgcagggagctgatgttgytcttggctgcccctggccttggtgccagcaggctggaaacatcacagcacgtttctgggtgcccactgctgtctcagtgatgcagaatgcaaagccctcccgccacatggcctccctgctgctcctccgaaggccaggctggcccccgtgcgggctctttgctctggtcacaccccgtgcctgggaaggtccccacaggtgacctcgtgccgcactccctcgtgccgcactccctcgtgccgcactccctcgtgccgcactccctcgtgccttgagtctttgcccagatatcatcctctcagcaagacttcctgggaccaccctgctgagaacgcgtgaacccttccgactcggcctccaggcccctctcccgggtctgttctctggagcgctctccccatccgcagtgggattcggtgcactcctctgttttgtctcctctgtctcctgccactggaacggaagctccaggaggacgggatttgcctgattctttgctgtatcccagtgaactgaatgagctgctcccagacagttagaatcrcagccggggcccaggcggctgactgcacagtgaggagccaggccggacaggccccaggcgcccccgcccagccctgggtggcrggaaccccagctccacgctgctgctgctgcgtttccttgttctgcgtttccttgttctggccttgttctgagaagcggcgggcagggtggccgttgccatgtgacacacggcctgattctgagaagcggcgggcagggtggccgttgccatgtcatgcgacacacggcctggttctgagaagtggtgggcagggtggctgttgccatgtgacacacggcctggttctgagaagcggcgggcagggtggccattgccatgtgacacatggcctggttctgagaagcggcaggcagggtggccgttgccatgtcatgtgacacacggcctggttctgagaagcggcaggcagggtggccgttgtcatgcgacacacggcctggttctgagaagyggtgggcagsgtggcygttgctcagaaagccacactttggcttttgctgttcaccaaagtgagaccagaccagcctcgtctctgcccttcatgttggttccttcctttcactggatccagaggggctttgagtgtattgggtggcggcagtagtcacccctctgatcttctgtcttgggcatctcagtaggaagtcgggggactgcggggctgagctcagttctggttgacgttgtgactgcgtggccttctcttggccttgtgcctcagtggmctgcagtctgcaattcggtctgactctgctgtgaaaccctgttcttaaagctaacttggcgctctactggcaaccccgattgctgttttaaaagcagargatcagcataaaaaaagagaaggaaatcatgaactaggtgaaaaaacacatttttcttcatattctcaaaatgagagggaagcagaagtctgtggctaagggtggagaccctgcgtctgtgaacagaggccactgcccaccactgcccccaagcaggtggagggaggcacagttctgaatgcctttggcccctcacaaggaaggtggcacacacaccggaccccctctggccttctgttaacctgcaccaagtcctgactgtccgcggagctgccgcgcccaccttgatggctgctgcgttacaccagaggcaggaccaggacctgactcctccaggctccactgcccatcagtgcctgctgcctgctcagtgaatggtcaccatggaaacggcgctcaggcctacccacccccaccaccacgccttggtcattgttccttccatgagtgagtgctgcccagcaagacaaagtacaggctccagtgggaaggccaccatgtcagccaagtcccttcccgarggaggtgcccgcatgcttattcagtgtcactgtccactccttggcagtgactcgggtggaggcgaaacatgactaatcgtaaatcacccctgccttctcccaagtgccacacggtttgttgacacggtgtgcgcctggggcgttcacagtgcttagaatcgcagaggttgccgtttctgtacatttcatgcagagcaattaaatagggcactgcatttttcttcaagttaatttttatttattaaagtaaaacataatgtaccttagaagcyagacagtcctacaagcttattatgttgtacagcggcgttccgtccccctccccagccctctctttctagaggcagccaatttcagctgcctctctctgcttacctacgtatttccatgtttcttggttcatcatctgaacgtcatcagctgtgctcctcttacrgaagaggggacctggctcccttccaccccgacattgcccacccctcctcctcctcagttataccagccatgcttctgcccttcactttccagccaagaaacaaactttaattatgcaccctcaatagatacatcttgttttttcccgggtaagtaaacatctcttttcctctttttcacatttccgrcaaagttcttccttccctgcaccgtggtcgccatcctgccctgccccacccctttcacgccatcagcctcactccgcccactgcgcggcttggccccagagcacctgtcaccacggtgctgggagtccccctcctctcttgcctgcgacacagccctagcagtctagacccctgtttaccactcctgtggtggaaactggctcctagcagcttcctgagttaggggaggtgggttctgcaagcttacaagtgcgtgatggctggattctgctctcgcctgaggcaatgtggacgtggaaacaccttctcttcagaacccccgtcttccagcctccattgcygtcactgacacgttcacagacattctgaccccagcccttgctttctgaccttctcttttttctcttagatctccaggttcccttccttaccccgggagcctttcttcatccaccgtcctggggcacctggtggcaccttcagtctggaaacacctgcccttcactttaggggaattgggcccctgttcgtttgmtaagttttcctaccattttctgatttgttttttctttctggaaaatgtattagtcagatgtaggcttttctggattaatccttcaactttcctttctttctttcccttcctgcctgtctccctgttctttcttacactttctcagggagattcttgactgtattttccaactttgtatcgaccattttacttttcctgccatattttcaatgtttactgatgtttctctgccctttcagtgcatcctgttttatttcatgttagactgaatcatgtgaaattgataacaggttttcagccacacacacacaaaaaaaaaaaaaagagwgtgtcctgaggttcagcttagtcttctgttggctctctggggggaggttcaacttagtcttctgttggctctctgtgggtgctgtgagctctgggaatgttcttctcctccaggctccctcctgccagcttgcttgctttcacgttggggtgttccccagacacagggcagacctaggttgccccttcatcacttcccatggaagaaggggccctgcatagtggtttgaagtctctctgtggggacagtgtgctggctgctggtctccaggcagtgggaccctgcggaacctgcaggaggagactccttcagtgcccaggggagcctgggtccagctgccaacatccttgccatggcatggaagcttggtggaagctggtgtctttccccagatcccctgtcgcctgttaggtgagcatccctgtcctgcactgggcttagtgtccccacgggttaagctgcgctgtcctgcacgggggcrtcaggaggagtctctttatcagtgaggatgagaaaagagacctgggatccgaggtgcggcagagggaatgtagctaacagtttgtgataaaagactcaacccatgcaccttttttctcttgctgacccccttccgttcccactgcgttcctccttccttgccttcccctcccctgtctcttgggctccgctgggcctcgctctgctccaggtgtccctgtgctgtctccctctgaggatgctcagtggagcagggaacactggaggctgtgttagctgtcagcccttctgtgtccatcttccaaaactacgtgcccttcggtgggaggwtttatcatctttagaagtcagtgatggygcagttcatgttgcttgggggtgtggagataacacatgagtagccgaccatgtttacctggaagttctgagaattaaaaaaaaaaacatacaattgctcctgggattataaaatagtaagtgcactttgtgaacacttgaaaaaaacaagtgcctagggcrtgaaagaccctggttatcttacctctcagagttgaatatgtcagttcataggttggtggaaattcttcatgctttttcccatgcatctaccaaaacaggccatcctacatgtgtatcagaattcatttcagtccctcttggtaaaatgcaccagatgctacaaaacacattcttaaacagcagtccttgggcatttagggggatacgttatttgttttcatcatttaaaaacacatcttgacataatttcagactttgagaaagttgcagaaatagtacaaagaattcagacattttagtacatgtggttcatcatgcaccygtgtttttacacacacacatgcacacacacatatatgcacacacacatgcataatttttctgaaccacttaagagtaagatgcacacatgctgcccctttcctcgtaactattcagcatgtacttcctaaaaacaaggagttccatgacagaccacagtgcatgatcagaatcagaaagtgagcattgaaagaatattagtatctacaattcttattcaaattttacccagttacatttttatagcataagaatatctaagattgtgcattgaattcagatttccttacgtgtactcaagaaaataatgggagtgttggatgaaaagaatgaacattgcaatgtcaacacacatttttaggatggttctgggaaaaggctgtgccagctctgccttcccagtacggaggcgtacaggtggagtatccttatctgaagtacttgggaccagaagtggttatgtctttttattttttcagattgtgggatatttgcattacactggttgagcatctcaaatcccaattctgaaatgccccagtgagcatttcctttgagtgtcagcactcaaaaagttacaaattctrgagattttggatttcaggttttcagatttggaaggctcaacctatactaggccttgtacccgctcccaatctgataggccaggatgaggtagtgtagttccatatgtgttcctttcattgtgagtgaggtgttgagccccattctctgtggctgctagttatgtgctgggattttctctaaacagcaccatgtgtgtccatttgcctgatttcaggagcagccctgggccccctgctggctgggctcctctccccgtccggctggagcaatgtgttttacatgctgatgtttgcagatgcctgtgccttactggtaagtcggcctatttttagtccaatccaccttgaatgcagatctctgtggttgtgtccaaacactggtggaactttctcccatgcattcctgagttatcagagaggtttgggtcttcccatcttttctaaatatgcgtggtctaaagctccttctctctctgattagaaaaagtcagaaacagaagcaggacagtcttgctctgcagccttgggcgggatagcacaaaggccaggagcgtggagctccgtggctctagatcctgcctgtcacctgtcatgtgtgtgacttgggcaggtttcrtaacctctgctccacagtttccacagctttaaaatgggcatgataatggcacccagtgacaagattgttgtgggaattaaagcagatgatacacagagcctggcctcccagtggtcatcagtgtcctggtgtccctcctgcagccatgctgtcagacggcgggagcggccccaacttctttcacctgaagggatgggagagaataaaggagcaaagaggttgccagtgcagacactgagtcgccttctggcttctgcccccttttctctgggctcctgcttctgtgccctcctgtgttgagaaagtttgaggttttcccctgggtaaggaagaccagtgatgatgtcacagtcacatagatgtgcagctgtgaggggtgcatacacatctttacaagtcacctggccacaaagtccccagacccacagccatgcctctcctctcacttcaccagacaaaaccttaggctgatcccaataaaaatgagttgagaatttcagaaatatcaactcactcaattaaatgaaagtcttatattttaattccaggaaattctaaaactcaacttccccaccacatacaaaatcaaataccractctcaacctatgaacttactaggtttaartggctgttctttggatcatctgtgggttcttttaatgcctgaatgttctaatgaagcctccagatggatttccactaagtagcagtaaaattcctgtcattacaactgttcagagaatctgaaatatcttctttagaactatctggtaatatatattgaaaattgttttgatgcttagccaaactcataagaaagtaaaggaactccccaggagccagaattgtaaaggcaatataaatacacaagctcaggaatcaacgggttggggtggttgtgcccacactgggtaagagacaaggcgttaggctggcacaagatgaagatttggaactggagacttcgtcatagagccaggaccctcgaagagccatgcttgcagtgaaagagtatactagatgatatctgcacactggcacaggaagamaatgggaatctgcccatcttagccagattagggggaagaaatctcccttgaaaatttttagccatagacctccccacagtcagctttaatctttgagcttatataaatatattttaaatgagcaaagttggtccttaggcagtaatacagaagcaaatagggacaaatctcaaccctgcagcataggatttctgtagctaacaccctacaaaagatgagctcacaatccaaaataatgaaacataaggaagcaatccacattgaatgacagtaacagacataaaaaatggtggaattggactcccccaaaactgcagataaaagagttatgtaaactaaaaataaatatatgcaatgttactaatgacataagaaaaaggaactgacctcatgaaaaaaagaacaagacactattgaaaagacagagcaggcttcaaaaacaaccaaacaggagttatagaaatgaaaaatgtgatctttagcctggaaaaagactcaatggatgggttagaaaagcaaattagataccgctgaagagaagattactgaagtgaaatatagatatgaagaaattatccagaattcagcacaaaaagagagatggaaaatattagagagaaattaaatataaaatggaggaccaaatgagatggcctaaagttatctgaaagtaattccagaggaagatgatagactggatttgaagcaatattttaagacaaaatagctgagaattttccagatacatgaaagacaaacattcttagattcaggaatcaaatgacttagaattctgtacctagataaacttgcacacaagagtaagggtgaagtgaaaacatttttaaccaaagatgctcccagcaaaaattgctaaacaatgtatttagagaaggaagatagatccagaaggaaagtctgagatgcaaggagaaatgcaagcaaaaamaaagtgatattcctaaggatgaatctaaaggagtattgaccatataaaataggggccagctaactgtggcctatttttgtgtgatcctccagctgggaatggtttatatttttaaatatgtctttaaaaaatcaacaaaagaatgtgcaacagaaaccatatggctgcaaagcctgaaatatttactatctagacctttacagaaaaagctttctgactctcagtttaaaacaacagcaataatgactaatttgggcaatataaaaaagaactgaaatactgaaaatgtaaggtacaagtgggacaatgagagttccagtacactgcagttcttatgttgtcaagccaatagcaatagaatgtgtaaccttcaaggcaatacagggaaatgaagacttaatctaagagaacctagggtcaggggaagcatagaaaaaaacagggtaaatacagaaatacagagcaacatggatgaaaatgatcccagcatgccagcaacacagtgacaataaatggacttaaactcatcagttaggagcagagattgtcaggttgcttttaaaaatacaggcactggttatttrcaagaaacacacctgctacactggaattccgaaaagacaaaagtaaaagaatgggaaactacacgacaggtaaataataaccagaggaagccggatttgctgcgttggaagaaagagacctaaagctgaagcacttgggagacgggggcttgtcgcagtggagaaggaactataccaggatgtgcagcaggtccgtgagcttgagttgggcttttcaaacctaagaactagacatacctttttctcttcactgatcaacatgctttttggtatcttttcaccaaaatagacaagtgtttcctcccgagtctggagctgagaacctccatgatctgagcaggtgtcctggggggccagagggcaccatgcttcctgcctcacaacrcacactgatggccagctccagggcctgcaggactgcctggcgcacgaccgaaggcctcaggtctccagtgcgtgtcgcctgggctcctggagttggtagggcccctccttgttggtcattcttgcatgcgtgagccaaacacgtgggcatgttttgaaattggatctctgttcttcagaactgtcaccatttacagttcatcccgtacccacagataacacttgctactatattcttcatctttttctctcttaatgatcagcttttcataatcataggcctcttygggctagcacttttcatacatcacacttggcaggatgtagatgtgggtaaggtaccagctcaaacacaataagcctgtgccrgtagttggagctagaggttcagattcacacagatggatttatttaacaaaaatcttgctattgtcaccagcactattgttcgtacctgccgtgttcccacgacctttaccacctaattgtcgcaaacacctttcatgcaccaagcagagcagctggatgcatcttatctgtaggaggsgcccctgttctctccagcttgawctcacctcatacaagggactcctaagctcctacttgaaccacaagcacctaagaaaatagaagagtttctgccttctagagctctggcctgaggcttggtggtggggccatgtgtttggtttttaagtagcccctcgagacyctccagcaccccttccctgcctcccctggaccagtgatccaccctgggtctgagggcatctgctgccctctaagaacgaggggccacgtccagggagagccctcctgtgggctgatgtcccacttggggagagactggatccacactggaaaatgcactagttaaattggaggtagcacaatcatttgtctggatttgtaggctggcgttgagccctcaaacatgtgaagggcacggagttaaagctctgggtccggcgaggagccaaggctgaggcagtgatgttggtggaaagccctgggccccggccaggcctggcctccaaggggctcccagtggggtgcggctgtcctgtgacagcctcttcagaccccagggctggcgccagaggaagtgctcacctggctttagagtcacctgagaagctcgcaggtccacccactgggccacccgcattatggtcctcttgtctttatttcctttttcccactgtggacatttcatgattggattaattttagtctaaacgtgacttgaacccagaagtagttcaggctgcatctctcccaaaagccttgttttcagggcagctcctggttcttcgtgggccttcatcagacagccctgcccwcatcagacagccctgcccacaggagcccaggcctccggctgagcatgcaagccccgctgctcttgcagggaggccaccccagggaaggtgctgtggggagagagccacccgcccaggccttgcgggccaggtcctcatggtgcccacggcgcgggccgccctgtgcctgctccagtaacaggtgggctcacctttgttttggtgcagttcctgatccgcctcatacacaaggagctgagctgcccagggtcagctacgggggaccaagttccgtaagtcccactcgggccctgtctccgtgcgtgaaagccggctccaaagtgccttctgtcctatctgccttcygcacctggctttcctgaaagaaagaaaacgcgtggcttatcttttcacggcacgccaccttcactctcrctttttctttkctaataaatacctcyggatgggttagtggtaatctctcctcaaaccctgagtggaaaatgtgagggaattgccgtctttggcattctgttggagctgcagccccccgagctctccttgccttcctgctcgcccccttctccctccctcctcttttccctccccccttggtcctccctcgctcccttctcacttcttcctggcccccagaaggctgcgggaaaggtgcaagggtttatccagcatccagcacccctgcaggagaggaatccctgctgggccgggagggcagctggctccccatrggatttgcacatggtgtgtgaagttcagcatctcttgctgagccactgctggctgttagagcagctcttctttcaacctttctttcagatttaaggaacagtgacaccccaccccagtcccgtggagggggtctgggcccacccttcacaactgcctttcaaggacagttcagacaaagggccctgcatggaaagagtgacctccctttgccttttgcacacgcacctggaaaagacacagaagccaacctgagaacccctggtgctattttaaaggagacatattgctgaacagcagtgagaaaagtctgcaggaactgctgcctgagccaagccagagaaccgaagacccggccggccctggcytcacaggcgtgtgcccatgcagccacccaaatgcacgcgtgacaacaaggccgggagggtggggggggtgcacaggtagccccgaccctctcaggcattccagccacagaacatcaaagtgagcgagtactgcgctggctgtggcttcagagaacctgtatgtgccacrtggaaaaacaggacaccagagcccaccagacagtgccggccagcagagaagcagagagccagcgccacacaacatcaagaaggccgacaaccaggttggaaaccaagacggagctcagacccaccacatcgccccagaggcttttccagcacccatgatgttycggactgacctaaaaactaattgtcgagaagccaagggtgaggaggcaggaagcacctccggttggaggcacccaggcttgccagccacagagcgccccraagtcaccgtcatcccagcccctggccttcctgcygccctccggggccatggcrctgctgttcagctcaggcacaggggcacagcagaggtttgggaagcggtctccccaccggcactgggattggcgggtccaagcccagcaaccggcttcgctccacaacacacaccacacctgggactgtttttaatacatagcaacagactgggttatttatttaagatgtgtattgtgtcatatgaagtttaagagacataaatggcattttgttatttattaagacaaaytccaattgttctctggctgtttttttcagttgtgtctagcaaaatacttatctgccctttgaaataaaatgtttttgtttaaaaaatctcagaacactcagagaatgttgatgatttctgcttacatttccattacgctaaaaaagggaacttccaaatcgtgttgtgtgttttgggttttctcaggcttggacacattgaggtttctcgggtttggacacatactgggaaaagaccatttccagcagaaaaggggcctacctctcggtcccttgtttgcacagaaggccaagctgaagtaaacagccatctgggtattttataaatcacgcagtttaaagaatatcctaagatttgtccttgacgaggaggtgtcacaccccgtggtggtggggaaaggtgctgaccttgggaactacatggtggggtccaggctttcaaacgtcctcagaatgctgaccgtccagatgtgcatggtgcgggctttctctggatggagtgctgtggaagttcacttggggacctctcacagcagcagggcaaaggtcagaaacaacacactgtgtgtcccgcagttctcaggggcctcctgcttgagctctgcggagaagcccacaggaggaacagacctggctgtggcggcttctgtgtgccagctgccccactagattggctcactctctttttaatggcaagttatttatacatttaaaagatttctgctaaaaaagaacttccctaaacaccaaatggatggagtgtgtttcccacacacgcagcgcactcagcttgtgctggcctttcccggtcctccacccaatgcttcccgctcctgggagcctcccactttccctctctccctgacctggctccaggcaccagtccagccctctcccgctggtgtcacagtggcctgggctgccctgagcccctgccggctgccatccctgaggacgggcaccagccccgtgctcaccacagggcacctcttccctctgggtgtgcagcactcgtatccatggggtgaacaagcgagggatgacgcagatggcacagtatcattacaggatgcacagagggctttttccataaacaaaattctttgcattcactgccccctgcctctccagaactgtcccctctgaggcctcatctagtcagaggcccagggctggtgggccggagcggaccttcctcaccccatagccaccagccagcattcagcacagcagctttgaggtggcgatcgctatttccccaactcaatgaactaaagtactagaagaaaatctcccacaactcacaaaggaagagcaacttcccatttctgaaccctctgagctaaaccctgagaacttttggaaatggagagtcgatcctttttttaaaatgaagagtatacacacagctatttttttaaagcaatttagcggaaattcaccttgattcatggatggaagatttcattatgacttttaaggaaaaaagtacatgatttcaatataaaaatacatcttcatttgagcatagctgaggtattttccatctgcaaacagccagctctgagacacacacacttgccgtcctgtggaagcgtggctctgcctgtcacgcacgtctgcgcttgccgtcctgtggaagcgtggctctgcctgtcacgcacgtctgcgcttgccgtcctgtggaagcgtggctctgcctgtcacgcacgtgtgcgcttagtgcacatcactaagactctcctattcatgttgacaaaaaaatgccggatcatggaaacacaagctggtgacagggccaacaaaagagctcaaggtgggactccagctctccagcctgtctgtaggtaggaaaaactactcctggaagctcacctcagtgaatgcacctcagagtccaagagctgccgcgaatacagggcctggtggctgctatactgtgcgtctcagagcagagccagctctcccatcgccagcttgtaaaatccaagaaaacgaaattgcttgataaactacgagctgaaaaaaaatgagccctgatttattattattcaattcaacagacataaaaaccactctgctaaatggccacaggaccactccagtcttgactcagcagagcacagctgggccaggtgagaagcaggtgtgagggcactgtgtcccttgcaggctgtgcccacaaggcacccaggctgtcccccacagggctccgatgcgccaggtcacctccattcccaaggctccgcattgacccacagtctctgcacaggacaccccaggtccctggagggcagtagaagaggctgtagcactggctgccaaggcaggggcagctgccaggcccaccagagaccacgggcagtaggcaggtcacttcccagggtggggggggggctgaggtgggagcacaacctaggcccctcctggggaggtggtggagtcagaatcacgtaagagccaaagttccagtccctcagtgccggctccattgtcccctggacttcccttacaaaccacagatgcaaagagagcacttctcagaatctccacacagccacggtggagcactcaacccacgcgaccctcgggcgcaggtgctgggtgactgccctggccatgtgccctgtggcccgcagaatgacacctcatccaggatggaagcgggaaccaaaagcctggctgagagaccccaggggcctgagtcgggaggagcgatggttcatttggaacccagtggtgcccttcactgagtttgggttaactgtcatcacttccctgtcccgtgcgttccaacgtgccctgcccctgagaacagatccaagggactctgaagaacgcagtcctgagctgcttgctcattctgaagccagctcttgttgctggccccctccaagggggcctgtgagctccagacatggggataatgtggggtctgggccacccgtagtggtggccaagtgcagcatgttccccgccacaccccttgggagctggaatttaactccagctgctgaacacaggcagtgtttctggcacccagggcctcaccctcccaggagagtccatcattgctgagccagtcgcaggtcaccatgaagcatcgccctgggcagcaagtgggatgcaggggcacagcagggcacgtcccaggcggctgagaaagtccacggagggcaagggcaggggcgtgcgccatcgtcggagacagtcggggtgggcagcaccctggactgctgggaaggacagtggggggagggtggaaggcaggggagcccttgccagttgagaatttcttgatccttggaattggtccccaacatcctctgggacacgcttaacaatggtcaggtctggtaactgaaagaagcaattgaggtaaatatctcaatcaaccgaggtttattctgccagcgttagggcatgtccaggaaaacacaagccacagacacatctgtggctgtttttctaaagaggcttacaagaggtttggtatttagacattgaggtgaggtgaatggtgacattcttgtgagacttcagttagcacccagtaaatctgcatttcacataaggtaaatatttgaagaagaaaagggagcaaaggaggaatccattttgcagacttctctgggtaggtggaggaacacttgatctcgtcttgtctttggcctgcccctgggaggacaagcttgtaaaggacattatcagcatagaatggaacagactctcattttaggagctggacttacattgcacacctaaatttatgattggcatgtccttgtttatgggaggccagcaaagaatgtactgatgaaagatctgtgggagcacttgcagacggctgtggcctccacctttctgtggggacctggctgatgtatcctattcatgacagctgtccatacggatgcagcgttgcatgattctcactccaggcttaatcttccctttggcataagaagtttgggcatcctgtgatttttacgcccacagccacttttttttttttttttttttgagacggagtctcgctctgtcaccaggctggagtgaagtggcgccatctcagctcactgcaacctctgcctcctgggttcaagcagttctcatccctcagccgcccaagtggctgggattacaggcacgagccaccacgcccagctaatttttgtatttttagtagagacagggtttcaccatgttggccaggctggtctcaaactcctgatctcatgatccgaccacctcgacctcccaaagtgctgggattacaggcgtcagccaccaagcccaaccagccaggccaatttttgaccaaaacaggatcggtgagtggatgtcatgtgtcatttgggccaacagtgaacacggactttgaaggcatcttgatccagaatattccattcccttcttccttgacttggtaataaccaagacggttctgtctctctttgaaattctaaaatgaggcaggcattggacattctgttactgttaaaatccacaccctgcctgcctctaaaaggaacttggagtggagatgcagaaaaatggcaggtgcgtttaaggagtccctgcaccccacgacgaagtgacagccacacccagacatcctggagcccaaaaggaggagctagtggctctggaggggcagcctctccgggtctcaagggctattattattattttttttttttttttggaactgaggtgacatttacataacatgcaaataatcatttcaaagcatacggtcggtggcgtctggcgcattcacagtgctgtgcagccaccagctctctcaaggtcaacacgtctcatcaccccagaagatcactagaacctggtaagcgatagctccccttcccctcccatttaaaatgagagttttcaaggagattgggtccagggtggctgtgagcactaaaattctggagcaaggtgaaaaatagaccccacttctccttccatgctaagccactgattcattaaagaaacacagggaaggagcctatactcaaaattagcatctccagtggaaacatggcttgagaattatgcgtccttacggaccagagaccaggcctccaagaattctcccaggaaacaaatgtccagcaggaccatggctgggctgtcacgtccagaagccaccaggccacagcaggggccccggcaggcaggccaccgtcggaagccggcaggccaccgtcggaagccaccagaccacagcaggggccccggcaggcaggccacggtccagaagccaccaggccacagcaggggccccggcagacaggccacggtccagaagccaccaggccacagcaggggccctggcaggcaggccacggtccggaagccaccaggccacaggaggggccccggcaggcaggccacggtcggaagccaccaggccacagcaggggcccccggcaggcaggccatggttggggctgctttggcctctctttcccttttgcaccagctttcaataaggctttcttcttccacgtccccacgaccccttgatcgtccacctgctattggcagcgaagccttgaggctctcatggtgtgtccccacatgtccgcagacgggaaggagtcaccccagcctcctggggcagcaggatgcagcatatctgactctcatcacactttctgtatctcagcaagttaccaacatttctttgtatttacttctggtaagaacaaaaaccttagctggggccttggctgcccttggagctgctgggaaagttacatgagtagaagggttgggttaaagcatggaaacacctctgtctacaccagctcacgataagcctgaagaggagtttggagtccctcagacgctttcggcaccacttagtcagcggggggaataatagctttccgggaaataggcccgagacgcgggaagggaagggaagggaaccccgtgggaaagaccttactcattctgccccttgcagtcagcacctgaggagaagcagcggggaaaagaagtgccaagctcgccgcgttgaccagtgtcagggccgagtagccacaggacagaactgagaagcgagtaccaacatcaag

SEQ ID NO: 98150 - DNA, 15895 bp, Homo sapiens
acaggaggtaaatgttaaacgctagcaaatcttttgagaagcattaaaaaaggttttcgttacatcacaggtatacttaatcataacgtcaaagcctctaaaacaaaaactctgtgcacgcacttcaggagtttttcccacgtgccgcgaaagaagggagcctaggtgtctggagagatcctctgcacccagcactcggcgactggcagcgggcatttcagcacctgctaaagcccgctgggcagcttggcagcgccaggcgcggggctgcggggacacggcccgcccgcgcgcagggcacagcgagcacgtgagcgcagagccagctccggagcgctacggcgcgcgtggcggcacacctgctccccgaggctgatcgttaacagccgtgggcaggggttgggccagggtacagctgtcaggacctcactggacaggaccggagaggaccccgcgtaaccgcggaacagacactcccggcagcggccgccgccgcggcactgctacgggacgagccggagcgcttggccatggcggcccgatccgcactggcgctgctgctgctgctgccagtcctgctcctgccggtgcagagccgctcagagcccgagaccaccgcgcccacccctaccccaatcccgggtggcaactcgtcagtgagcaggcccctgcccagcatcgagctccacgcctgcggcccataccccaaaccaggcctgctcatcctgctggccccgctggccctgtggcccattctcctgtagggacgcccagccagccacctctaagtcgccgctgggactggcctgccccattgagcaacagagacgcttgacagccgcccgcctccattccttgacttcacccagaaatgggtccagaaaactgaatcccaccagcactggtttggagcaaccggacaccgaggtttcacctccagggattccatgaagagcctcaatggagatgccacatcctactgagttaaagatgggctgaggaacttgggtacccacaagtctgccttgggaatcaaaagaaaatatttacctttagtttggttcattaaatgcatgaagtcaaaatatgaccaggtagtgtgcgaggcctccttgttctgggtagagctgggaagggcagggatggcaagcgctccctaagtctgccacctgtagccttgcagagttctctaggaaatgcactgctgctctggtgttcagtgcaatgcagtatttgacttgggaacagtgactgacgggggccagtgcaagcctagttagtaagcccagcctgtctactccactctcacccacacatccccattcttccaaagaaccttgtagctatcatttcaacctagttccaaagagcagacatacataatctcacataacctgcaatgctgctttttaaatttctgtatatgttgaataatttttacaagttaaaagtgacctttttaaacatatatttttaaatctttaacacggggggagaaaaaggaaagttttggaaagggaagactagaagcttggctggttcagttcacacaagttttacactatttctatccatgtgttatctttataaatccacatttggaatacttcccatataaatatctttagatagaaactgagactaagccttgagtagcttctggaaagtaaccccaacaccaccaccaagttgcacacacaccaatgtccagcatctaggagggcttcagggcccccacagcccaagacgtgccagcccaagagagcactcccagaaactccagatccagccagcctcagaacagcatgtgaacacttcacacgggcttactgtgcatgttttggattgagccttgtgttcagtaattatgcttggatttacataacttaaaatgacatattttaacataaattgtaaatttttattttttatttttttgagacagagtctcgctctgtcacccaggctggagtggtcccctcccaaggttcaagtgattctcatgtatcagcctcctgctcgctgggatcacaggtgtgcgccaccacacccagctaatttttttttgtacttttagtagagatagggtttcaccatgttggccaggctggtctcaaactcctgacctcaagtgatccacccgcctcggcctcccaaagcgctgggattacaggcgtgagccacccaccgcgcccagcctgtaaattatttttttaaaaaggcttgcagagcaatccgaagaccctaatttaacaggctgtatactaggcactgaaggatgatcaactatagcttcattaaaggaataatgaaattgctgctctcccacaggaaattacagttccccggtcaccagccctaccaccaccccctcctcaaggagaaatgtggaatcaacaacccttaagagaaatcctgagagggaagacatgcgtgaaaatcccattcaggctatgatccacggctaaatttcagtcccaagcatctatcacatgtcacctctaaagcgccatctgtctgctggtaacactactactgaagcatttgctctgctgagggaaaacaatatgctcctatattaggggtcatttctgctctacagggaagaaggactctgtctggccttataaacctagaatactaagaataacctgacccccaattctgaggcagaggcagtgagctcaggtcaaggataagctctgacagttgtccagtcaatgccagagaagtctctctcctaaaagagaaacacacacaaatatacacaagattgaaggctgaggaaagtgctcgaaaggaggctaagagcatatgtgtgcaaatagcccaaagagaacagcctccagctcctgcctagcactcgccatcccccacactgccacgaacactttacctaatcatgtaatcctcacgggaatgaggcaggtttgagtgtccccattttgcacatagggaaactgaggcccagcactgcagctaggaagaggcagggtggggatgattcaaactcaacagttttgttccaggggccaggcaccctccactgagaacctagaggatgcctccataaacaggcaggtcgggacgggatgggagacaacggtcatataatgagctggggcagaaggggccgtcagcagaggaagagcacagatggaaagccaccagctgggaataagcaaagcccaggcaagaaacttctaggaagctgtgagcagcccctagacagagacggggagagtggtccaagggaggaggccatgggcctgcagcagacctgggagagtgctccaagggatctggagacagatgggagccgggtcaagcacagccgtggggtgaggaggaagtcacagttgtattccagatgccctggtgggtccgtggagcctgcaagcacagggcaggaatgacttgccagctgctggacagcagggagacgtggaaaggcaagcacccgggtgggaagcgaacgcagggacagcaggcacaaatgtttgaggggactgggtgtgacggtgagggaaagcgaggtggctaggatgactgccaggtttccagcagctgggtgggtgttggtgacgttcactgtaaggagaaaggctaggaaatttaggaaaatgaagctctggtttcagatgttcattttgtgacacctgtgtgacatcagtggggagcagggcgaggctgcctagcaggctgggccagaggaccacatggagctcaggttgaaaggcaaaggcactctccttttcctttagggagcagcggtttgtctctggaattgcttccacccaatggcctccctgacagctccccttgagtgcccccaagtcagcatacccaaacagacctgctagtctaccctccccatcaccacagtgggctccctcccagctgtccagtcataggcactgccttccaccttgccacatggccagcacccaggcatcctcagaaccttgcacatgtgtctgaagtccccaccagccatgctccatcactcctgcctggacagcggcccctcggcgtctgctctccacctgttctcctgccacagggacccttccacggcacaactctgagttcatgcccccaaccacaatggcttcccacctccagaaaaaaaaaaaaaaatcatgattctctaccatggccaacgccttatactttgtaccacatcacacagggcctcggtatctcctgactagttttcaaattgggagtgagcaccaatccagtagcccgaaaatcatgttagcctccctcatttgcacatcaggcttccccaaagctcataagcttagtttttccagcatttgctcttttgtcctgttaccaaagagaaggtatgtgaccatctcacagtggaaaatactctccttaaagaatggaaagggccaaccccacccgtctcgtacctaaagggtgctgctgaggaaggaggggaactacatctagttcccagcagaaaacaagaaaaagaaaccggacttgaagaggaagctacttgagaacatttaaaaagaggagaaaggctgggcgcagtggctcacacctgtaatcctagcactttgggaggccaaggtgggtggatcacaaggtcaggagatcgagaccatcctgactaacacggtgaaaccccgtctctactaaaaatacaaaaaattagccgggcgtggtggcaggcgcctgtggttccagctactcaggaggctgaggcaggagaatggtgtgaacccgggaggcagagctggcagtgccactgcaccgcctgggcgacagagacagactctgtctcaaaaaaataaaataaaaataaagagaggagaaaattcctcccgaagcccaagctggcttccccagaggttccctcatctctcaggagcacttctgggtgacaatgatgggttctttctatagtatgatcgcccctaggaacgaccagggaggcctcgaggaagtacatggggacaagagcagttccttctggagggaaggctcaccagaaacaaatccagagatagaaacactaaagggaaaggagagtggatgatgaagggggagcactggggctgtccctccaacagcctcagggcagggcagtgttgaggacacaggcccacagcagccagcccagacctgcaggaagacaggcagggccggcacagctggtgcagggagcgagactgcccagcttccagacttccaacaggagatatgcaaaacccttcctcagagcagagggggcacttgtcccttgcgcttctgttccctgtggacagaatccaactcacgcactctttcctgcagaaggaggcatctagaaggaggaaatgggctgcttagcccagccggtcctcctctcctcttgggctaggcgcacccacaccaaagtgctagggtttcttctcctgccacgtggaaggggcttgcccccagccatgctcgttactaggtgggaagtttgtctaatttgggataaaggattagcaaacccgcttggccagtcagccactttctccagttgcttttatctaaaacagagcctgtatctgatctccacttgcctatctacagtgtgtgcggctctctcaactggtctggaatttgagagggtaaaaagtgggtgctaaatataaagccccaacagccccactttttaggcctccctcagtcaggaaccaggacttacagcctacagctccttgttgatctggctgtgggagacccttactcacagagccttattttctcgagcacagaccctgccccaggcatctgggcaaccagaggtagccgtgtaatactcttccagccaatgagagacactgggtttcctgaactccttatcgctttcctgatgcagagacaccccttcctgcctcaccacctctcagctggaacgtcaggctggagacatgacccaaggagccaagcccgagaaggaaacgtgcaccctgaaacagcgggatgcagaaccctgaaacagcgggatgcagaaccctgaaacagcrggatgcagaaccctgaaacagcgggatggagagacagaagcctcgggaaacrtggacgacaatgtgaggcccctgtcccagccccacaccactgggggaagagctaacagaaaaagggggcagagaaaaaacactgggttgagttccaggcaatggtcactgcaggaagctgaaagggggcaggatggacaggagcctggggaggggatccagagctcaagcaggtctgtgctgcactgtgtcagagctcacggcaaaggccggagcatcacacgcagagcaagcagggagcgcagcctgggctgggggcaggtaggctgcacctgcagggctcctggtgactgggggacctgcacagaagactgagccagaaggatgccagggtggcactgcccacrgaatccaagaggttggctagttctgtacagtcctgttgagacactgattgagaccaggacgaaatacaggccactgaccttaacaagagacagatcattagtgactagcaagacccatttcaragggatggaaggccaaaacttgaacagaacagactgaaatgtcaaggaagtcgtgatagtggagaaggtgcccagcacatgggcagcagaatgaggctgccagctttgggcaaggagactgagtgcaaacctcrcctctcagtgagcgtccaggcccctcggctgatggaggtcctcaattggtcttccttcatcacagttatgactttacatctgcttgtgtgagtacttgatatacagacatctgcatcactagaaatttccatgaaagcaaggaccatgtctcatttgcccccctctctcccctcaacatgatgcgagaggttggatgggaggacaggaagggcagctgtgtggacaggaagcccaccaggtcagctgtgtgaggaagcagtctggggcctcagcagggcccacgtgcagggccgtagaaaccttgagagcagaaacacaagcagacatagtgctcggggctgcttccatgtacagaggatgttccctgatctggcggggcgcctggcagcamgtgagtgaggctgatggtagtggtgccaaaacaaccaaatgtatctccccaaaacctatcattcaaaagtatcctaggggattaatcaaaaactctcaaaaattttacttgaagattttccagtttaaaggtaatttcaggcaataaactagtattgggtccaaaatgagctgacagtacctgggaagccacactactgcttgataaagacacggaccaacagcctcacagaggttatcagtgagggatcttgaacagagctctaattgggtacacgctaattgctttaacagacaactgcttgcagagttggaaaaaatgcttttgaatgtttctgaacaaataatttgatatattctatttctcaaaagaccctcactttttaaacacaaagtcatcaaaaaaccatcttatgaaagagaacrttaaatataacattaagatcaagaaactatcttttaaaatcctgtaaataaaaaaagttayaatcaggatgggcagacaaataattggatcaatcacaatcacctcaatcaatgactaacaaatcaccagtaaaaacgaagtgctaaaaagcgagttatttaattttattttwtcagacacttctctgaggagcccccatgtgctgtgcagggtcgaaaaacccaatcctaatgtacttaaaagggcagatgagagacatttgcctgaaattaaaacataaagtaattctgttctgggactttatytgaaaatccagaagaagcccttggccggaagcatcagcctccagggcctcttcaccctgacattcctgaggctgcagcacagtctccccatacccctggtgaggagccccctggagaaaagatgcacccatgcctcctccgggcacacagtcaaagggcctcttcctgagagaagaggacagaacttcccaacaccccgaaccttcactccaaacagggtaagacctagttccagagtcacagcatgaaacgcaagaggcggcagaaaaacccacaagtcagagaacagcagctgtgtggcccagagggctcggcacccacagaaagccgggtcctctcttcctcttgtcaaggacgtcaggcagaggcctgtggamacctgccaatgggagcagtcgccagacctagaagagccaagcccggtgtgccctcgcctggagttgtgagaaaagtccctgtagccccagatctagggcctccaacactctcctacccgagactcctacccgaggctgccctgggaactggtgagaaaagccaaagtgcaccccagcaaagtgcctggatcagtccagttcctgaagccaagtgccggtggggcgaggtccaggcacagaatgggcagtggccatgctgcttccttcctggggaggctgcttatttcagagactaatttcctggttttcactgtgcctattgtgtgaatatttgggggtggggtggggtataagctgagactcatcagaagggtttcagggcctagtaacagattaccctgttggctatagaaatgggactgagatagcctcgactttagaaaatggaacatgatactagttttgacatctttaagacttgggctccatcaagaaaaaaaaaaattaaaggtacaaaaatgtgtgataatgaattactcctattttacaggaatgggagrcttgatttataaaatagttttttaaattattattcaggtaaagggttagatttaagctataaagagcttgactggttttcctctgccttgtctgctctgttttggaataatccctaatattgttcattacttcaaaatttacagaaagatgtttttgtttttcctgtgtcatactattagtatcagtctagtcaagtgacttgtaaataccaataaatagaatgtatccatttttaaaaatccaacaggagmacaataataaggaaaaagttaacttttgactaaagccgaattcctgattctaagatttaaaggtcacctaccaggattaagatttggtcctcacaactgttacctgaaggtaagagtaaattccaatggtataactatataaaaaaaawagataacagatatttccataaaaattgtttatgttcatttttaaaatctctctcatcaaacagttgtaatgcagtagagagaakgagaagagagagaggtcagaaagtcacccagtaaacaaaaggaccacagatttttctccatcctcaacagagattccagttgatgaagaaggctgccatgcaggctcagggcaaggaaagggaatgtgctgctagcactggacctcagctccgggcaaggctgcaccttctgaaccgacggcccaggagcgaagtgayccatacttcctccaaagcatcactctccagacatggtaatccaggcccagaagcaaaggtcagtcccactgtgcctgtcacacactctgctcctctacaccctcctctaggaaatgaaagaggaaggatgttgatctctagggtcttttaaattgttccaaataaataaaatagaattattttctcttactaaaaataaaacactgattttcatattaaagacaaattaattttgcaaaggattaaaaaagcagaaatccaaatcagtttagcagaaagatgaacagatggatttctgaggtccactggcctgcatccaaatttcgcagcctagcccacggttaaactcgatctggagtcttccagctcctcctcctacagggaaacccccactctccctggactgtggtccacaggagaacaaggagctctactccacaggacaccagagcatgagcaaacatgtggcaatgctgtaggatgctggtgaccaggatcctgcccctgggagccactaagctgccagaagacacagtcacccaggcaaggctgtgaatagcaccccatatccctattgctctccctctgagccatagacagagatcatgctggtggggaataaggtctcatgatgtccagaactatagcagaaaactgtaagctgatctcctgctcctcattaagtgatgacagttcacacaacacaaaaagtgccatttcaccaaactgtagtattacaacactttcatcattaacctttctaaagtaaaaatcatcagattcaagtcttctgttttttcatcataagaattcaataaaagcagaaataattatataagcagttaagccaaacgtcaactagcattgaagcagtggaagaaatcggattgatttagagttgatttaagataataccaggggcaaagacaagtggatgtctgagttaggggaaaattggcaaggacggtcaaatagaaaaaacacgtgacttaaagacatagcagaacatatgctctgtgaagaaagggactgagttatttcattcactgctaaacctttggtatccaaagtgctcaaaaaatatttattcaatgactgcataaacacatgaatgaaaaacgtcagtttatatgaagctgatgaacttcatgaatataacatggcagcaatgcccaacatttaagaaaagttatcacagaacctacattgtttaataaagccagtgccacaataataatcagatgctcaatttttcaataaaaatcattacaaaccctgcatttcgctatctacaaatgaggtggccaaggcagttcttggggggaaaacgtagagctgcatgtgcacagaagagaaaacaaggatgacgtgaaaataaacaaggtattcaatccccaagtgagaacaaaggtggagagaggtcagaaccggggtcctcctggggagggtaggagtgctgagctgcacaggtaccaggaagcctccgggttgatcccagtgatggttgtgtgagtgcacacagatatgagagtcaccaggctgcacactcaggccccactggtatacttatacctgttcatgagagaagactgtcacattttcaggaattttgtaaaccagttgacagctcatcggtagcttgaaatagggcacggtagggacatttataacttggaaattggcaaatgctacaaatcaggggtttccatacactcccactcctccttcccaccaaaagccaggtgttaagcacttataccactatgtagctactacagcatgtaaactacatgaaaaaaatgaaaagactaggggtagggctggggagagactcattttgaaaaaatagaaggtattaaaataaatagcaattttaattttgcactgtgttaaaaacaggattttccccagaatgcaggaatgtttaatatcaggaaatctattaatgaaatttgctatattaacagactggagggaaaaccacgtgatcatttcaacagacgcacatatggtaaaattctactgccactcatgataaagattattttggacaaaccaggaagagaaggtaacatgctagacaagataaagggtatgtacaaaacaactagagtaatgtcacacttaaggatgaaatactggaagcattcacgtcaaagacaacaacgagatgcagcctgctagccatcactatgatccaaacactacactcagcacagtaccagaagtcctagccaattaatacaggggaagtacaaagcttagaaaggaagacgcatgttcccaaaaggatcctccatctagaaaacatgagacacaaatgacaagctgtggacacaacatacaaaaaccaatcactttatcacacaagaataataagcaatttgaaatatcattgaaagaaaacatttagtagtgataaaggtgatatttctgataactgggcaaagggcagactactcaatgacaaaggcaaatgattagccaattgaaaaaatatcccaacttcaaactgtacaaaaacaaatttcatatagatcaatatgctaaatgtgaaaaacaaaatataaaactattagaagaaattaaagaaaaatatgagtattgtagtagggaaagtattcttaggattcaaaacccaaaagccataaaggaaaaaaactgataaatttgactatatttaaaatttctttttagaaaaaaaaaatcgaccaaatccaaagaccaagataaaccaggtaaacagcttcacatgggaagaaacagagacaggggctggtcctgccatttctgccattctcccatcatattctgccatgggtttctttttcaactttttatgttgaaattttaggcttatgggaaggctgaaaaatagtacagataattcccctatgtccttctcccagcttcctctaaaatcatagatttgtaagttgtgagcatgaggagaagtatgtatcaatcacagacctgtatgttgtgagctgggagaaggatatatcgaaatcagaaaataaacactggcacaatacaattggctacaccacagacctcatctgaatttcggtggtttctccaccaataccggcttctgttccaggattctgcccagaatcacaggccacagttagtcatcaggtctctaagcttagaccaatcctcggtgtttccagtgttcatgacctggacacttctgaggaacactgatgaggtgaggtattttgcaggacgtccctctactggagcgtctgacatttctccatgactagactgtgattgtgcatttgtggcaggagtccctgacagagcacatgccatgtggtgtggggcggcatatgatgcaacttgtctcatcagatgatgctgatcttgatcgcccaggtgacgtggtgtctgctggcttcctccattctaaagttactatttttccctttttaataaataaataacttgaggaagagatacttcgagactaggcaaatatcctgtttctctccaaactctggcccactaatcagcatcctcccgcggaactcacctgaagtaactatttccatagtgccgcctgaaggcgattttctattttctcactgctcctacaccaattaattggaatgtttctgtcaggaagagatgtcccttctccttattttttcaatttcttcttatatcaatataagaagtatcagtagtgatactgactttgttttatagattatacacctatactatcattactcatttccttgctcaaattgacccgctttggccatggggctcctccaggttgcttatgtgccctctgacacaccccatccattttggccacttccttatttccagcatcatcagaggttccagactcatcttctgcaaggagccctgcttatttttatcagcaactgatatttaggtgtgctccctgttgctggaggtcattgcttctaggtcttcccaacggacaaggctaggagatgcatatgtaggtgtatcactaacccatgcatgtaacgcgtacacctatgtttactcctgtgctgtacatgcatctattaaagaccacagagtcacactgacacctatcccaatccaacagcacggcctccctctgccatcttccttttgctatttgtaacttcttcctgggacagtgagaaacctggctctcattatccactacgattctgcttatttgttcaatccccacatacacataaagtcgtttcacattgctcaccattaacactgagaaaaaaatttactactattttgtacagttctcttcagcctcacagaatccagtcaacattatcattttcccaaataaggttaacactttcctttccaccccctttgctgtggccctgccgctttgtactacagtgagatgtgtgttttccgcttatatttcattttgggtcccccacatcctggctgatattaaccatctattttactttggagtatatgaagtattgctgtggtttcaagagctgggccacactaaaaggtgtactgagagcagcactgcaccccacctatgacctggcacccactccacttccctgccccctcgccctctgcaccccacctatgacctggcacccactcctcctccgtcccctggccctctgcagtcaccatctcttttgtttctggctctgccctcctgtatctcctctgcacaagtgtgcagggagcgtgtgtcttcctgcatccccttcttctcacatcaagggcagcatttagatgttctttggtacttgcctcattcacatccacgtgccctggaaaccacctcaaaccaattcacagaggtcatcctcaacagtggatgtggttgtgtggctgtactagagtttactcaaccctctcctgcatatggatatttaggttattccgaatgtattttcacattgttggaggtctatcttctggaaggattcctagaagcagaattgctgggtcaaagggtaagtgtttctgtggtgttgtaggctgaatgtggttttaatatgcccaaccgtacttcaccgacttcctcttctgataagtggggggaaaacatcaaacacccggtaagaactcatctgctgaggacctaatagtgtgcacaacacaggtggtcagcttaagaaatgctaatagcttctgctcgacattataaccatatttcatcctatagtaggctcatacaattcaagaagcacaatgcacatcacagagacagacttcaagagcaagccaaataaatggcccttgctagcattatcagtatcaaacaaaggcttctgtcttaaactccatttcgaagctcctacgaactcctaggaatctacctatgacaaatgaaaatacacatccacacgcagacatgcttgctaatgttcaaagtcacgtgattcataatagccagaatgcagaaacaacccaaagtccatcgctggagtggaataaacgaacacgctacgccaatacgactaaaaggaacaaactactgatatgttctacaacacacggatgaacccgaaaaacatgttaagtgaaagcctgatgcaaacgatgacacaggacatgagctgcttcccatgaaatatctgcaaggcacatgtggaaacagcaggcaggctgcctgagcggttgcctgaggctgggctgggtgcgcgaatcaactgcagacaagcacagggaacatttgaggtgacaggagtgttcaagaactagacagtggtgatgtctgcacaactcagacattcagaaaatcactgaattgtcctcttagagagggtgcatttcatggcagctgtttaaaacaaaacaaaaccgcctcaaaatgcctttcctatggtttattttctccccgtattttcccagagcattctaaaaaggtgaagactcaaagcattatttgatcataacttgcaatttgcattgtttccttcaacaatcaataagcccaggaaatcatctagacaaattctcaatgcagtgtgaaaaggcacacagggcaggtcttctgtccaacagcaccgccctatcccggcttcacacatagcaagcagtgtctggcaaatcaaagcctgccttttccattctacaccgtagctcaaaatcattgtccaggaaaggaaaaaaccttccttttcctacagcaagggcttccagcaataaacagaactaaaatctatcaggcacttcttgcctgtgccacacataacacgtgcctatggctgattcgtgcatggagaattcaaggtgagctgcacgggaggctctatgtcagttctgcgtgagaggcacatgctcaatgacgtcctttaggttcatgtgacaccagccttttctgtgtcaacagaatcaattcctcacagtttcattagagggataaaattaaagaattgaaagcttcactatgtaacaagataaatatgtcactcattcacctgcatgtgggtgaaaacatctactacgtga
